United States Patent Application Publication US 2011/0191912 A1 - sequence listing, part 18

SEQ ID NO: 28104 - DNA, 3003 bp, Unknown
  misc_feature (1)..( 3003): 2750-1469P.txt file - cDNA_ID_2993912; gDNA_ID_1621099; Annot_ID_55792
cttctatttaaaaaaaatatagacaaaagtttttaaagtaaatttaagtaaactaataagatctacgaattgtgaaggtttatagaattaaatctcaaaattaatttataatcttttggataatttatactttatttaatagagttacatcggagttttcttcgaatatgatataaaacttctaacaatatttctatataaattttgcaattttaaactaccaacttcataataataaagtatcggaagatacatcttttcctaataatttaacaaaacaaagtttactcaaatctcaactacacacgttttcgaatttaacattgcgtatcaaattcgtcgaatcgtcaactaattctagagtaaacaagatcattggcaatactcttaaggaaaaatggatccatttgattatgttacaagtgataagagttttgaactcgttttgtgtcaaatgttccggtctccaatatgtaaaagtggaaggtttctcatgcttctcttttgtttgttccaatcttcttcctagtattgccatggaaaacatcaaccatatcgtcaaaatgacccgttaaataactaaatattgtaaaaactatttttaagttttcctttcatttcatggtaacaaatatatattttccagttatttctgtttaaagaaagtttcatttgagatctgattggtgggaaatagaagaaaaaaaactcaatctgattttaaacctttaaaagcataattcggttgatttttattttattttattctgattgatagaaactggaaagtaagatgaattggacattaaaaaaaaaaaaaatccctttaaatttgagctaattatagcaactagtcagatccttcttttttttctttgaacagaaaaagaatcgccaaaaaaagaaaaagatgtacttatttagcgaaaatatttttcgtagtaaaaaaacttctttcaatatctttgcttgaatgtgaccatttctattgcacatacaaaaaaacgactataaaaaggacccacagtgattatgaaaatcagattgacgaaaagtttgtgtgtctgattccaatcatattgatccaattcattcatcatattcgatggttgtcaaagcatatagctggattaagtggggcacaacactgaaaacgtttctcaaccgtatgatgtcatttcagcctttggttttctcaacgtttaatcggtgaccgtcaatttcttttcaatctctataatcatttcttcttttggcgtgtcactgggaccttcactgtcaatgctgaattaatctcctttaaggatttgaaggcaagaaaaatcttgttgcaactaataaaaggaatcgattttgatgctcattaatcgacctttatgaccaaaatgggtctatatgaaataattatatgatttgacaagtaaccatttgatttacaaattattcaacgatttagcattacaaaaacatctaaccatgcttaatgtatgatgttattcattttaaaaagtcgaatgaaacccatgtttatctcaatgcatgatttaataattttattatacatgcacataattctacatttttaattaattttattagtttaataataataattaattttctttttttacacttgttataggtgagaaatgaaagttatcataatacaaaacatcagtttttataaaaccaaataaaactcaaaaatcattcagacaaataagtttatggacttatggtatatgatgatactctctcaacatcctcattaacatcatcactattaagttaacaaaaagaaaaagaaaacatcattataagttattaataagtttaaatagtagtattttatattctggtacaatgtactgtttttggtcattaagtggttcaacgacaaaagtaaaactcatgcggtcgacccatgcgttagaagaagaaaatctgaaaagaagtttgaattctttaattttttcataaaaagaagtttgaattcaattcaaccgtttttgtttagttcttctttaattaactttatcactaatgtttaaaagtaaaaggtttttaaagtgtgcaacaagcgtgactctttggcctttagagtcatcaagaagggtaatcattttttttactctttctcgacaatagcaatcaaattatcattcccacttttaataatctcataaaataaagtcaatcatagttaaaatttgataaattccatggaaatgataaaaatttgattttactattgttggatgtgcaattgttcatggtaacttactaatttatatgctttattagttgcagatagtgatatatatcgaaaaatgaaagatctaattccaataattgtcaaagaggatttctaaatttctgtttgactaggtcatatattctcacgactcaacgatctaaccaatcacctacaacagaaaatttggttgaaataaaacgaaaagtgataagtccaaatgtttaaaacaaaaaaaaagtaaacaaaaggcaaaataagataactacgattagattttgttctcgccttatgaatatcctaaaaattatctattagtgatagtttgataatcatctttgactgagaaaattgatgtcacataaacattaatatagtatcaacattaatcattaatgatgcgactataattattattttatcacaatttcttagatttgataatttgtttaggtttgagagagttatatagagggggacaaagaagcaaagtttgtgattataaaattatttccattgaactaaagttttcaatagtttattcttgactttaataataataactattttgcccccagctagtcacatactcatgattgcaaaatctctctctctctctgcctctctatatattaacctttcttcttcctttactttctcatcttctatctctcaaaagaaaagcagacaactttatttgcaaaaacagagtttttttttcttatcttgagaaagttcaacagaagatg

SEQ ID NO: 28105 - DNA, 3003 bp, Unknown
  misc_feature (1)..( 3003): 2750-1469P.txt file - cDNA_ID_2993912; gDNA_ID_1621099; Annot_ID_171269
tgcaagtcttggtgtcgtatgagatctataatgtaatcgttaacaaagaggggatatttgatcataataatggtccgtcgatgtcctcctaagttggtaaatcgtaactgccagttttcaccagactctctattctttagaaaacagaaaaaagtaaatgatttaggaggttactctcttttttactatgtacttattatcttgggttcttttggcgtcgtcgttatttacttttctatggagtactaccgagtacaaataattggagaggagtcatgcatgattattgattagagaatgaagaaattaaaacccaaaactggaagtccaaatcagacaaaagcacctgtggcccacaaaacaattgaggacgatattacgtgaaggacaaatggtcatttgacggacacacctttcttttgttagacgcagtcccgttcgtggtagggtcagatccacgtgaagttcacatgctttccatgcaccgtttgggtcatcctgttggtcccgctttattaactagtctatttcctctattaggaaaattcaattttcgaaacaaaaatcaatcaaaacatgtataaacaaactgataaaaaaccacacaaaaaatatggtgcttttctgagggtatatatattttttgttttcgtctgatcttatattttaaatttggattttatattcaaattttttgtatattttgtggtcataaattgtccaagataacaattcgtgaccaaaaaaaatatatgtgattattttacagaaaacaaataattaccaaaaaaaaaatcatatcttccaaataaaatgtaagagaaaataagaagattatatatgtgagaactttatgagctaaataaaatgaagaaaagtcatagtttagccgcgtaggaaatcattcagaattcagaaatatggctcctcgctaatatttttcttttaaaggtaattgtttttcaacctaatttgagagcaatgtatatcgataggtttcacattagcttatttcgctcacatacatgattgtgcaaaaaaacagaaacgatcgttaactaattatctaagaaagtgacatttcaaaaaggctcatttcaatatagagttgccttcttcatgacatgaccttgatatgataaattccctaatgtaatgaatcaataaaacgaacttatagaacggtagaaattacgtacgtgaggatttatatcatctattaattaattaattgacaacaaaaacagaaggggtagtgttcacgtgcatgtcacgcgggtaatggtgtggacacacgagcctcgtacggtgtaaagaaggagaacagagagagtcgcacgagccgcacgtgggatgttgacttgtcgattagcttaaggggtatgtccatatactaatgattaagtacagtcgaatgaaaacatgccacgagccctagatctacatgtttattgtggttttttttttactcagtcacatccacatgattaatattggtccctgatattcatcttatatatttcacaagtataacaatcacccaaacattagtttttcttaaattgttttacggtgaaatgtttcactgtttcctctatgaataattaactagtggagtggaatttattcatttatcatatccacataattcatctttattttcatttgtgcatataatatatatcctttaactttctcatgcttaccatttaggctttttgtcttcctcaaccttcttaaactttaatatcccccttaaaaacagatgaaaatagtctttcctcctatgaattttcccaatcactttacaaattattaaaggtcttccaattaacctggtttcctaataatgttgagtgtaatcctttcacaagcttttcttaagaaaatgaaaaacaatcatatatgtacaatactagagatatataatgagtcatgactcatattaatcgcggtttttgtaatatcataaagctttctactttaggcttgacagtgatttaatacagtaacatatcacataaatatgagaaatggaggctctttaattaggcctttacaatatacatatatattagaaatagaaagaaaagaaaaaaatcgaccgacaacaagattggtgaagaaacgcaataattgaaccattaagtacagtctaatacccgcagaaaatattacaccacctactcttagtggcaatgctgtactttaacatattgtcgagacaaggagaccaggttgcgtgaaatcatgtagatgatgatgcataaacaatcaccaaagttcaccctatgaatccaagcccttctagcttagtggctatgatcatagccgacatctcatacagtcacattccatttcggagtaaatcatgcgatgaacaaaatttagcttgttctcattacaagataacaaattggatactatatatcaaaaaattgtgagtgttaggatttggatcaaatctaactattagagaacgataatataaaaaacatacatgatttgaagtagtttactataattttgatagatttagaatttggaaatagagaacgattatagattttgctagtagaatttggaaaaagaaatgctattaaaaaacagaatatattctttttgtttaacattttattaatataacaaaccaaaatatagtttccgatattggccagaatatcgtcgggctacaaaaccggaaatagacattacggataaagcttaatccgtattttcactctatttcgcgtttaatactttgtttgtttactattaagatcaccatactatataacaaacaaacaaaaaaggtcacacaactacaataaaatgctaacaagccgaaagtgtacggcagcagtgtgtaatcgaataagtatcattaaagaaggccatgctcgattcattactctataccattccttaatatattagtattacatgggcaacaacgaaacaggataaaaaagagagagtgatcagtgatgatggatggtcatg

SEQ ID NO: 28106 - DNA, 3003 bp, Unknown; identical to SEQ ID NO: 28104
  misc_feature (1)..( 3003): 2750-1469P.txt file - cDNA_ID_2993912; gDNA_ID_2926166; Annot_ID_139931

SEQ ID NO: 28107 - DNA, 3003 bp, Unknown; identical to SEQ ID NO: 28104
  misc_feature (1)..( 3003): 2750-1469P.txt file - cDNA_ID_2993912; gDNA_ID_2926166; Annot_ID_199170

SEQ ID NO: 28108 - DNA, 3003 bp, Unknown
  misc_feature (1)..( 3003): 2750-1469P.txt file - cDNA_ID_2993916; gDNA_ID_1621097; Annot_ID_55733
gtaatttgtccatagtttcccgcagcaagaatagaaaaacaaagatgagtttacctgcctgatgcaagccaaacttgggatgctcctccaccattgtatctatatcgataaatataatctgcctcttgtttctccttgtctgcatcactaagctctggtagctttgcaaacatcaagctgtctagatcaatctctgtatttttaggatccattcttacctgaataatgagtaaagaaaagaagggggcaattaaagaatccagcaggatagaatcaattactgaacaaatgcaaatatgacaagaaaaaaatcaacttcaagaacagagaaatatgacggttataaagccaagaaggcataaaaaatctttcaatcaaaacaaagcaaaaaaaatacaagaacagataaagcatttggacaatctgcataccatatgcaagattcaagaagtaagaagagcactggaagccataccttatcaaaattcactacaaatatggcacttggtataggtttatctgccgttgcggctgatccagaacccacatcaatatcaaatatatacgagtaaagctggttaaatgcggactccacttttattgcctctacgtcataggcaggtaagtgtcttccaaaatcagcctaaatccaaaaatatttttgaagattagtatcataaacattaagatgtagtttttacagctatgaaatccacattttcatcgacatatttttatatgtaattaggttcgttatgagaaacagttaaatttgagatgataaaattacagcaacctctagtgcagttccagcaggcaccatggcttctttcactgccttctccagagctattaattcaggttgcccactctagagaaagaaaaacaaagatgaacatttaggtcaatgggggaaacaatgaaattattggcatcagaagtcagtaaaacttaatattgagtgcaaaaaacttcatgtacaataataatcagctcgagacgcaaatgcaaatcagctaaatcaaatacaagaatccagaacttgaatagaaatcttatcctacatatataatatcggatgttgaagcaggtaaatcataaacaacacaaaattcgtgaagactggttaaaggtttataaaattactcacaggaaagatattataaacaactcgatgctcaatatcaagtggctcgcccgtctcttggcatgaaggcctatgtgttgaaaaactggctcttaggaactcttctagtttttgaggatccactgaatacctgtaacctccatctccattcaaacccacaagcactatattcacttccaaaggaacctgaaatggtacctaaacaaaacaagcttcatagtgtgaaattcaattctcgatgtgtcactcaaactcagccaatctaacaaccatatgcacgaaaaaagctatgatcatagtcgtgaagcaacaagaacgcttttaatttcacttcggtgattctacagaaccaaattactcaacgatttcttctccttcttcttctagctaaattcagactaactgatgatgatgatgatgattcacataatttaagctggagattgtacctcggcacgggagtgaagcatacggcggacatcggatcgaacactctctcgtacgtcaaggaaagcactgtgatgccagtgaggatgacctggctcgcgacggaaaggttgctgagccgagtcggtacgagaaacgagtccgcatagaaacaagagaaacgcgacgaataggagagaagaaaacgaactcgatcgtgaatccgatctcaactccatgactgaaaaaaaacaaccggagatttcgctcacctcccgattttggactggactggcgagagtcgctacaagtcgcttacggcgagggagcagaaatgggaaaattaaggctaattactaatttaccctcaagttttattattaaggtgacctgacctgctctgtctatatgtgatattgtgacctgctttgcctatatggctatatgtgatacctataatcacaaggatatttcaggtggagaatcagagaaagaaattgaagctgaataagacactatatgggagagattgaaaggaagctgttgggccattttggtgtagcgggtcgcaagtcgagcgtgagacttattgctgtgccattgcaggaatgcaaacagaggaaagatttcacaaatgggaaacggatacatgctcagatggttgttttgttgtaggaaatgcctttcaatgagtatgttaaacgctagctgtcctgtttaatggaccggtgtatgtcatcttgtcttgcactgtgtgagcacaacaacttgcaatgtttccattgatgctgtagcagtctctcacattaagctctggtttggatggctatgaacaagttgattggtagataagttaaaatgttgtgatttgaatctggaatgaatagaaagatgtgattggtactgatgtaaattcaatgctttagagaatgtatacaggcaataatataccaatcattatgtttattgctgactaagagccactcctctttgctgttgcaattcggcaatcgttctagatatggtttccatttcaaatcatgatatgcattgactttttccatgtggcgttcggaaatctttcatctatactacgtctacgttgcaagttttgcaaaatgtttaaattagtagaatctcacgtatataaaaactttagtcgccaaattgaaaatggagaatgaatggtaaactactagtttaccctcatattttagctgaaaaatatcgtcacagctgacgaagaaattagaaacaacaagcaacgtgtcacttctcatgtcgtcgttttccccaagaaatatccaaactaacacccaattacctaatgccacgtgtttactcacactcctttaaacaagctcgtaactgtttcatcttcttgtccccaaagtctcctcttccttatctcttggaaaccaagaagcatg

SEQ ID NO: 28109 - DNA, 3003 bp, Unknown; identical to SEQ ID NO: 28108
  misc_feature (1)..( 3003): 2750-1469P.txt file - cDNA_ID_2993916; gDNA_ID_2926165; Annot_ID_139875

SEQ ID NO: 28110 - DNA, 3000 bp, Unknown
  misc_feature (1)..( 3000): 2750-1469P.txt file - cDNA_ID_2993919; gDNA_ID_1620812; Annot_ID_57882
actttattttgctttttattgggtcaatcatcggtgttttgtttctattttaaatctataacattttggtttcagctcgttagattttcagaataaaataaagcaaattttgaattttttgattcattagtcgtttatttttgttggtataatactcccattttgtgtactttggaagccactagagattgtataagtataaataagaataacattactataatgggatctttcgttggaaagttcgtcattttgttttgtctattcccaacttgtttgttatatctaaataatatgctcgtagataccaagattcaagatataaccatgctcctttttttaatttaaatttttaccaaaatgtaaattttctatatataaaaaaagatatattaattgctacttgaaatttatacaagaaatttcacccataattgctacttgaaatttgaaaatgatattttccaccaccaccaatgactgattaaaaaataaactgatttctaacacaccttaccacccaaaacctaataaaaactttaaactgtacctctatttctaacacacccaattaaaagtgactgataagttgtcaaaacattattttgaaagatacattgatgatgtgattgtttttttctacaaaaatttcagtttcgaagtttacccattaacgtgttttttttttttggttttttttttctggtaaatatcctatattttattaaattttcttactatcaactgtacaaaagttttatcatccattatactatctataatggaattgtaattttattacacttagatgtaactagaattgtaaatatattattgtagcaaacatttgactattaaattaattacgtaacctggtttttattttgccttttaatgaaattataaaaattgtatagtttgaaaaatatgatactatgactatttcttatatcttaaaatattattgtcagataaaagagtttgggattttttgataagttgtactctacaaaatattcgaaaacagcctgtacagttgaacagaggcatgcagcaatgattaataattaatagttagataattagaatgttaagtggaaaattgttgtatttagctgactttccagtttccaatagacatcgcccatcgaatgtttatttaatcaacattctttaaaataatgagagtgttttgcttacttggcacgtgattaaagactactgacagaaaaaaacaagattaaacatctaacagaaataacatctttaaactatgattgcaagtagatatatatatatatatatatatatatatatatcagaatagttgaagaaattactgaagaatcaatcaatatacacaaacaaaattatagtttttctccttcgacaatatacgtttagaatttaaactaaacgagatccatatatacattttttttaatttatatttactttgattgcatatgagattgattgtacatgtacatatatgtttatgattattagttaaaactgatcgtgcatgtacatatataaactatggagagtggattataagattgtaaaaactcaaatctttctctataatatttaacacgtgttcatatttatgactgacacaattggacacaacttaagttcaaagagtcaacaaataacaatgcatgctgaggcatacatatatgtaaaaaaaaaaaaaatcgcaaaaaaaacagatatgtaaattatacattattgttaattgacaaaccaagttgcaaactgcaactaatcacatagagtttaaaaatgtgataattaacggaacgcttaagatggacatgtaattatatattaatgaactgaatcaaacaaaaactaaaaacatttattgcttatgtggttgatgagatatttgttttaagcaacatgatcaaatgagaatgtgaagacgtgttagtcacatatgaatatgatttataaaagaatctaagacgacataaatgactagatggtggaaataatgtgaggcatcttaatttccttttcatgcatcttaatttccatataatccataaaaaatgtatcttatatggtatttttctcaatgaacgttttgtccaatgggctagagacaaatatatcctccactctttataacggaacgggctaacaataaaaaaacgaaaggaaaatttgacgtcatcttttctattgtcacaagaaagacatcatattttctatcgttttgtagcatgttacgtttcagattgttttagactttgtttcttaacttgtcctaatagtttactctaattgtgtgagtcttttacgagttttacacgtacttataatattttttagtcaagatttctatattatattttcaaagttatgacctaaaactatcattttcgctatattaaataaagaaaatcacatttcagctaactacctaaaggaccttatgaggtttattctttctttttttaagaagacccgatcaatataatcaactttctcacgacgactttccaaaatatcattgaagtcaaccttcactgaagcaactaaccatatgcatcgtccagttcaagattctgcaatgcgattcaatcgttaccacaacttaagatcgaaaccggacattagaacccctttgttacttcgtcgtacattcgtcaactatatccttacctttggtatccttcgcctttgatacaatgataccaaaagaaaagaagaaataatcagaaataatcaattgttctggttttaggttgaccaaactctttaaccgaaataatcagaaattcgaaaataaccgaaacgaaccgacgtaagaaaccggatcgtccaattccagattttgaaaccaaaatccaaacacataaaccctaaaacattttcgcatcttctctattcaaatcctcttatcatcgatagaaatgatcatcactgggttcgaaattttctagaatcttcaagctttccttaccagtttctgattaaaagatg

SEQ ID NO: 28111 - DNA, 3003 bp, Unknown
  misc_feature (1)..( 3003): 2750-1469P.txt file - cDNA_ID_2993923; gDNA_ID_1620812; Annot_ID_57893
tgaatagatattttctcctctgcgtaaagccaaagatattagttaatgggaacactataattcaatctactttataatgctctttctttcctaaaataggaaaacaaataaacaaaggtacattatcaatcacgatggtagtggtaacataacaacattaacattcacattaaccaaaaaaagaagaagataagatcttctctggtctaaatttggaaagagtctgcactctcagaatcaatctctcttgttgaatctcatcttagcttcagtttctccactgtaaggagcaacgtgaaaagcgtactgttgaatgatggagaagacgatcatctcaagacatacaagcacattttgcagagcttcttcaagctgatccacctccaaccagaaatgatgcgacttaattaatcccaatcccaccaatatcttcaggactattccctgtgcaacacataattcccaaggtttaagaatggaacaaggcgaaaaattagacatgaatgctttaaacttgacccaatgtagcagtgatcctaaaatctattgagatgagacttttttgtgtctcaagtaccaaccaacaagctctaaacggttttcgttcgctacacaatcgaaagacttagattaaggagaaaaatctcaacgctcagaccatatgcacattacaaaaatcctagacaaaagagttcccctttaaaccttcagctctcaactaaatagcctacggtctgttgttgagctggcaaagctacaattccttgttaaagtagtcctgcaaaccttaatggtctaattcgtggcggtgaaatattataaggcgggaacccctaaaacatcttatgacattctagagactatatgtatctttccattgtctaaacagcagattgaagaaaaatttgaatgtttcctcatcaaactcagttagttgattgaagaaactagtaggcagagaacttgtgattttggcatttggcaggcaaagaaaaagttggaaattaagtatttacctgccaaaagcagaagaacactatccctttgacgcacatgaactttgtaagaggcttatgaggctccaactctttagcaaaaacatggtagaatttcaccaaagaatacaacgccagggaaaccgaaacattgagaatagcagtgaagatccagctcaaccaaactggataaatcccaaggatctgtaatgttatcatcaagatggaacacactgggcggataatacaaaactgccatgtccattgcttgagctgtttcagtgtgaggtaatccagatgtgtggtacggggcacgaaaagagtcattggaaacgaatggtggatttctcgccctttgaattcatctgggataatccgtgcactcatcgatatgtttacataactatacatcaaagccaagaatttagcaatgacctgaaacaaacagaggcaaatacaacaaatcaagaaatatccacacagagagagagagttaatgtagggaaaatgagacatgacagaatctagaaggaacctacaagtgcctcatagcattccttaacggcgtctagaaacatgaagaaaggtttgcttcctttagcatctaacaagcccacaaaagagttgatagcgtaaacaggagccataagcacaataataagaatggctctctgttcattaggtttcttccagtaaaacagatgctgggatacaagctgcatagtgaagtgcatcgagagcaaaacacagaacacggatcccatcaccgtgatctccgcaggagataaagtagataagtcaatcattctgcataaaatgaaacaagttaagtacacactgatcatcacgattcccaaaaaactaacaatggttgtgaattccaatcagatgtagcagctagcacaattatgaagtgtttctagactgaatagaactaaaacatcatgattcctgagatatagatactaattcagaaattcccagtacttaaatagtaacctcactactttgacatactttctttgtctaagtcacagatcttatactctagaaaccccagaatcaaatcattgacgaacgagctaaaagattccaaatttaactaagacacagcaaaatggggctaaaaggagtaactatacgccgaaaacccattactttcaagctcttcaggatcatcaaaatcgaaactttttgtgatactgaacttaagagatgaacaagaagaagaagtagagagaatcagaaggcaaaccttgattgaaacaagagggagattatcgaagaagacgattcaggtagagaacttcaccgagttgtttgttattgtacgattcatcaatggtatagatttgtttgattaaaagaattgtttttttgaccagaatctgttcatcattgaccggttcaaaatcagccgagtcctctttgcgaccaagaaatatacccaagtcctccgtcgttatttgccggccggtttggttttccgtttaaaagttcgaaccgaattgaaatttggttattcattaaaacaaaattggttaggacttaaattgcggtttggtttgatttattttgtgaaacaagcaagaacaaagaaaataacaagttaagaagatgcaaatgtttgacaagattaggcgttaattaaattattgtaagatatgccacacatgacacatggatgatgctgttacatactataagagtataaggaatgtgctttaactaataaattgacgactctttcatcttatgtttatactcgtgttctttttgtcaacttttatgaggaacgtatgagactcgcaatgtcttgcttgcacacaaactcaacatcatatatgttgcttccggttaacctaacttgtaagtccattcttgtctctctatttataatctctctgtgtgttttcttttcaaattcgatgaggttgttatagacaagagaagacatttttatacaaaagagtttatcattatataagtttcaaactttgaagatatg

SEQ ID NO: 28112 - DNA, 3003 bp, Unknown
  misc_feature (1)..( 3003): 2750-1469P.txt file - cDNA_ID_2993930; gDNA_ID_1620833; Annot_ID_57905
tataatagttaaaccaatgagggaaaaaaaagatgagcaatagaaggtgcttgttgctttaggaaaaataaataaattaagctttctctcctagtcctgattaccgaaaccaatcccctaccttcttttgctgaaaaaaaaatcaagtaatagaaggttttgccggcgtccggatctctgtttcaccattttcttttgcttcccaaagatctctgttttacattgcttttggtcaacttctcaatcaaccaagcctttccctcttaactcaatgtcggatggttattgatcagatgctagagttggatggaggttcccagaaatctcctttgggaagctatgcctactacttttctcgtgattttaaacctaggaagccattcttttacaacagtatctctttctttgaacttgagacgattttctttgtgttgctcagatctcccgattttggctctccctcaatctgcacaaatgccttttcccaccagaattcgccttcggtgacaaactaacctaatttatgtcgatgtcactagattggacattcctttctaccttctgggcttaggcccaattatcatattttcaaagctcaactccaaaaagtgtattccactgttctctctgcaaaagcccatgttttgcataaaacttttctgatcttgcttagcgaatttttgtgtcgactcatggaactgattgttaatggacgtcgattggaacataatcaaacaatcttgctatgctggtataaaacttatctgagaacatgaccattagaattacctaggggtaatactctctattttcaaagcttgaaaaacaccttatatgatagcttcctttatcaaggcttgttgaataggtcgaggagaaacggcattatgaccccgtctctaaggagcaatggttaccgtagcttcttcaaccccatatccatgtattccctgtttatcgagctcatatatgtacaattaccaacttctgggaccttttccatatgctcaaatccaataagctcatgtctgattatttttgttatgtgttaagtcgactaaaaactttgtgtgaaattcttaattttcatggtataatactccatgtgagagaggatccacctattatgttacaaccttatactctttttttacgaaccttggttttagcttcatataatatgttgtggtatgactttctttgcttgaaagactttggtctaatgctgttgaaccttcatgcgagagtttttatggtggcttgggaagcttgtcaaaggaccacccctcatcatgctcgcttaacgtcttcaagtcatacacctcacttcatgtttgctattgtttgcctaacctcaactttcattcggcatcaattctagcaaataaatccaagcaccagagcaccatcaccactacccaaacctttgtcaaagctctacttcatgtagctctcctcgtgccggcgagaatcatgtctttgaccccttcattaacgccacttcgtcttttgacagagacaatttgtttttcctttgaatcgctcttgaaagagtcgtcgataaactttgatctcacaagtaccataagcatctttgcttttggctcaaaactctcaaggaccctttgtcgattagccctatctatctttttatcatttttctggtaacttttggagtatgccccttattgttgtgctttaaactttggaactttttccctttatctttgtatttggcttctacattatggaatgaaaacaaacattgtccaaaaataaaataaaaaaaacaatgaggaaaaaaatcaaacaaaaataggagaatcatagtcatatttttggatttaaattcaaatctttttccatggtacataatctgcagcatttacagcaaaaatgaaacaaaatctgttagttttaaatttaaagatatgtttgcaccctataataatctcacataagttcttaaagattgaaaaacaaaaatggttgcatatgtcaagaacaactttttattggttcatatagtagttttacttctttttgttgtctcatcatatgcaagatttaatacgaaggttacaacagatgaaatatgtggcatgtgcgcacgcagagcagtcaatgcgtcattttgctatgagttcatgaaatcatccactcaagttgcaacattggatacttatgatctcgccaaatttttgatcaattatgattttcaaaacacctttgatctaataaagcatttccagtcactcacaaacagcacaaccgatcccagttctaagggttcttatgagctatgtttacatctttttaatcttatcaatcctcttgaaaccgcacttaaagctttggcaaccaatgactatgacactttaaacaggaatgttgatgctatgtctcaattcgcgatggaatgtgaaagcgagctgtcaagtgtcatcaagcctattccaaagctcttgaaaagggtttctatcgtcgaaaatgtatccgacattatttttgtaattgtggaatgttttttaagaaaagaagaaacttcatgtaaggaatcagtatcaaatctacaataataaattaataatcataatgttgtttggtatgatgttgccattaccgatttacaccgataattaattgttttagtgttaagaaaaatcgaaatccaccacaagagcataccaaatcacgaaaaagcttgtttgatagatcggattggaccggctttcgtatttgaaaaagtcatcgttcacctgtgaaaaattacgcaactccggcgaggactattttcaactatgggcctagccccaattagtccaattagtaaggagcttaaaatggttttctcaaagtacggggcaaaagtaaaagaataaaaaagtagtggaccttgagaaaagtcatcaccagctttccttcctatgccacacaaacgtgttcttctgaatatgagtcaaacacagagaagattaggagaacgtggaagaagaagccatg

SEQ ID NO: 28113 - DNA, 3003 bp, Unknown; identical to SEQ ID NO: 28112
  misc_feature (1)..( 3003): 2750-1469P.txt file - cDNA_ID_2993930; gDNA_ID_1620833; Annot_ID_169751

SEQ ID NO: 28114 - DNA, 3000 bp, Unknown
  misc_feature (1)..( 3000): 2750-1469P.txt file - cDNA_ID_2993936; gDNA_ID_1620818; Annot_ID_50667
ttaaaacataaaatttgactcatctattataaacttatatagttatttcaacacatgagatggccaaattggagtaataactagtgggtttagtggagttttagttttcctttctccaaaattggtttagctagtggagctcgtagaaacaataacattaataataaaaggaaggattctactattaacaattaactcgcactaatctaaaaggagggttgaatttagaattaaaatcacatcagtaataatatttctctccatctttttgtgtctaacttctctcttcaatttctatttctaattatgcaaagatatgagaagttgaagcaataaatagtggatttagtaaacctagtggaaacaatattcctaccatttggactgcttcgaaaaatcaatcggactgacacttgagaaatcataagtgattgatcttcgtttgtaaaaaatttcctgatttttgcgttcaatttccaaccaatttaaaactggaccaagatatgtgtgtagatttcatgtccgtcacaatagttgttccaaataaaaaaaacagcactaccaaacttgatgtgatgagtccagtaaaaggagcttatacacgacttaaagaccatatgaaagaagttcaaatttatatcatatatgtagattcagtgccttaaaagtaaggactcgtgggcactcatgagcatataggattccaatactgatataaccctcctacaaaaactaatgctaacattataaacattaaatgatttttattggctattttggtatatgcatggtagtttccatattatttggcatggccttgtttcagtgttggcgtcaaaacataagtgaactggtgtgcctaagacttgaggtcttagacgaaatgttaaatgtgtaatctctttttctttttgctacggtttattttaaaaaattcatgatcttttaatgatttttttatggttatcattagaaagcagtattctctaataagtaggtgatcaattttgtccaacaatgacacgttttttcaaatggctattagccttgttattgttacaacgaatcgagtatgtgtgcttttttcaaagcaaaacaaatataacatgatttttatatgaaatatattaaaaatgaataagattttatcggataaatgaaattttttacacaagataaaaaaaaaacattaactcgtaatttcattaatatggttaaatatcattaatatcaacttttacgagtagtattctaaaaccacaagtgaagagtgatcccaacaatcgccgagtaagtccccgtgaccataagaactaaacccatcacaataatcaccaccaaaaccacactctcaaactccagacatctcctatatcccttactgatctttaaataaattacacatggaaacactatcgaagtacaactactcaaaagtgcgcctataagtgacattacatatccaaacaatggcacaacaagtgcaaccaatattgttcctaaaaccagccccgttccagtcaacatccggaggcttctccttttatagtttgcttggatcaatcgtgtattgattgcttccatgatcggggaaagaattaatgcgtatttggttagcggactcacgattgtagtagatattgctatcaccgcgctgatattatgagttggaaggtttaaagtgatttgtgattgcacctcttctccatacataagatatccaaagattgccaccacagcatagattattgatgataaagcaaagcttatggaaagaatctgcatgtatactcaaaaagaaaacaaaaaccggtttaaaatgattgaagaaatttatataaattaacaaatcttgttagctgaaaatgttttgataaattaagtaccttagagaaatgttttttgttcttcatagaattgtagatggttgggaagacatgatgtgcagtgtagcaaacaagatacaaactaactgcggtaggaattcctgaccacttgaccagaacacctttgttcttaaatcccacaccgtcaatagcgccgatccaaagaatagacattacttgtatacaagaaactaggatcccaccggccgaaatatacgagagaaaatcttgtgtttccaaccacattgttggaacaacgatcaaagaagcaataacgataaacaagtgcttcgaatcccggcatgtgggaacatgtgatacatattgtcagcttctaatatcaagattgccgttgcgacaaaatacaactcgatgtatatgaagaaagagactaataaccgacctttcttcccaaacgctttgttcgctagatcagggtaactacgaaccatagggtcgagtttgaggcaacgttggagaagcaaaccggtgtaccaagttgttacaccaattagaaagaaaaacagaatgctaatccatccacttgaggaaagtgcataaggaatagccaatattccaacacctaacacatatataccatcaaaatagcaatctattagtttttcttataacaaaactaatactaaggctaattacgagtgataatcgactatagttatatatgaaactatatgtatcttagaaagttatacctgacaaagaattcaatgtgttgaaacaagcgtgaacagaggaaatgctaacatcaccgtcgttgccgccggaaaattccatcttaaatgttttgttttgttaaataaaaaaaagactagagtttttgaggaacttacttacacatcatgacttgtgttggtgtcagtgagagtgagtgtatgtatatatggaccaagtagataaaccggaaattggtttttgaaccggtttaaatgtgaaacccgtttggatttttgttttgtttttttatctcatcttcttcttcagaaaaacacaagataacagaattgccaccaaagctccatttttatccccacacagaagaagcttggggaatgagaagataagagctctcaaaattccccgaatttcgaatatg

SEQ ID NO: 28115 - DNA, 3000 bp, Unknown; identical to SEQ ID NO: 28114
  misc_feature (1)..( 3000): 2750-1469P.txt file - cDNA_ID_2993936; gDNA_ID_1620818; Annot_ID_169353

SEQ ID NO: 28116 - DNA, 3000 bp, Unknown; identical to SEQ ID NO: 6792
  misc_feature (1)..( 3000): 2750-1469P.txt file - cDNA_ID_2993944; gDNA_ID_1621105; Annot_ID_55963

SEQ ID NO: 28117 - DNA, 3003 bp, Unknown
  misc_feature (1)..( 3003): 2750-1469P.txt file - cDNA_ID_2993948; gDNA_ID_1971793; Annot_ID_58052
atagacgtaaggtggagacttgtacacatatggagacggtggtggactgtaggcgtatggtggtggtgaactatagacgtaaggtggagacttgtagacgtatggagacggtggtggactgtaggcatatggtggtggtgaactatagacgtaaggtggagacttgtagacgtatggagacggtggtggactgtaggcgtatggtggtggtgaactatatacgtaaggtggagacttgtagacatatggagatggtggtggactataggtatatggtggtggagaactatagacgtatggtggtggtgatggtggagagtatgggtattgagcacttgtatgcgcagcaacggcatacaaggccaatatcaccataagaagagatggccaattactcggattagccatgtcgattgaatgtgtttgctcttgtttctagactcaggttttgttagtatgtttcttactttaaacccgatttatttttgaatggattgtaatagaaagtaaacagtttatatagcttacattaggccaactagaatacttgtttattgaactttaaggaagcgtcttagagcaatatcttatattgtttaataagtcaacttaactagtttctgattttgtctataaatctgaagaaaaagtcgagaagaatatgtctttggtaactacctctaaccatactttaaatttaaatgtgtcaacttttgaagttgtcaatttaaattcaagacatttaagagtgtttctttctgaattatctatcaccgaatttgtacactagttctatattacatcttgtaattttaaatactaatgttatcgtacatgactcataattttgagtttttcttttgagttaatttttccaaatggtgataactttgacattttatttcgtaatgtgtataatacaactaccgattttcattttttttaaaaagaatattacttacactaaccatttgatttggtttagtcataatctcttcatatttcagccatctggtcgtcgtccgttatatggaccttttcttattctatcgttttaacattgtaattaccgattatcttttttgttgaataaattttaaatgcttaggacaaaactaatattacatgttgtggtttcggacctggagagattacaggcttcggcccaaaacttccttgtattaaaaaaaaaaaaagaataaattttaaattctaaataaaaaagatatttactaaggatttttgtgaaagcaatactaattgcattaacattcatacatgatttgtataattgtttggagttgggtaagatgctcgacttccacattagggaacaaacaaagctagattaatgcacgtctagtgaaagatccatccctttgattacttaacttcacattagggaaaaaacaaagctaggttcatgcacttctagtgaatgatccatccctttgattacttaacttcacatttagggaacaaacaaagctagattcatgcacttctaggtgaaggatatcaggatatgccacatttctatcaaagaatacggttaagaaagtctataggaggacaaaaatagatatgttttcccaaaaaagattcaaagctcaagttaaatggaacaatgagttagcaaaaaatggtttaacgggaggagaaatagtggtagtgtcaaccaagtcgccttggtccagtagtaaagagaggtaattcctgtcacatgggttcgagtagctttggccactgggattcgagtaatttaacatgggttttttcgggttccagaattagtctttggacctagaaaccctttaagatcacctgaattatcaaaaaatatatatatagtagtagtgttgtgtcctatgttgaaaagtaatatggatcagctttggaattctccaggaagcaatgggatcatgtgggatcaaaaagaataataaagagaccacgattgggcaattactaggcacttatgtcattgaggtgattagtggatcataagattatgcctactgttatcctcaatttgaccgtatactattttcttctcttttagccatccttgaatacctaaccgaggttcaagaatcagtttatgctttcatgttgggttgacctttgttaaataggttatctagtcatgaagagcgaatcaagccaaactcttttttttttttctctttaattaaaataggattgtctctaaaataaaattttacctaatccccgattttgtaattttacttttcatctcaaagaaatacaaattaatattacaaaataaaaaaaaatatgaaatataacccgtcaccattaccatcaagttttcaaagttttaacgaataatatatcaaatcaaaactttcgtgatgcagaattcaatctttagaattttaaacatctaatacatatgatcgtaataaattttagaatatacatataaaaatgcatattattttttacataataatatcgatttccgttgtttactatacacgtagcaagacctaaacagttttaatctgatatagcggaaactaattttggcaccttagacaattgattggtcaattcaaccctcaataagcccaagtggaaagacaaagaaatttagggtattttgtcgaatgagacataatcaacttgactgctccaataaactgttttcactagatgatggatagtagttctgttctaaacatggttaatagagatccaaaacccaatttctctatggactttattggtgcaactctttaagtgaaattgaaaccttacttcaacacatttcaaatgtatctacctaattaactctttatataaaattaaaaaaaaccttagtgcataagtgggtaggtgaacttgagtctcttggcaatatgtaaagaggcgaaatcaaagttgatcaacaattaaacacaaaaacccttaagttgacgtggctgtatctcttccaactcttaaaaatcaattactattatacccctcagaaaaatg

SEQ ID NO: 28118 - DNA, 3003 bp, Unknown; identical to SEQ ID NO: 28117
  misc_feature (1)..( 3003): 2750-1469P.txt file - cDNA_ID_2993948; gDNA_ID_2926143; Annot_ID_139022

SEQ ID NO: 28119 - DNA, 3003 bp, Unknown
  misc_feature (1)..( 3003): 2750-1469P.txt file - cDNA_ID_2993959; gDNA_ID_1620811; Annot_ID_50584
ccatatatcaatagacgggaatttaaaagtcttaactagggctaaccttcccacataaggtaccatataacaacttttcctataataaccctctggaagtttgatctggttgaacttttcagatctaacgtctaagctcattagtttgcgttccacttcaataccatcaccaacataaacagttgctccatagtacatgactccattaattagtatatgcatcccccacaacgtatagtagatcgatgcctagggacaccgttggttattattctccatgatcttagtccttaagctcccagtgtacgaatgcaaatcttcgagtctctctagtaacatgtagtagtacaatgattcaagttttcaatcaatctgatcatatttacgctaccattcttgattagatgcttatcctgctcaaaaatgtattcagatatatattaacaattacttttgaatggtatcaaatatttattaactaattctttttaataatttaatccaattaaattttaactttttaatggattcaaatatatactcattctttatttagtgttaaaaaaaaaaaagtagctcaactggaaatgtatgtaaattatatattaaaagctgacccgggtctagaggatgtatggaaagccaatagcatcgtttcgaacattgcaataatattgtgtggtgacaagcaacacatgatatgtccgtttagaaacagacaaaataagaagaagaagaaagagtcgtggaggattcttcattcttcctcatcctcttcttcaccgattcattagaaaccaaattacaaaaaaaaacgtctatacacaaaaaaacaaatgggagagaaagaggaagtgaaactattaggagtatggtacagtccatacgccataagacctaagatcgctcttcgtctcaaatcagtggattatgattacgttgaggaaaatctgtttggatccaagagtgagcttcttctcaaatcaaacccggttcacaagaaagtccctgttctcctccacaacaacaaaccgattgtcgagtctctcaacatcgttgaatacattgatgagacgtggaactcatctgcaccgtccattcttccttcacatccttatgatcgtgctcttgctcgcttttggtctgacttcgttgataacaaggtttggtttctttcttttcctttatccaacaatttcaatttcttattatttctttcagttttcttttgatggaattttttggaacttttttattattattgttacattccaatgaatttatctttcgtgcatggattatcttggggatatatacttagatcgtcctatttgagtgatttatatatgacaaaaataaaagagtaatgttgtattacataatacgtggatataaactcggatgaagacacattaccaatactatcacaagctagtcaactcaggtctaatgaaatccagtaaatacttcttctagtagtagcatataagtttgttctggtatacattattagtcctagataatcatacattatttctaacataaaaatgtcctaattcttatccataaatttaaataagaatcatcaggcttacaagagaacgacatttgtttgattactctgacactagaccacatttgtttgtttgcgtctccgttggtgtttctatgctacggtgaataggattttatgatatagggacgcaattcaaacataaataaacaattgtagcttatatattattcaaaaactaaaaatgcagtggtttccggcgttgagaatggcggcgatcactaaatcggaagacgcaaaagcgaaagccatggaagaagtggaagaagggttgttgcaactcgaggatgcgtttgtttctataagcaaagggaaaccctttttcggcggtgaagcaatcgggtttatggatatttgctttggaagctttgtggttctcttgaaagctagagaaaagtttaaagcagaaaagcttttagacgaatcaaaaactccttctctttgtaaatgggccgaccggttcttgtccgatgaaacggtgaagaatgtggcaccggagatcgaaaaagtagctgagtttctacaagaacttgaggttagagctcaatccgcagcttcaagatcttgagatcatcttagaaatgtattgcaatgcaattgtgttttgtgtacatgtaaaacgaaaataagttgaagttttaaagtgttgtgttcagtctatgctaggatttatgacgcggtgtatgggctacggactattttcagtttatgtttatcgaaaatataagggtcagcccaagattattaggggtcgtcccccctttaacatggaaatctatttaattcgggatcataattatttttggtaactgagataattttggaaatttttcaaaaatctttttaaaaaacttgctttaatattaagtttctattgggttttcacttttcagaccttcacatctttcttaaccaatatgagcccgccgggataatgtgctttcacatcgaaagttaaacgacttatcttgaccactagtacaatttgtctaatagtagtacttaattgaccactagtcctaattaatctactaatttttctgttttacattttaattaatctgctagtactaaattgtcctccatggaccctcttcattgcatctgctcctgataagccaaaaattttaatatcttgaaccaatcaaatttctctggtcagagagatctagtagcacgaatatatttattaacaaaaaagctaacaattattagagaaaattaagtaactaccaaaaagagtaacattgacaaatactttcacaaactcaaaaaaagaaagatatgaaaaatgagtaataataattttaaaataataaaataccttttctgtaaaatagacaaggtcccaaagacccagctcaagtccagctctctgtattcattaagttaccttctaaacattcacaccatctctttctctaacaatg

SEQ ID NO: 28120 - DNA, 3003 bp, Unknown; identical to SEQ ID NO: 28119
  misc_feature (1)..( 3003): 2750-1469P.txt file - cDNA_ID_2993959; gDNA_ID_1971909; Annot_ID_177048

SEQ ID NO: 28121 - DNA, 3003 bp, Unknown; identical to SEQ ID NO: 28119
  misc_feature (1)..( 3003): 2750-1469P.txt file - cDNA_ID_2993959; gDNA_ID_1620811; Annot_ID_169030

SEQ ID NO: 28122 - DNA, 3000 bp, Unknown; identical to SEQ ID NO: 8966
  misc_feature (1)..( 3000): 2750-1469P.txt file - cDNA_ID_2993961; gDNA_ID_1971952; Annot_ID_58633

SEQ ID NO: 28123 - DNA, 3000 bp, Unknown; identical to SEQ ID NO: 8966
  misc_feature (1)..( 3000): 2750-1469P.txt file - cDNA_ID_2993961; gDNA_ID_1971952; Annot_ID_177356

SEQ ID NO: 28124 - DNA, 3003 bp, Unknown
  misc_feature (1)..( 3003): 2750-1469P.txt file - cDNA_ID_2993965; gDNA_ID_1971952; Annot_ID_58639
agccaacatggctttaggccactattacacagccgctgttttggtacgtaaactcatatagatatatttatgttttgtttataattatgtttggtataacttatattcatcaatatttattgttttcgcagtttgcgcatttggtcaaatgctatgccaagtggtcaaaaaactcttttgacctctttacttgggaggatttgttcatgtacacggcatggtgtggtcttgccacgatgaaaaaagatgagcttgaggtaatacaatattaatcgattatatatatataaaaataaataagccgacttgtaaactttttttattgatgattttttaggagatttctgagaggatgggaagtcaaaaagttggccaccatttccaacacttgattagaaaaactcttggagggtaatatataactcttaaaaaatttctattgaatacacttgtcggcaattaaacaagcttggtttatttgttgcaggatgtttaaaccaccatgcttggattttttgaaaactcattcaaaaccaaagcacttttggacttatacctccacgaccatgtgaatgctcttgagatcctcatccaggagaaatttagggtgtgatgcatggttgctttaaaactatctagttttgtcttttttgtaaggctacagtattttcttgtctctcttggaacaagagtgtttgcaagttttcttttatattcaagtgtgttggacttagaaaagtttgaaaaatcgtactcaatatcaacaacgaatcctcttaagatggttttgtttttgtagataaatttggcttttagttcccaccaacatttcttccatgggtttaagtgttgatcatgagcttaacaagtcattagctatatcaaattgccaaaagactgattctcaaaaccgatcaagaaagaaagcatcattttataatctaacttgtgtagagtactgaaaatttgatttggaaattaattctcaccgacttaacatggaccaaatgtacttgatcattttcaatataacaaactagtgcaccgtaccgtattataaagtctttatgtatttttttttaatataaaaacattttcagatatatttatttccaataaattcatttattttaagaaattaaccaaaaagaaataaaaatgaacaaacatatataagtatcttgattagaagaagcaggagacaaaccctagatgagtgagtccgaggaaaagacatgcaacgacgatccaaagcagccgacacttgtccgagacctggttatatcgatcttggatcgcttgagattctctgattttcatcgagccagatgcatttcttcagaatggtattacgcctcgaaatcgtgcatcagagtaacaactccatggatcataatgtttccatacaacacagattggaaagaaaattcatcatgtaagttgttcaatcctcgtgaccatagttgctacactttaagagatgtcgggtttgatctagctagtagtcgttgtttggccagttccggtagatggttccttatgttagaccatagaaacgattttcatctcttgaatctgtttactcgagagaggatttatcttccttgtctgggtgcaaccgatggatgtccgatagaattttggagaatcaataataataatttttgggtgactctcaatgaccaaaacaattctgcaaaaaaaaaaaaaaacttcacatatggtcatgtgtcttagaataggcaaagctgttttgtgggtagatgaagaaaccagagactacttagttgtttggaattatgatggcttttttgcatatcacaagaaaggagatgacaagaataactggaaagtgattcaacctttaatgaatcaacgatgcgtggatatggtgtgtaaagaaagcaagctttacgtgcttactgatactcacgtcactgttcttgatttctcccacgctgatgcttctccaatacaatgtgcaagtttcaaatctccgaattatggtaatgattcgttttgcggcaagaatcttgctgtgactttgtcaggacaagttttgatcgttatacacagtgggggtgtctacaagatggatcctaaatcattagaatggagcagaaccaattctttaggagacgaagcatttatttttgatctaggaataactgttgcagccaaagatggagttatgaaaaattgcatatatttttatgctgacccgccttatcgacctaggaggaggtttgtacgcaatgctgaaagcggtattagcgtataccatattaaaaccaagaaagtggtccaagtgtatcaaccagctcttactgcttcgtctccaatatctttctcttctgctcgatggttcttaaatagttgcttcaaacctaaatcaagttttgtctcttggtaaagtttggagtattttcttttgttttgtactggaacaagatttgttgcaacttttcttttttatatattcaagtgttttggactaaaggattgatgaattggagattagacgggtgattattgattgtctataacatttgggcgtaatctgttataatttacattaccgttctgtttttggtaaagagaagatccacatgtccatcaatttttactgtgacattgtaaaaaaagtaaaatctgttaatctgtttttaagctgaggtgcagataaatctcttaggatagagaattcatgaatcaagagttgcccattgcacaaattagcccaattgttaataaaaaggaagaaataaacaaaatcacaaaagtcatctaaactttgaagaatctttaccaacgagaatctcacaaaagttggaatcgtgcacgcctctcgagttatctccggctccgatactccatctggtggattctgtagaagaaaaaatttcaatctttgttggattttctgggaaaaactcagatgggtttgctctgaatcgattggaaaatcaaaccggtgtggactctgcaaagttggttgatatg

SEQ ID NO: 28125 - DNA, 3003 bp, Unknown
  misc_feature (1)..( 3003): 2750-1469P.txt file - cDNA_ID_2993973; gDNA_ID_1971973; Annot_ID_58670
attgctcataaatctctctctctacccaatctctttatttagtaccctattcttcttgactttgtttctttccaaagcttatacaagagatattcattcttaaactaagattttcatatatattgaaaaagaaagaaaagatttctcatcattttactttttggtagagagcatttcaagtaaaaaatactttgagaaacaaaaagagaaaactagtatgagaaacaaatccttaaaaaaggaaataacagtaatgcacgtgatgatataacaaaaggttttgttttgtttgtttttttattgtttttttcttcttttatttgtctgttataataatcaaaaaacaagaagaaaaaacgagacgttcatgcatttaatctcgcaccttacgacaaagagtgagagagaggatcgctcaggtttgttcatcttcaccggacgattagcttttgcggtgggagaaagaacggcctgtcttcagctctgaaacagaggaacagagaggttaggaaggagacaatggttggacccgcgcggcctcagatcgttttgtttggatcttccattgttcagatgagctttggccatggtggttggggcgccattctttccgaggtctacgctcgtaaggtatcgtcagattcatcaatctctctctctctgtggcttctggattcgatattcatccttggttagattactagagcgttgattctacaagtagatcgcttattctaattactctgtattatttattattttccctaactatacatttgttcattgaaattcgtcttttgttttacgattgtaagcgtgtattatgcgaaccataatgttatttctccatttggatgttatgtgtataggccgacatcattctgcgaggatattatggatggaactcttctcgtgctttggaagttgtcgaccaagtgttccccaaggtactctttcaactccctttttttttgcttcttctctctttagactattagtttcttcaatactagattatgataaagattcagcgttttataggtctttatattagtccgtataggttgatgtgtgcttatcatttgacctagtaagaattctttgtgaacattattttactagttcaaaatgtaccccaaaaggattacacaagtggctattttagttgcatagtctttgatttagcatacaagactctgcatctgtttcaagggagatgtctctgtttaagcataatctgtttcatccgagttttcttgatatctcaagctgttttctcttacccattataaaaaaaatttggtagaatgagcttaactttgtagaaaaccatcatattcaaagcttctgttttcttccactttgtcgcctaaaaattgcaacttgttacggatgcaggatgctgcagtacaaccttctctggtcattgtctattttggaggaaacgactcaatggcgcctcactcgtctggactaggacctcatgtaccacttactgaatatgttgataacatgaagaagatcgctcttcatcttcaggtttatacttcctttataattgttagatttattatttatctcctgtcagtcacgtttaaaagccatttcaagtgctaatttcttcctctattttctgtttcagagcctttcagacttcacccgaatcatatttcttagttctcctccagtggatgaggctaaagttcgccagaaccaaaggtaacttccctgaatttcttcactatctctctgtttctccttattctctccggccttattaatatagatgtgcttctttttctctcacaagcccatacttgagcgaggtaatccgcacaaacgacctctgcaagacttattcagatgcttgtgtagagctgtgccaagaactcggcctagaagtagttgatctcttctctacttttcagaaagcagatgactggaaaactgtttgcttcacgtaagtattttttgagttctgaagaaatatagagagacctttgatatatatgactttctcagagtttccaaatgcgataaccgggaatggagtatcgacgatgttcattgaaatgttttaacggtatagtctggtttgttacagagacgggattcatttgtcagcacaaggaagcaaaatagtagcgggagagatactaagagtggttaaagaagcggaatggcatccatcacttcactggaaatcaatgccaacagaattcgcagatgactctccttatgatcttgtatcagcagatggcaaacagacagtaaattcttcagaatggacttatttctgggaagaacaatgggactaaacatttcaacacacacaacaacaacaacaagaccctatcttcacataattcactgtcttaatgtgataaagctttgctttagattgtttacattacaagtgtctctgctataatctgattcagtttcgctcgaaaaacgttaccattttaaagtttatacttatctaaatcttaaatcacagaaacacaccaagtttgtgttcaagtaatttctttttttcttgtttacattttacagacattaacaaatgtctgaaactcatcacataacactcctccagacaggggtttagtgttttgaaggtaaaatcacaaagtaactaaatttgggccgataacaaaaaagtcgcttaggagattggacttatttgggcctaaaacctaacacttaagggcccaactaaaatgccatttacctaaaaagcgacgcatcttcgtctactaccaaaccttttcgctgacgcaaccaaactcccaaaaataaaaataaagtttttattttctctctctctcttatttttcttctccttcttgttccgtctgcttctctccatctccttccatatctattgttctctctctcttcatgcccgaacgcatcgggtctcaaaaaccattgatacagacatcgatccttgtcaactagtactgatctataaatcttataaaaatctgtagagatatg

SEQ ID NO: 28126 - DNA, 3003 bp, Unknown; identical to SEQ ID NO: 28125
  misc_feature (1)..( 3003): 2750-1469P.txt file - cDNA_ID_2993973; gDNA_ID_1971973; Annot_ID_177489

SEQ ID NO: 28127 - DNA, 3003 bp, Unknown
  misc_feature (1)..( 3003): 2750-1469P.txt file - cDNA_ID_2993976; gDNA_ID_1971973; Annot_ID_58692
gtaaattcaacccggttaatcctggttacgccgcatgcgttgaagaaattcgaaaggatctaatcgtcgccaccgtagctgcgtcactaatcggttgtgtaatcatgggattgatggcgaatcttcctctagctttagctccgggaatgggaactaacgcttatttcgcttacaccgtcgttggatttcacggatccggttcaatctcataccggaccgcactcgccgccgttttcatcgaaggactgatatttctcttcatctccgccataggtttcagagcaaaacttgcgaaactcgttcctaaaccggtcagaatcagttcctccgccggaatcggacttttcctcgctttcatcggtttacagaacaatcaaggaatcggtttagtcggttatagtccttcaacactagtcactctcgccgcttgtccagcctcatcacgaatatcgttagctcccgttataacgtcagctaacggaaccgttagtttactcgccggaggatcagtttccggcgatattatgtgtattcacggacgaatggagagtccaacgttctggttaggtatcgtcggattcgtgatcatagcttattgtttggtaaagaacgtgaaaggagcgatgatctacgggatcgtcttcgtaacggccgtttcgtggttccgtaacacagaggtaacggcgtttccgaacacatcggccggagatgcagctcatgattatttcaaaaagatcgttgatgtacacgtcattaaacataccgccggagctttaagcttctccgggataaacaaaggacatttctgggaagctctggtgacattcctctacgttgatattttggatacgacgggaacgctttactccatggctagattcgccggattcgtcgacgagaaaggagatttcgccggacagtatttcgcgtttatgtctgacgcgtctgcgattgtgatcggatcgttgcttggtacatctccggtgactgttttcatcgagtcgtcgacggggataagagaaggagggaggacgggtctaacggcgattacggtggctgtttatttcttgttagcgatgtttttcacaccgttgctagcttcgattcccgcatgggcggttggtccgccgttgatattagtcggagtgatgatgatgaaatcagtcacagagattgattgggaagatatgagagaggcgattccggcatttgtgacaatgattctgatgccgttgacttactccgtcgcgtatggattgatcggagggattgggagctatgtagtgttgcatctatgggattggggagaagaaggtttggtgaaattagggtttttgaaaaggaaagttaaagaagaggataataataatggagttgtcaaagctagtgagattgatactaccgtttaggtttttctttgatttgattttacatttttgttactattgattttttagatttctttcttaggatgaaaggacaagtgattgcattattgatttgttgctcttgtagattttttgaagagaaaagtgtaaaaatgttggggaaaaataaagaaaactgttgaaatttcgagctctattatgctttttgacattgacactagtagaggttaagcacttgaatttgactttcattgaataggaattgaaaggttcattacagaaacaaaaagggaagaccccaaaaggagtcaagagggacacttaccttctcttaagttaatctgaatcaagaaagtaacaaaagaaaaaagcctatggaaactttgtatttgatagaacaaaaatgacttctcggtgatcgccgttatgatttttacgatctagctctcggtttgctctctcaaccgcctgatggtactcctaacagtcacagcactagccgtgttcattgtgtatgcaccgcctgctttcactttcccgcaatctttgcacccccaaatgccaacaactttcctcttaacggagtactgcatcagaaatcaactaaagtcttttcacaaaatgcaaaacagagatttgcaaactgaaaacctcattgaattcaacgacaataagttacttaggagatggtaatgagagtacctttccgcagaactcacagaagtacttgttgtgttgactcacttccatcttcttgatctgcttcctaagactggcaccatatcgtgtacctttgcaaacacacaaacacaaacagattcagattgaggattcaatcattacaatagagacatttcagttctctgttcatgatctgaaactaattcttactagagaaacaaggtttaaggtttcaacctatgaatcaacagaagtctaaagttgcatactttaaactatagcccaggattgatttctgaatactcaccatattttccgacaattctagccttcttcgttctcttggtctgaaatccaaataaaacaaataagttgagaatacaaatcgaagagattcaatgcaggcacacgaaacagaagatgcactcaccattttcgccggctgagggagaaaagcagacaatgtgcaagtcccggcgaagaggaaggatctctctaggctttttactcgtttcgataagtacagggtattaggggaaattagggcatctccatccatgataaactcacaaagtttctaaaaaaaaaaaatattaatattatatttgattatttgattaaaaaagtaattttgttaaaaaattgaaccaatagtaagatgagaattgtcatgactcaagtgagaaactttctacactctctctccttcattttcattatttttatttttttaattgtgagaaactcttatgagatacctcaatagagatggttttagggttttattcaatgggctataataatctatcatttaaagcccattaaataaaaagcccaataacacaatgtcgttttcgtttgtgtgacggacgattattgtaaaacacagatatcaatgttgcatcaggtgaagaacgagagatagagaacgatg

SEQ ID NO: 28128 - DNA, 3003 bp, Unknown; identical to SEQ ID NO: 28127
  misc_feature (1)..( 3003): 2750-1469P.txt file - cDNA_ID_2993976; gDNA_ID_1971973; Annot_ID_177521

SEQ ID NO: 28129 - DNA, 3000 bp, Unknown; identical to SEQ ID NO: 9023
  misc_feature (1)..( 3000): 2750-1469P.txt file - cDNA_ID_2993980; gDNA_ID_1971973; Annot_ID_58694

SEQ ID NO: 28130 - DNA, 3000 bp, Unknown; identical to SEQ ID NO: 9023
  misc_feature (1)..( 3000): 2750-1469P.txt file - cDNA_ID_2993980; gDNA_ID_1971973; Annot_ID_177523

SEQ ID NO: 28131 - DNA, 3003 bp, Unknown
  misc_feature (1)..( 3003): 2750-1469P.txt file - cDNA_ID_2993983; gDNA_ID_1971953; Annot_ID_58668
ctcattcttcaaagcctcattttctgtttattaagagtcactatccattatatagttctttttcttcccgggaaaaatctagaaatttcggtttatagtttacgtaaatgggaccaagaattaaaatcttactaatcgcgatttattggattttatatacgaattcatacaacttttgtggttgcaagatgatttgcgattgaccaacttgcactctcctaaaatttctttgtaactagataaccaaacattttttacataaaccatctctctgacaattactattaaactaatctgtttaaaacaaacattttgatggttgacacttattttgttggaaggaagagacaggggaatgtactttactggagctgtgaaaaccggttcttgattagagtggctacgtgctgcgcaacccatgccgagccagccaccgtgcagcagaatccgtgcgtgtgaccttccctctcgatagataaggaagtatgcggagcttgctttgaaatctggacaatggagagattctatgagagaccttccttctatcgttaggataatgcattttgattaagcgagaagaagggaaaccaagtaacctcttcaaagagttgcagtggaccccaatgatcatcaatgccaaataaaaatgcaagcttgctctggttttctctcatgaaatcccaatctggctctgctgcaagcttatatgccaaaaatgaaacagtggatcgtcacctagaatgctttagttggagatcaactatagggcaagcttggtcatgttgtagagctttcaagtaaacactttgcatactttgaattcaaaatgagactctaaactctatacaacacattgttgaaagaagagtacctctctaaactctgactttgccatgaagagaacattgcgcatggtgtgatactgcaagcatcagatgaagttaagtcgtctgaatagttagtagggaataagaacttaaagtatcaagaaaagaagatgtaatggccatcttcaagtctttatacaactaggttcaagtgtaaaacccaagaaaatcagtgaatatgagataatcaatacctgcctcaagtgagtgcaggtagcttgaacagcagtatcagaccatgaagctccaatggatttagatacaagcagccgtgcagctgacataggtaaaagtctcagcgatgcaatcagaaaacttgctgtagccgacagaacagaagacctgcacaacatgataacgatttcacaacattctaaataaagactgattggttctttcctatcgaggattcgtattgagaacaaaagctcacgctgcaagtttgccaattaatgattgctttgttgattgttggttcaaagtcaaaaatggatataggccaatgcaatataccacctgcaaagcattccagagaataatataagaaaaatcacatagcactgaaagaaattgtgatggagaaagtactactcttagaggaagccatctataccttgtccgagaatttcttcaataactcaagggatatataagacccaatagaatgcccaacctaccaagatcaattaagcttagagttgtaaattttcatgaaaatctggaaatccatccaactaatggacatatatattttggtcataagaagcaatatgtcaatggcttatacacatgacagtcttaccaatattattggaactttcacactctccaactcctgtctgataaaatcaatctgtatgataactaacagattaagatcttaacttcacaggatgaacaatacaagaacctaaaggctttcaaatccaagagcaatgaagaaaaatgatttttattaccttatgatcaatttgttcttgaaatgaaaatagcctcccagactcccagtcctaaaagtgaaaataatcaagtatcatgaaagcctatcaaactaagatattatatgaagagaaccatcaaagtttacacacagtaaaacctgaaaccaaagttaacgtaccttgctcgtgtgagatatttgcccaatagctacacaaataaaacaaaccactccaccattagagatcagaagaacaaactcaaactcagaaataaacagcttccatcttaaggactcaaagaaatcaaactcgaaaagtagagcagccataccaattacagaagcatttccaccaagaaactcgtataaagattccaaaaagtccttgtaaaatgacacaactcctgaaaaattacaagccaatgtatgaagcacactagtatatacacgtgcatgcataagagtcttgagcataataatgaaacctggatttcccggaataaacaatacatggaatgtgggattctcagcttgaatttccatcatctccgtcatcgaactttgatcacaaatacaaaaaacaaaacaaaaagtgtaactatagtcaaagaaattagaaaatttcgtaaaagattaatgtaacaatacccagaaactctgcacaatctggatttaacatgtcttttagtttcattcatcaatttgttttgagtctccatgtctccggtcacgcgattcaacttatatcttctctcagaactgtcaacacttgaaaggagaagatcgagagaattaatgagacaacagagaaaccactaaaaatcaaaactttgcaaaataagtgaagaagccttttaaagtaaaccaagtgaagagagcacaacaatgcacctgaaacaacaggagtagattagatactttggagaactgaaccaccgatcggaggaagaaagtaacggagagacggagttacccaaggtagaagaagaagacgcatatttgcagcaatagtaatacgacctcgttttgagtaacgcgacgtcgttttatgagtttgggtgtcgtcaggcttatctccacctcatacttccactacaaagagaggtgattgacagatagataagagtgtttggtagctcagactcagagagtcacaaagtgtgtgtagcagcaatg

SEQ ID NO: 28132 - DNA, 3003 bp, Unknown; identical to SEQ ID NO: 28131
  misc_feature (1)..( 3003): 2750-1469P.txt file - cDNA_ID_2993983; gDNA_ID_1972008; Annot_ID_177804

SEQ ID NO: 28133 - DNA, 3003 bp, Unknown; identical to SEQ ID NO: 28131
  misc_feature (1)..( 3003): 2750-1469P.txt file - cDNA_ID_2993983; gDNA_ID_1971953; Annot_ID_177418

SEQ ID NO: 28134 - DNA, 2963 bp, Unknown
  misc_feature (1)..( 2963): 2750-1469P.txt file - cDNA_ID_2994000; gDNA_ID_1620629; Annot_ID_47199
gaattctttttccataagtgtgttcgttgagcttgaagattagtctataaatgacgagaatgaccttaggaagtgtgctagctgtaatatgccattaaggttttgggtttaggggacagattttggtggaaagatcaagatcaaagtgtgttttggggtccatcttttgatgataagtgggaaaaaagttgcaatctttctatggaaggtgaggaaggggtagtatcgtctctaacaagttcggtatctatcaaggaaaaatagaaaatgactcttagaaggacgattaaagcaaatgatcctttacaaaaattgatatgctttgagtcccacatacctaattagttggaaacatgatgtgacactcccccagacagctaattaatcatccctgatgttagaagttagcagcaattattggtgtgatagagatgatgatatggaacatcagtgtttgtttaaaatttggattctataggtgagctgtgaggacttgattgattgttcctttagcccccctagggtatactgattacttgtgattgtagtagataccatttattataatagctttagattagcacgtcattctcttgctgcttttttcactgtgtattttggaatcttggtattttctcgttgaaatattggatcatcttaacaatagttagctgtctagaaagaatttttggtatgtgaaagcagatctacctaatatgaatccgagcttatcagaaagtctttgacctgcagattcaaggtaccgcgctggtgctggatgaaatcattaaccatgtccagtcattacaacgtcaagtggaggtgagactttccgtggtccaatttttgttctttatacctatattttacaatagccctgggcacaataaaagggtcaactcaaaacaatttgaaaatgaatagaattatgtgccgcaatctcatgaaactgtgacttgtgtttccacagatgctatcaatgagacttgctgcggtaaaccccagaatcgacttcaatctcgacaccatattggcttcagaagtaagtatcaaaatctcaaacaataatttggtcattctgattagtcttctctaggaaaaatttaaccatttcatgtgtttctcatttaagttaaccatacctctttgagtagcttctagtttctatcacaaaaggagaaacttttggggtatttattgatacaaacattaatttagaccattttagtgtaaggcataggaagatcacaacgtctactctcatgaaggaaactcagggaaaaataaatacacaacacacacacacacccaatgcaaataacagtagtgggtcaaaactcggaccacctttgttctgtaaaacctttctgtgtcttctgtgacttatgtcggatgtgttacttgatgaaccttttaaaaaaaaagttaattcatccctcaataatttctgtgggtctcttccaaaatcttgttatttcaaagtgacctatctaatttcatgatcacctgtggattctcatcaaaagttttggaccaaactaaataaatgctccctctctctttcttcttacagcttgtaccaccattaaatagccagggaccctctcatcaaaccttgttcttttaggataataataacacagcaacaacagttgacttctttgactagatcaagatctctatgaatgatccctttgctgatatcttttccggttttggctctgtgtttttttctttgacagaacggttctttaatggatgggagcttcaatgccgcaccaatgcagcttgcttggcctcagcaagccattgagaccgaacagtcctttcatcaccggcaactgcaacaaccaccaacacaacaatggccttttgacggcttgaaccagccggtatggggaagagaagaggatcaagctcatggcaatgataacagcaatttgatggcagtttctgaaaatgtaatggtggcttctgctaatttgcacccaaatcaggtcaaaatggagctgtaagttgggaaaacggtagagatcatgaatgtgtatatacatcgtataagctcgtttctctctatataaatataatcataaatatagatatctgttaagaaggtatcagtcatttgattcagagagacaacactggtatgattgtttcttattcttgtaccagatttcgacaatgtagaatttagtaggatatgatcattttgatctcgttatatatatcttactaataataaatagagataaaaaaattctatttagggaaataaatcagtatcgataaacaaaaacagaaagaagaagcaggggcatcctttggatattggagttgcacgaaaaagaagaagcaaaaacaaaatgcaactatatgtttagattgtttgagctggaccaagtgaaaatgcacctcttgaattatggtttaggttaggtaacaaaaaaccctaaattgactcattcgataagaacagagatgcaatcataaatatgagtgcaaagcacgttaccggaagctgtgatggccttgtttgcgtctaccgtatagaaagattgatgtgtatcatcaatcccgccactagatggtatcgatctcttcctcagcctaagattcaacaaattaaccgccttagacgaaatctacacgagagaaagtttcactttttaattcttttgcttaatcaatttgcttaatcaatttgctcatatatgtttacttaaatttttgatgtttttgtagtattatttcactattattgtgcctaattaattgtttttgtttttacaaactctctcatagcttattattctgcatcaaactatccaggattcggtaaagacactacgatcctcatagaagagatctggaattctagtttcagttgtttatcaattccaataaagtctacacacatagacataggataagattattattaagacctttaaaaaaaaatg

SEQ ID NO: 28135 - DNA, 3003 bp, Unknown
  misc_feature (1)..( 3003): 2750-1469P.txt file - cDNA_ID_2994131; gDNA_ID_1620530; Annot_ID_159693
agtgagatggctattaccagttccatcttgtgagacctgatactcctcatgtctttcgactgtttcatcatcttctacaagcatatcatcattatcatcccctgatatctctccttcttctacatcatcacctccaactatccgagacacagaatctaccaaaaccggactattatcaacaggtttctctaattccatctctctttgaactgttccattacaagcttccaaaactccagaacttataacctcattagattcaacagatttaggaacctcctctgcctttttctcactttcaactggatctacttgaacttgagttgcaatattaggcttctccaggacattttggacaatgtcatagtcattcacatccaatgcctcaaagagattcacacaactttctggaacagaatcttgagtttcattaatcataagctcaaagctatcgaaaaaatctgtgtgtctactaacaacagatgcatcttgcaagtcaattccatcacaaatatctccaagcatcaaactcttttcctgtgaaattgtttccaccttctcaccacttgaatcaccagacactccattgagttttgattccgtaattgataaattctccggcggttcgcaagtttctcccggagactcttgagcaatttctatgtaagaaaacacaaatagcatcagaaatagtttcaggcaatttcaagcaacagatgaactttgaattttgattactagaagatgaattaatcattcctaagaactttgacttcgaatcgaacactgacctgttcgtaagaccagctcctggagaactgccggtgtggcaagagaaatttgaggctcccgatcgaaactcgagcaaaagtgataaagcaaagagcgataatttcgattcggcagatgcgtgcgtcggtgaggaaacggagcgacggaagattccattgtctccgccggagaataatctcaaccagtaccgataggctcaacttcggcttgtctttcgccggagaaaggccgtcttgtggcggtggacgatttaaaaatctttattgggcttgtatcatctttgatgttaatgggcttcctgattttgtaggcccaatgaatccttcaacaaacggcgtcgtaataaggatccaaaccctaaaagatttatggattcagagttttcgaaattggaatttctcactctctctatctctcttagccagctctgatcatttcgatttttttccggtgaaaagggaggagaaacatggttgtacgtatcagactgtcgagatttggatgcaaaaatcggccattttttagggttatggctgctgatagcagatctccaagagacgggaagcatcttgaggtcttaggttacttcaatcctttgccaggtgattgacaaaacaaaatgtattccaattggtgttgttcgtagagttttcgattaaaatacacgatctcttggtctatgtgttcaggccaggacggtggtaagaggatgggtctcaagttcgatcgaattaagtatgtttcttctcatctaattctctagtttcttatgtttttttcggtaaaatcaggtaggttttgggttgaatttactcagaaagaggtctctgaatgcttcactagatgattaaggcttttctgcatttgaagtgttttggttaattgctaaagttagcttctagccgcctctagatatcttaatgcattgttgtatagtcaacattgtgttatagttaactatctttcgatctgatacaaaggagctgagttcagtctttgaatggtttttgttatcgaaaggcgaatgaatctacatgtttcccatggttggttttgatcactttctttctcttcatggtattgaaccattagttgaagcaattttctacctcatttaatcactaacttatgaaaggaaaaactgaaatatttgtggaaattcatcaacaagttttgttatataacaaatgaaacttctccgccagtcttgagtctttctatggaacttctgctctgagttctggaattgtttcttattagtgtaagatgaagaacctgttgattatctattcgtatacacacttacttacattcttaattgttcaccatatacaacctcttttgcataattgtatggtcatgtagctttagaatcttgtcatgctctttatcatcatctaaaattaagattataatgtccggatattagaagaacacatgtcaagactacttaaaagttagatcctggtctgtctttcttttgttctgaatgactagtttcaacagaggatgcatatagtttgattaatggacattttgtttgattctcttgttctgtacaggtactggttatctgttggtgctcagccatcagacccggttcaacgtctcctattcagatccggtttacttcctcctcctccaatggtggctatgggacgtaaaggtggagcacgagacacacgcccagttgatccgatgactggtcgctatgtggatgcagagaataaaacagttaatgccaatgataaccagcctaaggaagaggatacagaagccaagagtgcatgattcattagccttctgtcatcgtagcttttcaagttcactttgttgtcgattatattgtgtaatgcagcattagacaactgacttgtttcctttgtttggcgataaacggcaaggtgtttggcactttttgcagaaacggcacatattttgcattgggatattttagattttaaaaaatgaaaaagtaaataaaaatgccagcgagggaattaaaaaaaaaagaatggcagttgttaggtttaaattttataaaggaggaagccacgttttgcgtttagtcgccacccagaaaaaaccctcaagtcttcttcttcttcctcaatctctccacctcttttcaaaccttcttcacactctctctcaatcaatcctttttcttctcaaatctttcagttttgatctctaaatttccagaaaatg

SEQ ID NO: 28136 - DNA, 3003 bp, Unknown
  misc_feature (1)..( 3003): 2750-1469P.txt file - cDNA_ID_2994134; gDNA_ID_2214454; Annot_ID_182624
aagcttttcagcattgtgtatgaaagtgtttttttggttgatgtttgagtttaggatcacatttttgcatagtgaaatcaaaaggatcatttcagtgattgatttacgtgttcaagtctttgttgtaatcttttatgttgtgattgttgtgcagaaatgtcacgtgaagaagaaggatatcaggaagtttcttgatggtatctatgttagcgagaaaagcaagatcgtagaggaagaatgaatgcccatatcatcgtcttagctcctatttcttgtcttttgaatgttagtttcgttttatggaccaaatccaccggtgttgcaaaactctggctatcccttgttccctttttgtgttcgagattttatttacttatgcacaagttttggagacgagctatcattttcacctttgcttaattaaatcatatcgtgtgaatttgggattgttctggatttggcattgtgggttgtgcattcaaaattgatacttcagtcactaaactaaaatcaatttctcgcaacgctgtgatcaaacataaagataacttgagacaacgaaagcgagctttgcaatttgagaaaagctacgagacgccctgatggtcaggtgatcaatattagtgcagaatgattctgctttccagaagtcctctttcaaccatcgtttatcatattggaagcaccgaggattcatgagacaacttataatttaatcatgaaatgtgatttcgacatcagaaaggactagtatgttaacattgtgctcagtggcggatcaaccatgtttccaggaattgctgatcggataaccaaagagatcacggggttggcacctagcagcaggtggttgcaccacctgagaagaatattggaggatccatcttggcttctcttagcacattccaacaggtaccgtaaactctttaaccgtgtgatgatgattcaagttattcacacaaagtactgatgtttggtgtggatatcaaaggcagattacgagggatcagggccagccatttttcacagaaaatgcttttagacaacctctttatgtagcttgttgattgatgaaattggcttaagattaatatttttagtctttagtcgtggcttgttttaagttttgttcctttatgtttcttcatatgtttgagaaaagcggagatgggtgtgtaactttatccaaatgttcgtcaagttcaagaacagtataattttgaagatttgatataatggttgaaaaggagacttgaagaacaaggtcaaatgtgttttggtaatggttatgttttatatgttttgatcctcagtatcctctctgatcgacacttcaaacattttgtacttattttatctctttgtttattttttatggatcgtcagctaatagagaaccaaagtttgaaaccaaaggtattagagaacaaaccaaaagccaaaaagagagcaaactagagataaatactaaatgtgtcgttattcttcaaaacaaagatggtttcacaagtcttgcagccatacctcattaaggctgacggtatccgaattgtgatggacatgctcgtattcaactaagatttgtgaaaaagtcagattacacaacagttttctaaaaagtgttggactccaccatagtataaccactgtgcaaatcaccatctaccgtcaacaatttcaatgtcttattcactctgaaacgagtagagtttatatagagtgagtgagagagaggtcaatgtagtgtcacttgaaaactgcaatttttactctcgtttttttaccggttttacttgtcttttttactttttatatattatcttctatttattacccattttgatgttgccttattcatggtcaaataatgcacaaccacgagtaataccatcacagtctctttggttttgttacgaattactagtagtatctaatccgtatgtcaatgggttagaagtgataaattccattatgtatatatagtaaatactaaatacaacaatatcactttaaaaaatccaaaactatatatttaaaacggaattctcttgaggaaaaaaataaatggaattctcttttagtgtttgatatatacaaattaataggattggtaataatcccccttgatatgaatacaacagaaaagactaacaatcagtttatcaaactattgtacatttcctctaccaaccaccaaacaagaaggaatcgattcaaaagcagagtaactcatgtcacttagccactaaggtcaccgacgtttcccctcgaaggaatggtaaacaatgcttatcaaacacccacaaaccatctctctagatattcacgtatgtttagataaaagtatctcttgatacatgaatatgtatgtcacgtgtgaagaattcttatgctcagtcgacaaatctagcattggtccggtgggacatgaaaaccctgacattatgctcgacttgtctagaatactatgccccatttattatccttttacatagtactgtatcaattacaaaaatggggataggacaagatcctaattatcaattcctcgagtccaaagttatgggtaccacgtgaattattttacgaattttctttattatcttgacttctttacctgattttttatattttcaactacatggagacatggcaaaacgaaaaatgaggctattcaatctccaactttatctcaaaattttatttttccctctctttaagaccacttctaataataagtgtggttcttggctttttggtaaagaatagacaccaattgtccttttttattacaataaattcggacaaatttgatttcttgtgatggtggatccctttttctcgtgcttcgagctccaataaacttttcttacatttttaatccatttttacgttgatatttttttataaaatttccaccaccttacaaaagattttagctttttgtgttactaattaaaatcagaacaaaagttgcaagtctttcatctctatgcacaaatg

SEQ ID NO: 28137 - DNA, 3000 bp, Unknown
  misc_feature (1)..( 3000): 2750-1469P.txt file - cDNA_ID_2994151; gDNA_ID_2936581; Annot_ID_194904
aagtaagaatgatggcagtgaaaaaaaagctccggcaataaacataaacggaaaaaggagaaacgtgcgttgacgttaacggaatgttggatgccgtctaactagagttcataccatttggccgatagagcgagatggaaaatgacacaccggtcaaccagtttctgcatagctatgcccctggtttcacccattaattacgtaaaatgccattacatagttttttttttcggctctttagaagaatgaaaaacacacaattaaacgaaactcgtggaacattaacatgttaggaaatcaatcaacataattaattttctcggtcgtaaagaaatagtattcaagactcaagattatgctcttcttaaatattgcaatttggattaataaaaaaattttgctatgtaaaactaaaacctaattgtaatttaaaattttatttgaatccgtcctaataactaacaaagtcgtggatgcacgaaaacatatccaaaacttcaaaataaacccaacgaatatttcaaagcttagacattgtaatttgcatgattaaaataaagagcaacgaatatgcgtataataagtcaatttcataatcaattaacaaaaaaataaacgcgtacctattcttttgttggagaaaatacaatggcagtttcgttaatatatccatacacaagcccattataacaaaaacctcaggttataagaagctacacaccaacgcttaacctgttgtcttcagctgtgtacagaatcaagtttccaagagagaaagagagtaaaagcaaattaacaaaggaagactctgattcaccgagaaggttttggcttaaagatgacgaacactcgcgcgatctacgccgtcatcgcgatcctggcgatagtaatctcagccgtggaatcaaccggagacttcggagattcgctagatttcgtgagagccggatcttcatcgctcttctctggatgcacaggatcgatcgcagagtgtatagcggaagaagaagagatggagttcgattcagacataagccggcgtatattagcacagaagaagtacattagctacggtgctatgaggaggaacagtgtgccttgttcacggcgtggtgcgtcgtactacaactgccagcgtggagctcaggcgaatccttacagccgtggatgcagcaccatcactaggtgcaggcgttgaagaagatgagtcacttgaatttcctattttgcccctttctttttgtgtctctgtctctcttctcgattttcatttttttaattatttttattttccgggatatatgggtttgattttacacattgaaaaaaaaacttctactatagtctttgatttgaaaggaaaaaaaacgaaattgcttctttgtttttttttctggttgttgtctatatacataaataaaaaattcaaagttgcgtagattaaaaatagttattagtccgagaagtgattttgagatctgtgcgtagttttgtgtttactaacaattgttaatgaaaagtgattaccgttaatttaattatatgaatctgaggtgtttgagtaataaatatttggagcgtattaattaattatagtagacagaaagataaataaaagcagaattgaattgatccttcctttattagctgttggtggcatgttggcttataaggtaatgatgggaccatcacaacctaattcgtaacatttttcttcttatactaatttatcagcctcgaaacttcgttttggctgtaattgttttttttatataattaatgatgcgtcgttggatatgtttttagacattattatggctctcaatagacgaatctgtaaccttacaagtaataacgaatgtagtaccataatgaaaatgtggaaaacaagaagaacaagtcggagtataaaatattctgtagagtttattacccataaaacaaaagttttcatgaattcatgtaaaatatactctagagtttagatagttctcttttagcatgtgtaaagattcagaactagataaatgtggataataatctgaaatgccgaatataaacagaatcatagccgcaaatgatttatttttatataaccaatgggtttgtaattaatattactcgaatctgtaatattttccctccaccaagtttgaaattggactaacaatggaatcaatagcacaatcaggtataagaagttttagtcatttgatcgagattaatgttggagtgtagctttgtttgggtcatgttttgggctcttctccatttcatactttgccgatgtgatgaaccacgcactaacatgggtatagttcgttcgatgtttctattgggcctttactcgtaatattgggccataatgatcacgtgacttagttttgttttgtttttgtttgtgttcatgtaattttaagtagtgggcttcaacttgttttgagcccatagcacatgatttccctttattgtttattggtctactttttttttttttttttttttgtgtgaacattggtctacttttaaaatcattaaactatgtaaattagaatctaaaataaattcctccattgactcccaagtcttcatcattagaacaagaatattcttgtatttattataatacttattataaacaatttccttttctggtgagaaaaaacaaaatcaaaataaaaaatttccttttcttagcgacacacatttacttaacccacaagtcgtcaacggcccaaagaatatggatggttacgagagagcgcatacaaagacgcgctcctaaccgacccaattagagaaaacacacgcttgcttacacgcgtaataaggttcttacacgtgccaaaaacccttgttatataaagaaacctaggtcacgtcaatttctcatcaccattgctttgttttgttcgtcaaatataatcaattttaaatttcttctcttctcttcaaacgaatcgcctttttcgataatctctttgcatcgatttcatcatg

SEQ ID NO: 28138 - DNA, 3000 bp, Unknown; identical to SEQ ID NO: 28137
  misc_feature (1)..( 3000): 2750-1469P.txt file - cDNA_ID_2994151; gDNA_ID_2936581; Annot_ID_143752

SEQ ID NO: 28139 - DNA, 3000 bp, Unknown; identical to SEQ ID NO: 9705
  misc_feature (1)..( 3000): 2750-1469P.txt file - cDNA_ID_2994155; gDNA_ID_1972173; Annot_ID_179928

SEQ ID NO: 28140 - DNA, 3000 bp, Unknown; identical to SEQ ID NO: 839
  misc_feature (1)..( 3000): 2750-1469P.txt file - cDNA_ID_2994165; gDNA_ID_1620327; Annot_ID_153530

SEQ ID NO: 28141 - DNA, 3003 bp, Unknown
  misc_feature (1)..( 3003): 2750-1469P.txt file - cDNA_ID_2994195; gDNA_ID_2926285; Annot_ID_143644
ctaaaaagaggttgtagcccaagttcacctttttttaacttgggccaccaaatttatttgggcttaaaagaacgtaaattattttcataataatgtcctttactcagtagtaatttcaaatcatttctctcttctcatgtctcatgaaacaacatcatctacatgatctctgctctgcattagtaaatcaccacgaagcttagtgttaataagtagctcaccaaaacaaaaagatgcatcgcctgcaacatgaacagaagatgcatatgcagaattggaaaggatcagagactttaaaatttctgatttttctttagggctaatatacgtataataagaccatacgagatgcaaaatgttaataggtaagtcgaaaatgtaaaatacatagaaagacgaatataggacctcttaaatcttacaaaacatttgaaaccaatcagtcaaaaaaccaaccatgtcgttttggcaatcttctttgtacaccgtctttgctctcacagcccttaaaaaaagcgtctttcttctcttcagacaagggtgaaggcagattgtactgttgattggaaccgtgatgcgattgtctgcgaagcaaactgctgaaattgtttctttgcatctgccaacaagaattggtgaatgccgattagagtcacctctatatatgtacatgcgtatgttctttgtacaaaaagctaacaacctattgatctacagctggtttgattttacacaaaatcaggtcagttgtgaaagactaatgaggatcttacctttcttgcactttgtgaagccgatgatattagccacattgagggacaagcaaacgccaacaacaagcagatagtcagcttgaaatctaatcagagaaaataccccaaggataaaccatgcagctgcctgaagagtgaaaaaaggagaagatttagctgtgaagacaacagaaaaagacagcaaacaaatccacatgtttttaatgtttactacgctccagtaccatagacatcaaatccatagctaccatctcatggctacatctcactctttatagtcgcttgtaaggtaactgagcatataagtttgtaagctaccaagttttaactaatattatacttagtcagtgtaagatcataggatatactccaaatggccgacttggttccagcagataatctttccctactcaacatatattgtaatgtgacttcgcatgtgatttgactccaatgtcaaatgctatatcccactcatgcagagggaaaaaccatttgtcgcaaacttctttaactggtagcttcttgggggaagatattcaggtgtctagcgatctatatatgggtctacatgggattctaaaagactgctctcaattcttatctaccacctttgcacaatatgcttcaatataagggacatgtttattcttgcctattcttattccactataagggacatgtttatccttgcctattcttattcctagtcatccactaaagttccacaatgattgtgaatgggttttaagtaattagcttatgctgcaactgaagtgttagatatgaaatacttactgcaaggtaaagtgtccaccagaaaagccatgagtctttcttgttcatccgagccaaagactgtatagaaaaatgatgaaaacacatgagtatacaaaaaaaaaacggaaagggaaacacaaccccacatttctcgacaggctgaacccatatccttgtgaataagtgaagaaaagctaacctcctgatcaagagactcgaatttccagacactttctcccaagtcattgatctcgttccaccacctgagaccaaccagtatacgcccactgacattcttaaccacccagaagtcaagagcagcaagaagaacagtgactacaaagatgatgacaaagctgttgaagaagagagcagagagaatgtaaaacgccaacgcagcaccctggtccaagaacaaatacaaactggtttaacatttgtccaatgtctaacatttcctttgactaaactgatttatactctaaatcataccttgaagagaacatggaaaagacatgtccttgggtttgcataattttcaactggtgcctgtatctaagaaagcataaagttttggtaagattagctgtagcaattttacattgtaataaccattacgatgctacccaaaagagtacataaagattattatccgccaacacatcctctaacctagcaatgtttatttagctcaaatgcataatttctacggattatcggagaccaaaacgtcgaaacacagatctgacacaataacatctagatcgaacaactagatacaggttaatcaagaatctgatatgcaatcgaactcagaaattaagtcagaacaaaatgagaggaagcagctgaaaattcacctgattattagggtccatctttcgaagaatccaaaaggatcaatccgagaaaaagaagaagtaatctgctgatcagcagaaacgaaacaccttctccgttgtggaaagtatcgatcttccctctgaattttcccgagaaaaaatttctgtatcagatcttcaaaactcttgcgcgtgtctgctacgtgatttcttctatttttgataatttctttcaaatgtgttttttaattctcaacgagcccgataactcttctctggcccaataatatttaaagaagttaggcccaattattcaaaaaaaatggtaattacgatttcaccacaaaaacttgtgtttcgatcaaaattatccactatccacaacaaggcaaaagaagagttaagaaagaagaggacgacaatggctgtaaatatgtgaccatgaaatggcgagaggctgagataattgtcttatcccttcaaaatttaagacttttaatgatcggaaggaacaagatgacgaggtcccacgaaccaccatacacacttcaatttcaaataagagcttttcttcagttgttgctcagagacttaaccaatcaaccatg

SEQ ID NO: 28142 - DNA, 3003 bp, Unknown; identical to SEQ ID NO: 28141
  misc_feature (1)..( 3003): 2750-1469P.txt file - cDNA_ID_2994195; gDNA_ID_2926285; Annot_ID_205425

SEQ ID NO: 28143 - DNA, 464 bp, Unknown; identical to SEQ ID NO: 600
  misc_feature (1)..( 464): 2750-1469P.txt file - cDNA_ID_2994202; gDNA_ID_1592239; Annot_ID_152150

SEQ ID NO: 28144 - DNA, 3000 bp, Unknown; identical to SEQ ID NO: 8927
  misc_feature (1)..( 3000): 2750-1469P.txt file - cDNA_ID_2994209; gDNA_ID_2926219; Annot_ID_142373

SEQ ID NO: 28145 - DNA, 3000 bp, Unknown; identical to SEQ ID NO: 14791
  misc_feature (1)..( 3000): 2750-1469P.txt file - cDNA_ID_2994211; gDNA_ID_2684225; Annot_ID_191944

SEQ ID NO: 28146 - DNA, 36 bp, Unknown; identical to SEQ ID NO: 236
  misc_feature (1)..( 36): 2750-1469P.txt file - cDNA_ID_2994211; gDNA_ID_76056; Annot_ID_147017

SEQ ID NO: 28147 - DNA, 3003 bp, Unknown
  misc_feature (1)..( 3003): 2750-1469P.txt file - cDNA_ID_2994234; gDNA_ID_2214454; Annot_ID_182622
tacaaatctactatctacgttacaactaaaaaacgtatctatgagtacattaagcctatcagtttcaatccaatcatattttactactgaaatatgttctatgaacacctacaaaatgtatatatgaacacattaagccaattatattcttattttgtttatgtccaactatatgtctcttcatttacacttttgcatagtttcttcaaccactaaatgttttgactcaacaaatattttgaacaaaaaaatatatcatatagcaataattgatgatgtatttacaagaaaactaaattaagtaaaaaaactacttgattagaatgcgtttatgaccaaccaataaactaaaggttgagaaattaaaagaaattaatttgacgtaactaaaaaaataatataaatgagtcttagataattcaaagatagaaatataaatgaaagtaacaatctaaaatacgaccactaaattaaaagtaaatagacaaagaaaaatcatatatcgatcttaccatatacaaattacaaatttgtttcaaatcaacacatatttctaattaaaaaaaaacaaattgaaatatataatgtaaaattttacattaaatcatgacacatgtagtagtctaatttttttagtacaatgatatatgataattaagttttatataattcaaatacaaaaaatcaatacaaataatcttgaaaacaaaaattaaattataaattttaggaagacgatgatttataaatctttaataattcaatgcatgccacgataatgtgataactttgtagctgtgtataagcacacctagagatggagataacacctagagatggagatagagagagagaaagcttcaggaggagatgaagaagatgagaggaggtgcagatttggggatgtttttttctttttttttcggtccaatttttttttttctggatggattgatcaactttacaaaatctctggcaaatatttggtagatttttattttattttcattgctttaacttatgaataaatctatattttgaaaaataaaaagcttgtgtacttctcgaatgtttatggtcttaatattgctgcttgcttcgttttggtcgcatgattttaaatttactaggttataaatccacgcgtaatttttttatcaaaattgattcttaactctattgatttttataatttttaatatggtatatttaaaataaaatgtttactttattagaaattttaatactataatcaataatatatacttttcaccaaattatattacgcgtgggttcaaaaccaagtgttaattactttgaaaagcaaattttatataataaaattttaaagtatgatatactcataacttgatttttttttttttgccggctactcataacttgatttggtgctatttatgacaatttctctaatttattcgacttttgttattttgttctttaaagcaatgataaattattatttggtctggcccggaacggactgctttcaaatggaccgggccgccagcccacatactaactcatttagatataagtttcttctaacctctctttctctaaaaagctgtcggcgagtgggagaagcgcagagagagcaaacaaagagcaaacttgaattatttctccgttggctttgtttgaaaatatataaaaaaaacaattaacgggccatgagcttgttgcaaataatctatttatttttcattttaggatttttgtttctcgacacgagttgagctgattttgataagcccacatgacattgttttagagtttctgtttttcttctttatactttttaaaatgcggccagtgaataattttctaaggtttatgctttaatacaagttaaataatttttttgtaaataattttttgttggaatgtcaaatttattcaacaaaagaaaatgattacaaagagttttgaaaggtaaaaaatggagaaaataaacgtgaaaagtagaaacaaaaatgatgaaattggcgccacttacatcattatagaaagttcaaaaggcctaattctgacacaatattattaacgggtcatgggcttaatgacaataataaacttttctcacttttgagttttaataagcccacatttgctttagggtttctgcgtctctatctttaaattgcttccgacgattcataaactagggtttctgcctttagccgtcgtgagagagagagcaaatcgaagagagagcaaagagaaaataatatgttgtttgcgtttggtacggtgactcgatctgtggctaattcagtggtggtttgctacggctttctttcgacaatggtgttttctttcgacctaaacttgatagaccgaaccaaactgaaccaatttttatatatatttactcaattaaatcctaaactcctctatttgatctgaacccgatcaacccgaatacataaatatctaatcttatccatctgaaaggatactaaactctctaattcgaattacccgaatccagaaaaagccgaatagcatgcattctattggtacttgattatattaattggcatatatatgacctgttattgccaataatatattttgggtgtttcctgggcttcagttttattgggctaggaatgggtgtacttttaaacccacttctgattagtctcttagtaaaacccacttttaaacccacttctgacccacttctgacgccgtcatttttcttgagaaggagagagagcaccacttccgtcattccagcccaatatttttaacgggccatgggcttattgtaaataatgtatttttctcatttttggttttctttatgggcacgattttagtgggctgaattttgataaaggcccacatatgaaagatatttagggttttttctcttgataccttttaaaacgccgtcgagaaatctccctctagggtttctttgatcaaaccagagagccgtcagggagagcaaaacaaagatcggagaagatg

SEQ ID NO: 28148 - DNA, 3000 bp, Unknown; identical to SEQ ID NO: 11224
  misc_feature (1)..( 3000): 2750-1469P.txt file - cDNA_ID_2994242; gDNA_ID_2214484; Annot_ID_133328

SEQ ID NO: 28149 - DNA, 3000 bp, Unknown; identical to SEQ ID NO: 11224
  misc_feature (1)..( 3000): 2750-1469P.txt file - cDNA_ID_2994242; gDNA_ID_2214484; Annot_ID_183454

SEQ ID NO: 28150 - DNA, 3003 bp, Unknown
  misc_feature (1)..( 3003): 2750-1469P.txt file - cDNA_ID_2994248; gDNA_ID_2214605; Annot_ID_135645
aaacaaggaatgaaaaaataccttctcatcctccaccaaagtcttaagaataacatcaatctcacatgtgaatatctcgcaagagatgaatggaaacctacgagaagaagaatccatcactagccagaaataaagcattgccagaaacattcaacaaataaaagcatggaaaactgaaaatccagtcattataaaagaagcaaacattacttgaaagcacgtttgctatcagcatcgtcctcaggctcttcaacaacataccgcaatagtttctccacttgagttttttcccttagactgcaaataccaatacaccatcagaaacttttccaagaaatgttttatacagtatgtctggatatgtgaaacaaagtagtacaaggcaaatccctcacaaattaatgagtcggctattcaaagctttgcattcttgaataatctcttcctcgtcaagaagctcttccaatgtgaaactgtctttgtctagtatcgactccacctatatccataacaaatggaaagaacatcaactcaggaataaattccaaattgacctgaattgcaatatcatcacaacaatgaatcaacaaccaatctccgtgtaaagctagaggtaaatcaatttcactaggaaaatgaatgaaaaatgcaaacgaagaaccattccaacttcctaaaaccagatcaccaaggaagacgctgagcagctataagaaaggagaagaaatgaatctatcgttgaaactcacaggagacgatgcagagagagaggctagcttccagaacatggtggtggcgatgaaggagacaaggagactgagagcttttgcccgtagtcgaagaagtagaagaaccttagcagcggagcagtggcgagttttggggttcgagctgtgaaatcgatcaaatcagtcaatggtgatggagatccaaagagagagagaatgagatcggagttctcagatatttttgaaaaatcgaggcagaaattgcaaattttgcataaataaggacaaaagtttttaaatacctctaatttttgtatactatgtagtttccaagcaaacactagaaataaaattagaattctacagttaattttttttaattaatattataaataatactctagtctgattaatactaatatttttccttattttgttttgaataaaatgtaaaatttattccaaaaaaaactttgttacaaaaagtgcatcatctaataatcaaagagagcaatgtataaattttactaaaatcattaacaatattgataaaagcatttaaaatattaaaaaacatagttacatattacatatttatatatctcttttgtttttcttttccgtcgtaaatttattattctgtcttttgatcatgtgttaaaagataactcttgtaacaatagcttagcttatacttttatttttgaatgaaatcttcacattaaaaccaaaatgcatatccatttgcttgtaaaatcctgcaattattagcggaactctgctaataattgagttaattgttgcgaatgaaaacattgtggttgatcgcattgtccaaatgatcagattcacagggattcattactagttgggcttaggtttggttgattttgcagtataccatttttctttttaaatcatttttttaatcagacttgtttctgtttttctagctttactacttggtgttaccaagactgtcgatagaaaaatattctgtcaaattaatgcttgtatgagaacatgccgccatggtctacttgtcttaatcgtcgctgatcgaagaacataccttacttagaagccttaaatgcttgaagaattcatacttttaatatatgatcctagaaggccgacacccgagttatgcgaactaaaaacttacaaattttttttttaccaaccagaaatttgccaaaaagaatgtaaagccgcgaaatattggccagtttagaaccataataagaaattagtaaataaaacataaaaagtactatattaaccttgaaaatttgttacacagtattaatttaaatttgattatacttaaatagacatcttatattattaatttaaatttgattataattaaaaaatctatagcagatatgactgatttgacaaaaaaataaaatgcaatattgtcgtttggttggtacagaaattttttcatcacaaattatatcacattttggagtttaacaaaaaaaagcatgctaaattgctacaatataaatcatagttagtgataaactgataatatttgaaataaaattagtacccatattaatgtaaaaagggaaaaaataaaaaatatatgtggtattgtttcttaaaaaaagatatattttaaagtataatttaggaaaccaaaaaaaatgtgaacaaaagaaaatatagattggtggttatatttccccttaagaagtttaattgacctctaaatttggtttaatggttaatctcttttcgtcaagctatattcttccttttgatcaaaacacccacacctcttcttcttcttcgcataaaccttaaaaaccatttccacgatcttcttcttcttcttccctcaaatatagcttaggattttcttaatttcctctacccaagctccatggctgctttcaatttcttcctctcttcttaattctctcaggtaaacaccaatcccttactcgatctacgtgctcaattgattggatctcgttttctctttacttctccggagccaaatctagttcaatttcgtaaccttggatttagtttagctatcgcggagatttgattctatgtttgatttagtcctccttgaactttgtactgagttatcattagattgtataaattgtggtttaatttggtgaatacaggtaggggagatttgagtagtagtagattgttagatttgtaattcagctattggtgaagaggaagggagagagagatgtgttgaattggttgagtttggtggaggaaagaagaagaagaaatg

SEQ ID NO: 28151 - DNA, 3003 bp, Unknown; identical to SEQ ID NO: 28150
  misc_feature (1)..( 3003): 2750-1469P.txt file - cDNA_ID_2994248; gDNA_ID_2214605; Annot_ID_187203

SEQ ID NO: 28152 - DNA, 3000 bp, Unknown
  misc_feature (1)..( 3000): 2750-1469P.txt file - cDNA_ID_2994252; gDNA_ID_2214609; Annot_ID_135717
atcaacatgtctatatacatgtggataaatggtcaaggaaacatggataatgtactttggattggcgtttattgttcatgtataacttatgtattagtatgaaactaccatgtgagtcattagataaccatatggactggattgcttggacaatcattaatggacaagtatgtctttgatttgctgcaaatgtgtttatagctcgataaaattgtatcaacatgtctatacacatgtggataaatggtcaaagagacatggataatgtactttggattggcgtttattgtttatgtataaacgtatgtattagtatgaaactaccatgtgagtcattagatgaccatatggactgaattgcttggacaatcattaatggacaagtatgtctttgatttgctgcgaatgtgtttatagatcgataaaattagcacttttttgtttgctcatctaacattatcattggagtccaacttgatataacctctctagcttctcttcttcctctcttacaataaacaaaataaccatcaccttctctttcaacctctctacactcctccctcgacgtcatagctacatcggccgatgaagaaatcggagctacaaatccagcaacaccaatcggtatatcaagccttgtaggtcgtttcctctttaaaactcctcccggaggagacgatgcagaaacgataacccgaatctagatggaggtttctcgaaacgaagacgaaatggcgatttaggagaagaaacagtggtggatatagaggaaggagaagatgttggaggtttgcgatgagaaagagattggccggaagaattatcagccatcaacatcgagattgtgagataatcggaagacctgtaattgtgaaggtaactctttctcatctgcaaatctcaactgtcgttttattagatatcaattcaaacaaaaccatgttaaccggttaagcaattgatggtttagtttgaaaaggatataattatcattttatcatccagaaacaagagaaaatgtctcatccctgaaaagtgcctaaaaaaaaaagagaatattacgtgattagacacttttttaaaagttagttcataattatgcactttaaatagagaaagcactttaaatggagaaggcactttaaataaattattttatttatttactctttaactacattttttcaatcggctatctcttctctctccttttcccatctcttcttttttttttctttttttttttctcactttatcgaagaaaaaaacctttcccagaatatcttcaattccaaatctgcaattaatctccaaatccactctacgcgatggctttctcttctctcttgactaattggagaatacgaggtcttggtttctttaagattgtgatttattttgcaatttaaatatttgttttgacataaatttgagatttagttatctaagaaacttcttcttcttcaacaatggcgacttgaattgatttctgctctctctcatgtgtcaaactcgtttcacctatgtagcatcgagattccggttaatcaaatttcctgttattatggacatggtatacataatggatatagatcagtaaaaaggtttccgaatggatatatttaaatggactcgttattatggacaccaaaaaattgtttgttgatttttctttcggtttgtagagacctctaccttcaaaaccttatggacatggaactttagtttctttacaaaacacggttaatcaaatctcctgttattattgatagggtatatagaatgaatatagatcagtagaaaggtttctgaatggatatatttaaatggactcgttattatggacaccaaaaaattgtttgttgatttttctttcagtttgaagagacctccacttccaagatcttatggacatggaactttggtttctttacaaaagcacggttaatcgaatcttctgttattatggacttggtatatagaatgaatattaattagtaaaagttttctgaatggatatatttaaatgaactcgttattatggacacaaaaaaattgtttgttgatttttcttacagtttgtagagacctccacctccaagaccttatggacataaaacttttaccaaattcctgagataatcgagatcgaattgtttaagaaacttctctcaaaagttatggagacgtggagaaagagaggcgctacaaatcatgaagagagagagagagagagggagagagagagagattttatttattttgggtaaggatcgtggaagaggaataacaagaaagagaaattgagaattaaaaacataaatattgaattgagagtaaaaaaatctaagaaaaaaaaaatagtagaaaaaatgtttatttcctataaagtgccttaaatcgaaaaatattttttaaaaatgcctaatattagaacatttccaaaaaaataagattttctaaaaatgcctaaacgtgtcaaattatcttgaaaatacgttgaaacagtggtggaaaaatctcgacccgattggtatcaattaaggatccgacgcgtgtctcttttattactgagaaattgctgaaacgggtcaaatactatgaacttgatccttgcatcgttctctttggccccttgcttctgtgttcgattctttccttcaaaccataacaatctcaatctcttattcccaggtctctctctatctctctctctctgctacaagcttataagtattttgtggtcacatgtcactaatcattctcatgatccttaatcttagctcctagggtttctgtgaattagtctaattttacaattttatgcctttgaggatatatcttaatgtgaaagttttaaacttgtaactcaaaaaccatttgttagttagtaatcatcatcattctgaattgagctttgtttgaatttgagtagggcaacgaaagattcaagttagttgcggtggtaagagtgaggtgttgaagagtgatacaatg

SEQ ID NO: 28153 - DNA, 3000 bp, Unknown
  misc_feature (1)..( 3000): 2750-1469P.txt file - cDNA_ID_2994252; gDNA_ID_2214609; Annot_ID_187302
acatgaatgctttgttaggtgatatttcagaaatgttaatcacaagaccttatcttcttaccacagactttggcttgcttatctcctcattgttgacggtgtcctcatatcctcaaaccaacctagtacgcctacatttaaatatgtagagatgttggcagatttggagaagttccttaactggctgtctatacacatgaggataaatggtcaaagaaacatggataatatactttggattgacgtttattgttcatgtataaacttatttattagtatgaaactaacatgtgagtcattagatgatcatatggactggactgcttggacaatcattaatggacaagtatgtctttgatttgctgcgaatgtgtttatagctcgagaaaattgtatcaacatgtctatatacatgtggataaatggtcaaggaaacatggataatgtactttggattggcgtttattgttcatgtataacttatgtattagtatgaaactaccatgtgagtcattagataaccatatggactggattgcttggacaatcattaatggacaagtatgtctttgatttgctgcaaatgtgtttatagctcgataaaattgtatcaacatgtctatacacatgtggataaatggtcaaagagacatggataatgtactttggattggcgtttattgtttatgtataaacgtatgtattagtatgaaactaccatgtgagtcattagatgaccatatggactgaattgcttggacaatcattaatggacaagtatgtctttgatttgctgcgaatgtgtttatagatcgataaaattagcacttttttgtttgctcatctaacattatcattggagtccaacttgatataacctctctagcttctcttcttcctctcttacaataaacaaaataaccatcaccttctctttcaacctctctacactcctccctcgacgtcatagctacatcggccgatgaagaaatcggagctacaaatccagcaacaccaatcggtatatcaagccttgtaggtcgtttcctctttaaaactcctcccggaggagacgatgcagaaacgataacccgaatctagatggaggtttctcgaaacgaagacgaaatggcgatttaggagaagaaacagtggtggatatagaggaaggagaagatgttggaggtttgcgatgagaaagagattggccggaagaattatcagccatcaacatcgagattgtgagataatcggaagacctgtaattgtgaaggtaactctttctcatctgcaaatctcaactgtcgttttattagatatcaattcaaacaaaaccatgttaaccggttaagcaattgatggtttagtttgaaaaggatataattatcattttatcatccagaaacaagagaaaatgtctcatccctgaaaagtgcctaaaaaaaaaagagaatattacgtgattagacacttttttaaaagttagttcataattatgcactttaaatagagaaagcactttaaatggagaaggcactttaaataaattattttatttatttactctttaactacattttttcaatcggctatctcttctctctccttttcccatctcttcttttttttttctttttttttttctcactttatcgaagaaaaaaacctttcccagaatatcttcaattccaaatctgcaattaatctccaaatccactctacgcgatggctttctcttctctcttgactaattggagaatacgaggtcttggtttctttaagattgtgatttattttgcaatttaaatatttgttttgacataaatttgagatttagttatctaagaaacttcttcttcttcaacaatggcgacttgaattgatttctgctctctctcatgtgtcaaactcgtttcacctatgtagcatcgagattccggttaatcaaatttcctgttattatggacatggtatacataatggatatagatcagtaaaaaggtttccgaatggatatatttaaatggactcgttattatggacaccaaaaaattgtttgttgatttttctttcggtttgtagagacctctaccttcaaaaccttatggacatggaactttagtttctttacaaaacacggttaatcaaatctcctgttattattgatagggtatatagaatgaatatagatcagtagaaaggtttctgaatggatatatttaaatggactcgttattatggacaccaaaaaattgtttgttgatttttctttcagtttgaagagacctccacttccaagatcttatggacatggaactttggtttctttacaaaagcacggttaatcgaatcttctgttattatggacttggtatatagaatgaatattaattagtaaaagttttctgaatggatatatttaaatgaactcgttattatggacacaaaaaaattgtttgttgatttttcttacagtttgtagagacctccacctccaagaccttatggacataaaacttttaccaaattcctgagataatcgagatcgaattgtttaagaaacttctctcaaaagttatggagacgtggagaaagagaggcgctacaaatcatgaagagagagagagagagagggagagagagagagattttatttattttgggtaaggatcgtggaagaggaataacaagaaagagaaattgagaattaaaaacataaatattgaattgagagtaaaaaaatctaagaaaaaaaaaatagtagaaaaaatgtttatttcctataaagtgccttaaatcgaaaaatattttttaaaaatgcctaatattagaacatttccaaaaaaataagattttctaaaaatgcctaaacgtgtcaaattatcttgaaaatacgttgaaacagtggtggaaaaatctcgacccgattggtatcaattaaggatccgacgcgtgtctcttttattactgagaaattgctgaaacgggtcaaatactatg

SEQ ID NO: 28154 - DNA, 3003 bp, Unknown
  misc_feature (1)..( 3003): 2750-1469P.txt file - cDNA_ID_2994267; gDNA_ID_2214624; Annot_ID_135922
ctaatgatcaaactgaatcaagctcaagcatttaaagcacataactttcattgtttgatccaacactcatccaatttatgcaatcccttaaacaaaagaagttcactaagacctctgataagtattgatttcccagcttggtaccaacttctggctccatcaaagcatcaagagcacctttatctagaaccgtatcaaaagactcatcagccaactgcgtaatagaaaaagtaaaaatatttagtgaatgagagacagaacaaggatcagctagaaaccaaaaaaaaacagagcacaaaaggaaccaaaacctgcatctttgttatatccataactcgccaacgcagttcaggccgagtccgaatgttccgacgaagcatatcggagataacaactttggagaagtcaacattagtgatgtcacggaatccagcatcgtacaaatgctcagtaaggcgggagtttccacatccaggaaccagaatctgaagcgaatcagaagaagaagatgaagaatcttggaggagaggtaaaagcgagtcatggagctgaggccactcagcataccactcgaaagagtcgtcgttgcctctgagagtgaagaatttgtcccaattctctttgctggtgaaatcttcgagggtttgtaaaaaatcatctgttgaagctgctgctttgtttcctttcttcttccccatatctctgctatggaaacacacccaagtcccaaaaaccctaattttccagacttaaggatttacacttaccacacggtgacgactgacgaagacttggaggtggtggatgctgaagtcggagtacggtttaaatttggttcaaagtcgaatcgaaactaatcaattaaaccaaaccgaaccggaaagctaaccaaaaccatcgagtcagagtctgctgtgggcttaaattgggtcagaatgttgaagataaaatatttgggcctcatacatatgtgttttgattgataaatcatgaattctcataatcggtttaaactttctttttttttgactaaacaaaaatttataatcggctatctagaatcataaattttttaagtaaatcgaaagtgaatttatttatatcagaatttttgttttatataatatatggatacattttttgtcataatggatagagacactgccatcaaatatatggatgctaaattgttcatttttcaagaaaaacttggcacctaccattagataaaccaaaagttgaattgaaaggtttttagtttttagttattctcacttttgcaattggggtttcatgcttacataagcaatgacatcaatagctataatttgatggcagtgtctctcttctccgaagatgacaagaatatatgaacaggtatatcaagtcaagtctcttttgttttcgatataaacaacatatcatcaatcattactccgaatgtatatttaaagttatggtaaattattgtcacattatacaactctcgatccttatatctaaatacgttaaaaatgtataaaagacaaaagttaacctatttgaaaagattattgtcacatttcacctcgaatatttaatgtcaaaagattttatttgaaaacttcgaaaaatatatgtgtttaatcggagacgaaaaacgaatcacattggttatgacgtaactaaaaggatacatcataaatgatttaacatagagaatttcattttgaagaccatattattgataccgatatatgcatagcatcctctaaatgctaatgaaactcaggtatctagacgatgaaaaaacaaaataaaaaacaaaaaaaaacgatatgtcatttttcgtagtttggacgtgcagacttggcatgcaatacggaaatcacccgaacttccatctacattttggtaaaaaaaataaaaaaagtgttacctaatttctttttgcattttttagttttatttttgtaactcgttaagtcattattaaattgcacattcatttggatggacatacattgtgggcagtcactgttttgttgtcagagtcattgtattgatatatagagcaaacctaacgaatacaaaaagcatacggcacatggcatgacattgatatatataccttcacaaaccaaactcacatccaaaatacttctcttctttctttagtttcttgtgaaagatgattacttacatgggtctgagccacacgattgtcttactttatttatcccgtcaagaatgtttggaacttaaaaatgttggttcttaatgtaataaatctctaaacgttacgagagaaggacatatattaccatgaaaagactatgattaattttattttattttaattcattttccagatgcttcgaaaacaaggtaccatttgaaaatacaagtctaaggatggatgttgctaaaccattatttatcctcgtgagtgtcttaagatataacatatagtcaaaacatcatctatatatataattaaaaagaaagtttccttccaacgattctaaaaatatatttaatggtaagataaactttagaagatatatgcaatagatggtataatatattgacaaactcatccaatagcataaatccaaatcttagcttattttaattttatgtactctgataagtgataaatggtttctttagtcgacatctgcttgataaaaaacaaaaataacccatcgaggaggaggaatctagctggcggatatattgaaccctatatctaaaatagtatccaccactaattttaagaatttacgatccttaggccatttgtatgaataccttataattaaccaaatcactaacccaccaaccccttttaacttttctatttggtaaagagacatatagaaacaaatcttttatattaaagttgcctataactactattttctacgttgcatacttgcatatatccgataaatacttccgtcataacagagtaagagtttgtatgtaacaaatttcaacaaaaagaagagaaaaacaatg

SEQ ID NO: 28155 - DNA, 3003 bp, Unknown; identical to SEQ ID NO: 28154
  misc_feature (1)..( 3003): 2750-1469P.txt file - cDNA_ID_2994267; gDNA_ID_2214624; Annot_ID_187738

SEQ ID NO: 28156 - DNA, 3003 bp, Unknown
  misc_feature (1)..( 3003): 2750-1469P.txt file - cDNA_ID_2994275; gDNA_ID_2214636; Annot_ID_136135
ccactaaacttgatttcaaaacgtttctatagcccatctttttcatgttgtcttaattatcagatagattttactctttagactcctaagaccaagttactgtatatcattttgattatcttattttctttcactttctaactgtagtttacttttaggttccattccgtaaacattgctatcgttttgtgatgaacacaaatttcttttaatttgttctttcctcattatttcctagcaaaatgaatggaaattatatttcataaaatgaatctttaatagtttaatccatgttacagccattttcacctttacatgagagacaaatatgtacggcgaactttctagcaacaaaaaactgacatgcatgaagatggtttttttttttttttttttttgccagtcgcatgaagatggtttataaccatattgaatggtcatttttgtaagctacaacgagaggcgagcaatgagacttgccaaaaaaatatgaggaaaaatggtgacttgcatgtgtacttaaaatggcaccatatggatggatgaaactacttaaagggttgaaacgagacgattttctgttgccatatttttcttgattttgtgtggctgtgtataccataatctctaattgcaacctgaaattaaaatggtctatttatgttgcaattagtgattatgttttatattaaccttggtaaagttagttaaaattatccaagtcagcctgacgtgttacactgtggaacacgaaaacaaatctttgtagtttgtatgtgttgaaatcgtatttagctacatataataagtgaccatttctaccctaaacttccaaattactgaacaaaacgtttcaaaagatccaaacatcgattttcaaaatacaaacacaaacttacgtacgttgaagtttgtggtcattgtgatcgttaactttacgaaagattttagataatagacaagaaagttctcaatcaaactctatatttcatgtgtatataataatatgtgtccacctcatgtattacgtcactcataggaccatatgaccaaaaaaaatcaacaaaacacaatgaaacatgatgttgacaaaatggaccggtgaaaggaggaacgaaacgcaattacgcaacccttgggacattttttttttttaacttttcttatccttttactgtttatgcagttgaaagattttcagataaaattcaattttcacacagcgaacccaatatgttagcattcaaagaaaagtaaaaactcagtgagttaatattgcaattcctcttgtctctatctctataccgcagcccatgttttttgtagataggcggttcttggctgtttccatgaagctgaaactaacaaaaccaaagtaatcatttaattaaaatcactaattgtgctctttaggagagcaaaattcttttgatttatgcaagaatttaaaaaataattatataagctattggtgctgaacgaattatgtaaagtagtgtatgccagtaggtgatagtgatacgaatagtgtattacaacgaaacgtgaaattacattcttgatactcgaaaacatatacaattttttaaaaaattgttcagatatatgatacacatttttgttgatgttaatttagtaatatatgtacattacacacacatgtctcgaattcttctatgtactagtatcaaatatattaatcggtcaaactacttgacagattaaaaccatgtgcgacttctcgtatagcttgtattttaaagttttgatctgatcttaatatgcgtttattggatcatataatataacatgtggtattttaatatcataaattttggtttcttttcctaaaaatacaacaaaatatctaaaactttttgggaaatctgttagaagatttttttttgaatcaattgtagtaaatcacttcttaaaatgaattttttaaataatataaaacataaaagagaagagaagaggaggttccatcaacttcacttacaatgagaaaagactatgcaatttgcacaatcatgactttaaccaatacacatttatcagaagaaaaagaatctatctttatctttaatctctttacaaattcttttttattgataaaatttcaaaaatgatgtgattcaaaaatacaaaaatgatttgattaaaacatcacttttcttcctatatgaacttgtaataataaacgaattaccggacttcataaaatgatttgatttcgtatttaaggccatgaaatcttctaactaaagtttgtttctgataaggtataggatgtatattctttgaattgtgacaattggtcgaatgtatttttaccttaaactgatataagattctgctaatctagactcaagtcatcaagtagtcaaagctgagaaatgatgctctttttgttttcaaaagcaatgttacctttaagaaatcattaaacttgatcaactatttgcgtcacaaacaatttttgtttttaatattatccacggatgattaaagtaatgttgttcagaaacttggtgccttcgtgtctcgtaccatcacttgtgtcaaaccggcgtcaaacgcccactctcgctgacctcagcccccaacaaatacacacatacggaaatgaacatgtaatatcaaaccatataatattcagtaaaaaatcagtatcgataatatagtaaaataataaccttcacgcattccttcttcttctataaatacacacatttgcctccacttactctcgttcaaacaattcttcgtcctattaaatacaaaaaataaaaatccttaaaaatatatccttatcttcaaccaagaatgggagaggtccaagaaggtcccaaagttgaacaagagaagaagccggctgccaccgtagtcccagttgagactactgacggcaagccaaagagcggcggaggagattccgcggcagcagcagcaccaccggtcgccgcggttgtctctgcctttgtttacaaagtggatatg

SEQ ID NO: 28157 - DNA, 3003 bp, Unknown
  misc_feature (1)..( 3003): 2750-1469P.txt file - cDNA_ID_2994275; gDNA_ID_2214636; Annot_ID_188131
actaaggtgctcctgccgaggaatacaataattgtaacaatgatagtgaaacagaccggtaccaaatccaaacttttcatattatttattagtgtaataatgttgcatggagatccatttagatgtttaaaattgagttcttgatgagttggttctactttgtctctgcccccactaaacttgatttcaaaacgtttctatagcccatctttttcatgttgtcttaattatcagatagattttactctttagactcctaagaccaagttactgtatatcattttgattatcttattttctttcactttctaactgtagtttacttttaggttccattccgtaaacattgctatcgttttgtgatgaacacaaatttcttttaatttgttctttcctcattatttcctagcaaaatgaatggaaattatatttcataaaatgaatctttaatagtttaatccatgttacagccattttcacctttacatgagagacaaatatgtacggcgaactttctagcaacaaaaaactgacatgcatgaagatggtttttttttttttttttttttgccagtcgcatgaagatggtttataaccatattgaatggtcatttttgtaagctacaacgagaggcgagcaatgagacttgccaaaaaaatatgaggaaaaatggtgacttgcatgtgtacttaaaatggcaccatatggatggatgaaactacttaaagggttgaaacgagacgattttctgttgccatatttttcttgattttgtgtggctgtgtataccataatctctaattgcaacctgaaattaaaatggtctatttatgttgcaattagtgattatgttttatattaaccttggtaaagttagttaaaattatccaagtcagcctgacgtgttacactgtggaacacgaaaacaaatctttgtagtttgtatgtgttgaaatcgtatttagctacatataataagtgaccatttctaccctaaacttccaaattactgaacaaaacgtttcaaaagatccaaacatcgattttcaaaatacaaacacaaacttacgtacgttgaagtttgtggtcattgtgatcgttaactttacgaaagattttagataatagacaagaaagttctcaatcaaactctatatttcatgtgtatataataatatgtgtccacctcatgtattacgtcactcataggaccatatgaccaaaaaaaatcaacaaaacacaatgaaacatgatgttgacaaaatggaccggtgaaaggaggaacgaaacgcaattacgcaacccttgggacattttttttttttaacttttcttatccttttactgtttatgcagttgaaagattttcagataaaattcaattttcacacagcgaacccaatatgttagcattcaaagaaaagtaaaaactcagtgagttaatattgcaattcctcttgtctctatctctataccgcagcccatgttttttgtagataggcggttcttggctgtttccatgaagctgaaactaacaaaaccaaagtaatcatttaattaaaatcactaattgtgctctttaggagagcaaaattcttttgatttatgcaagaatttaaaaaataattatataagctattggtgctgaacgaattatgtaaagtagtgtatgccagtaggtgatagtgatacgaatagtgtattacaacgaaacgtgaaattacattcttgatactcgaaaacatatacaattttttaaaaaattgttcagatatatgatacacatttttgttgatgttaatttagtaatatatgtacattacacacacatgtctcgaattcttctatgtactagtatcaaatatattaatcggtcaaactacttgacagattaaaaccatgtgcgacttctcgtatagcttgtattttaaagttttgatctgatcttaatatgcgtttattggatcatataatataacatgtggtattttaatatcataaattttggtttcttttcctaaaaatacaacaaaatatctaaaactttttgggaaatctgttagaagatttttttttgaatcaattgtagtaaatcacttcttaaaatgaattttttaaataatataaaacataaaagagaagagaagaggaggttccatcaacttcacttacaatgagaaaagactatgcaatttgcacaatcatgactttaaccaatacacatttatcagaagaaaaagaatctatctttatctttaatctctttacaaattcttttttattgataaaatttcaaaaatgatgtgattcaaaaatacaaaaatgatttgattaaaacatcacttttcttcctatatgaacttgtaataataaacgaattaccggacttcataaaatgatttgatttcgtatttaaggccatgaaatcttctaactaaagtttgtttctgataaggtataggatgtatattctttgaattgtgacaattggtcgaatgtatttttaccttaaactgatataagattctgctaatctagactcaagtcatcaagtagtcaaagctgagaaatgatgctctttttgttttcaaaagcaatgttacctttaagaaatcattaaacttgatcaactatttgcgtcacaaacaatttttgtttttaatattatccacggatgattaaagtaatgttgttcagaaacttggtgccttcgtgtctcgtaccatcacttgtgtcaaaccggcgtcaaacgcccactctcgctgacctcagcccccaacaaatacacacatacggaaatgaacatgtaatatcaaaccatataatattcagtaaaaaatcagtatcgataatatagtaaaataataaccttcacgcattccttcttcttctataaatacacacatttgcctccacttactctcgttcaaacaattcttcgtcctattaaatacaaaaaataaaaatccttaaaaatatatccttatcttcaaccaagaatg

SEQ ID NO: 28158 - DNA, 3000 bp, Unknown
  misc_feature (1)..( 3000): 2750-1469P.txt file - cDNA_ID_2994285; gDNA_ID_1620849; Annot_ID_50977
agatgaacatgaagctcagattcaatttgcgttagaacgaggaatacctgcaacactttctgttattggaacacaacagctcacgtttccgagcaatgcatttgatcttatacattgtgcacggtgcagagtccattgggatgctgatggtatttcttttgttccattctttttcctcttagcccatttgcttcaaggttccaatgatcattatggtttaatttgttaggtgggaaaccgttgttggagctcaatagggtacttaggccaggaggtttcttcatatggtctgcaacaccagtctatcgagataatgacagagatagcagaatttggaatggttcgcaacaatcatgttttttttatttgatcattcaacactgatgttgatctctatggttttaactgttacaattctgttttgcagaaatggtttctcttactaaatccatttgctggaaggtcgtgacaaagacggttgattcctctggaatcggacttgtgatctatcaaaagccaacatcagaatcctgttataataaacgcagcacacaagatccaccactttgtgataaaaaggaagcaaatggttcatggtaaaaaaactattacacaaaatgatgctttacattcacatataagtaatgtccactattttttgtaacatttccttctgattaattttaggtatgttcctctcgctaaatgcctttccaagttacctagtggaaatgtccagagttggcctgaactatggcctaaacggcttgtgagtgttaaaccgcaaagcatttcagttaaagcggaaacattgaagaaagatacagagaaatggtcagcaagtgtttctgatgtttacctcaaacatctagctgtaaactggtcgactgtgcggaatgtgatggacatgaatgctggttttggcgggtacatttacaatctctgaaactttaaccagaatccggtttatcccaaactgaaacttgacacaagtttttcttcttttcttctttttggtatagttttgctgctgcacttataaatctaccactctgggtgatgaatgttgtccctgtggataaacctgacactctctccgtcgtttatgatcgaggcttgatcggagtttaccatgattggtgtgagtccgtcaacacttaccctagaacatacgatctgttacattccagtttcctcctaggtgatctcacacaaaggtaaacaacagatctgagtttgtatatctatagagtttcagttctttagcagtagccagtaggcattcactgttttggttcggttcacggttagcttaaccaaagtcggagttgtcataccaaactcggtttgatattgcgaatagtgtggttaacctttaatatgtgttttttgggtcaatttcaggtgtgagattgtacaagtggtagctgagatagatcggatagtgagaccaggtggatatcttgtggtacaagacaacatggaaacaataatgaagcttgaatccatacttggttcgcttcattggtcaaccaaaatatacgaggaccggtttttggttggtcggaagggattttggcgtcccgctaaaccggagctcagatagacagaacgagagacataaacatactagcaaagtaaatttgtacactactatcaatgacgcaaccagattatatcacagcgtactatataacccattaagggggttttgttttgactttctgattttgttccataagaagaattgaacgaaaccgagtcactaaagactacataagatattaaagttaacgagaataattcttttgccaacaacatatattgttttgagcaaaacaaattgtttcttatatcttagattctcaaggttttgtccaaaaaaaaaaaaaaagattctcaaggatattttgtttttgtcacattggttcctataacaaaagaatatggaaatgttgacaaaataaaaatagtagaatgtgaattagaattaagataactaaaacatagaggggtttggttgatgacaagtgaccagaccacgaggatcccacatgggaagagaattggggacgaagaaagcaacagctaagcaaccttccactttgaaatagtctcacattacttaagatgacaatcattccttcaacctcaatcattcaaatatcatcacaccaaatctatcgtggctctcgttgaattttatttataaccgacacaaattgtaagaaataaccaagaaaatcaagaaggtggaaccattcgtccattccctacgccacaagtctttttcaacggtggatggctggctggctgtctaattgagccttttcttttgaaccccttttagttctgtaactacattttaccaggtataatagtatattagttaatattaagccgtattacacatttttttttttcacctaacgtttatatatatatataatattttttagttacagaaaatcctcaccactttaaattacgatgcaataagatcaatctaaatggataacttgtaaagaaaagaaaatgatacagtattcgtggttcggaataagtcaagtatgattcgaacatcgtacaatattggtatttgacaataatccttggagaaaaaacaaataaaaagtttctgcagaaaagtttaattttcataaaaatacaaaaagaaaaacgttgattggttgagaaaaatacgcacacttatttagttcttcttgaccaataaaataaaataaaatctcctaaaagtcaagtttcctcaatcgggcaaaacacggcggacgcgctttcttcaatcaaaaactcgtctgctaataagtctcttttcgtcttcagcttcttccgctttttctgattgcttctctgatctcttatctctaattctaatccatagtaaactcgatttcatcatcttctgctcacaacacttactgttgttgttgttgttgttattgttcttctcgattcactcgatcgatgttgttcaaaatg

SEQ ID NO: 28159 - DNA, 3000 bp, Unknown
  misc_feature (1)..( 3000): 2750-1469P.txt file - cDNA_ID_2994285; gDNA_ID_2214645; Annot_ID_136342
atgtgttttttgggtcaatttcaggtgtgagattgtacaagtggtagctgagatagatcggatagtgagaccaggtggatatcttgtggtacaagacaacatggaaacaataatgaagcttgaatccatacttggttcgcttcattggtcaaccaaaatatacgaggaccggtttttggttggtcggaagggattttggcgtcccgctaaaccggagctcagatagacagaacgagagacataaacatactagcaaagtaaatttgtacactactatcaatgacgcaaccagattatatcacagcgtactatataacccattaagggggttttgttttgactttctgattttgttccataagaagaattgaacgaaaccgagtcactaaagactacataagatattaaagttaacgagaataattcttttgccaacaacatatattgttttgagcaaaacaaattgtttcttatatcttagattctcaaggttttgtccaaaaaaaaaaaaaaagattctcaaggatattttgtttttgtcacattggttcctataacaaaagaatatggaaatgttgacaaaataaaaatagtagaatgtgaattagaattaagataactaaaacatagaggggtttggttgatgacaagtgaccagaccacgaggatcccacatgggaagagaattggggacgaagaaagcaacagctaagcaaccttccactttgaaatagtctcacattacttaagatgacaatcattccttcaacctcaatcattcaaatatcatcacaccaaatctatcgtggctctcgttgaattttatttataaccgacacaaattgtaagaaataaccaagaaaatcaagaaggtggaaccattcgtccattccctacgccacaagtctttttcaacggtggatggctggctggctgtctaattgagccttttcttttgaaccccttttagttctgtaactacattttaccaggtataatagtatattagttaatattaagccgtattacacatttttttttttcacctaacgtttatatatatatataatattttttagttacagaaaatcctcaccactttaaattacgatgcaataagatcaatctaaatggataacttgtaaagaaaagaaaatgatacagtattcgtggttcggaataagtcaagtatgattcgaacatcgtacaatattggtatttgacaataatccttggagaaaaaacaaataaaaagtttctgcagaaaagtttaattttcataaaaatacaaaaagaaaaacgttgattggttgagaaaaatacgcacacttatttagttcttcttgaccaataaaataaaataaaatctcctaaaagtcaagtttcctcaatcgggcaaaacacggcggacgcgctttcttcaatcaaaaactcgtctgctaataagtctcttttcgtcttcagcttcttccgctttttctgattgcttctctgatctcttatctctaattctaatccatagtaaactcgatttcatcatcttctgctcacaacacttactgttgttgttgttgttgttattgttcttctcgattcactcgatcgatgttgttcaaaatgcgttcttttgtggcttttgtgctccttctgagctggttcggttcgtgttgttctctcaaggaccaaggtagagactttttttccgtttcacttactcgtttttgtctctttggtagtgtagaaacagaatccagttccctgattcacatcctctgtttcgcttttacgttttcagctgtagattttctcaaaagtgaagatagtttaaagaaagatctatcgtcagatgaagattccacgtatttgtaagtagcagcttcaggtttctgagatttctattgggtctttagattagaaacactcttgtcacttgtgctgattcaatttctcagtttcctaagaacaactcttaaagtttcgattttactactttttattctctactctcaatctatcttgactttgaaagattttttggtataacaacaacatatatgtagtcaagatctacaaatttctctaatcatttcatagcttcattctctctatgtatgtatggtagaagaaactgttgttacttgtaaccgacacttctaaacttgctatatttagagcatgttgtgcaatggcttaatttcttcttctaccttttcttaggaaagcttttggatttcacaggaaaacacttgtccgtaacccttacaaagacttgccttcaagaaaagaccgcaaaaaccgtgttgtggctgcaactacaacaccatcatcatccccagaacctgctccaaaacatgtttcaactaaagcttcaacagtttcagagccacaaaagagatcatctacacaagatgtttcaccttctccatctgcgccacttgcaaactctcccattccaagaaactctcattcttctgttcctttagttgttggctgcgtaggcggtgctttttttcttctccttgtagctaccggtctctactttttcacaagtaaggccgggaaaactgtgaatccttggcgtactggtcttagtggacaacttcagaaagtattcgttactggtaatttcctttcttgaattgttttggcaagtgcacttacttggagtagtaaccaaatttgtctcatttggtttcatcaatgtgtggtttttgatactcaggtattcctgtactcaaaagatctgagattgaagctgcatgtgaagattttagtaatgtcattggatcttgtcccattgggaagttgttcaaaggaacattatcaagtggagtggagattgctgttgcttcttttgctactactactgccaaagactggaaggacagtacagaaattcacttcaggaagaaggtattgttttccccatttttgttttcttataacaacaacatatagtcgacttagcgcgttctgttttcacgatttcagatcgaaatg

SEQ ID NO: 28160 - DNA, 3000 bp, Unknown; identical to SEQ ID NO: 10348
  misc_feature (1)..( 3000): 2750-1469P.txt file - cDNA_ID_2994291; gDNA_ID_2213643; Annot_ID_132334

SEQ ID NO: 28161 - DNA, 3003 bp, Unknown
  misc_feature (1)..( 3003): 2750-1469P.txt file - cDNA_ID_2994295; gDNA_ID_2213649; Annot_ID_132436
ctgcaggaaatgaaggctcaaggagttgaaggagatcgacttcagttactaagagacgttggtggagctttcaggcctggcgtattgacagcattggtcggtgttagtggtgcgggtaagactaccttaatggatgtcttggccggtaggaaaacaggaggctatgtagaagggagtattaacatatctggttacccaaagaaccaagcaacatttgctagagtcagtggttactgtgagcaaaatgatatccattctccacatgttaccgtttatgaatcccttatctattcagcatggcttcgtctttccgccgatatagataccaaaacacgagaggtaagtattactatacataacgtttcatttgtttttcataatcactcgcatgattttataatctggtaacctttttttgcatgtagatgtttgtggaggaagtgatggagttggtggagcttaaacctcttagaaactctatagttggtcttcctggtgtagatggtctttcaacagaacagaggaagaggcttactatagcagttgaattggtagctaatccatcaataatcttcatggacgagccaacatctggtcttgatgcaagagctgctgccattgttatgcgtactgttaggaatactgttgatacaggaagaactgttgtttgtacaattcaccaacctagcatcgacattttcgaatccttcgatgaggtttgcttccgaaattttttccacttttaagtccctgaaccaggataaagttaatcaatcatctttggtttaatgcagttgctgttgatgaaacgaggaggacaagttatatatgctggaacactaggacatcactcacaaaaactcgttgaatactttgaggtgaatcattggttttgcttttcctctctcttggtcatatgaatatggaactatatctagaacttttcttgcaggctattgaaggggttccaaagatcaaggacggatacaatcctgcgacgtggatgcttgacgtcactactccttcaatggagtcacaaatgagcgtggactttgctcaaatattcgttaactcctctgttaatcggtatgtgttttaagaaaaatgctactactaatgcagagttgttacactgtgtttctaatatgaacttgatgttttactcaggagaaatcaggaactcatcaaagagctgagtactccaccaccgggatcgaatgatctctacttccgaaccaagtacgcgcaaccattttctactcaaaccaaagcttgcttctggaaaatgtattggtcaaactggagatatcctcagtacaatgccattcggtttctcatgacagtagtcattggtgtcttgtttggtctacttttctggcaaacaggaactaaaatgtaaggcatcttcttttctctattccataagtaaactatcatcttatcaaaatgtgacgtattcatccaaaaacaccaaaacagagagaaagagcaagacctgaataatttctttggagccatgtatgctgctgtattgttcctcggtgccaccaacgctgcaacagttcaacccgcagttgctattgagcgaacggttttctaccgcgaaaaagccgctggaatgtactccgccattccctatgcaatttctcaggtacttaaccattctaataattttgcctcaacttttatatgctacttttcctaagatatggttatctaaaaatgatgcaggtagcagtagaaatcatgtacaacactatacaaaccggagtttacacacttatcctttactcgatgatcggatacgactggactgtggtcaaattcttctggttctactactacatgttaacatgcttcgtctacttcaccctatacggtatgatgcttgtcgccttgacaccaaactatcaaatagctggaatctgcttgtccttcttcctcagtttctggaatcttttctccggtttcctcatccctagaccggtaaataaactaagcaacttccatttgaattaataatataaaaaaaaagtgttttaagagctagactaaacttttaacttttgatgcagcaaataccaatatggtggagatggtactattgggcatcacctgtggcttggacattgtatggaatcatcacatctcaagtaggagacagggattcgattgtgcacatcactggtgttggagatatgagtcttaaaacgttgctcaaaaatggattcgggttcgattatgacttcttaccagttgtagccgttgtccacatcgcctggatcttgatctttctctttgcctttgcttatggtatcaagttcctcaacttccaaagaaggtgaagaaaacttttattagaatagatttcaaaaatctttatagattagtgtttgaatgaattcatgtaaattttctttgtcttacctaattatttatttattgtcgtttggtaataataaataacagttcatgtttacaatatgatattttccttattcatacttggtatatgctttattctctagtgattctcattacaaagatatttgtgcaagtttggactcgtcccaaatcaagaaaaatgttgtagtcaaaatgcttttcagttacgagtctgaaacctgacaacacaaaattataaattgtttttatttattttttcctaatcaaaacgattttttcctaatataaaatttgatattttgaggggtaaaagaagcaataattgagaatattgagatactaaaattgtgacgagacgcttgatgggttccacttaaatatctgatatgattacacgtggcagactatgctccgtccctaatgagcttcgtgtgattttgattaattttgttaacttttatttttgtcgtctagttttttaaatttattaattaatttttatttatcttctaatttagattttattcctttaagctttttcgctcctcactctctcttcccaaagttctctgtaaaactctctctccgtcttcaatg

SEQ ID NO: 28162 - DNA, 3003 bp, Unknown
  misc_feature (1)..( 3003): 2750-1469P.txt file - cDNA_ID_2994303; gDNA_ID_2214450; Annot_ID_132911
aattatttccggaaatttcataaagatagacatggttcaataaatatcttaaaattcccaatcgttttcaataatatattattcaaatgccacagtcgtaatcttaaacggagaatcaatgtcttttctctcccacttatagtttcagattcccacatagaggtagatattgacatcttactctaacaatatattcttaattttgatacgcattatgtaataataataaataatgctacatgaatacaaactatacaaaaaacacactataatttaataaccaacaaagaaagattaagtagcaagtttagagagttttttttttttcattttgcttttttgttgttgttaattctctgtttttctcttcatacttttctccataacatttttcataattttactagttgatgactctactaccattgatcaacctattaataaaaaaaacttattacaaaataaaactaatagtaattgataacaagagtaattagtgaaggaaaataactcattcagaaatattattagcaggacaaaaaatatcaaatattaatggttaataaaaataggaataaatataaatagttaattaattaaaagccatgaagggtagccatagaaaaagcatcaagcatctcaccaatcaaaagcaaatgatcagaaaaactctataaaaacgtcaaaaacagaaactcaaatcacaaaacaaaaaatggcaaacacaaatcttgaatccaccaacaaatccacaacaccatcaacggatatggagctaaagaaagtcttcgacaagttcgatgccaacggcgacgggaaaatctcagtttcagaactcggaaacgttttcaaatccatgggaacgtcgtacactgaggaggagctaaaccgtgtattagacgaaatcgacatcgactgcgacggtttcatcaatcaagaagagtttgctaccatttgtcgatcatcttcctccgctgtagagatccgtgaagcgttcgatctctacgatcagaataaaaacggtttgatttcgtcctctgagatccataaagttctgaatcgtcttggtatgacttgctctgttgaagattgtgtgagaatgattggtcatgttgatactgatggcgatggaaatgttaatttcgaggagtttcagaagatgatgtcgtcgcctgagctcgttaagggaaccgttgcgaactcttagagttccgattttctttttataaaaatttacattttaagttttaaaggtttttaacaacaaatttactttatatgtaagtaagcattctgctgtgcaaattttaaacttgtttcttttttttttcttttttttttccggcattgcatttaaattttagatcaatttattatgagttgcataatttggatgaaattttattggagaaaagactttcactaaagaatcggttataataattatgaaagactgaataatgaaatggtcaacaaagacgctatttgtctggaatctgattcttcttttgtgtggcctgaaaaacgggaatctaattcggtttaaaatacgggctttttaaaggcccagctttgagttgagcccaattagaattctattcaccttttttttagtagcttgagagattccacttttttcttgtcaactgaaattgtgccaatgataagaaccaaggccttattagtctgtctctacaagcacaacacttttttttttttgttcctgtatatgtttaaaaactaaaaatgaattatgattataaagtaaaagtgactcaaaatatctatctcaccataaatcatagttattaccttaagacatggcgtgatcgagtcgattgatcgaggcattgagcatttatataccacacacacggttacataaggtcgggctatatatgaaacacgtgaaatgtcacatttcatagttcttttaatggtgcaaattctgatgtctccatctcaccatttaatactgctgaattaacttttgccccttccattccattgtatattctattgtatttaacttcacgtaatttagttcacgacgttgaccttttttttaattagcaaaatcagtggatcatacagtattttctaaatacttcctaatcgtaatatattcattttactatgaaaataaaatctgaaatcagattcattctcatcttgaataatcatttttctgcgttaaaacaataattcgcgtcgaaacacagttggtatatagaggaaaacaactttaaaagcgtgtgagcttaggtgaaaaatgtcaaagagaaaaggaaataggtaggtatgattcaatttgaacatcatgatttttaatctgatattttctaatcaacacaacaaaattacacatttaaggggaaaaaataaaactgaagcatatgcagtagtatttggtaatcccaacaaacaaaaaaacaatcagaaaaggaggataacgttatcattatgttgtaatccatgatttcacatgccaacagctgcacttatgataaagaacccctctcttattaatcttcaaacctaatcaacaaattattaagtgagatatatatatatatatatatatatatatattacatataaataaattattatatatccccaaatcttcgtcttattatttttgtttttgtttttttgtcgtctccctcttattaaaaatgaagctctccattatatggattcagtagaattattataatttcttggacgccatttttctcaccccaagttttccttctaataaatacgagtgagcaatgcgtaagtataaaaacccgatttgactatataatattctcaaaagaataatactactaaatctgattttcaaccaaaagccaaattcagcggaggaactgtcgttttcctttcttctttacttcttcacctttctcctatttcatcttaacatataatcatcagaagaaaaaaaaattctaaaacaaaagaggaacttgagaattttatgcttgagacaaaatg

SEQ ID NO: 28163 - DNA, 3003 bp, Unknown; identical to SEQ ID NO: 28162
  misc_feature (1)..( 3003): 2750-1469P.txt file - cDNA_ID_2994303; gDNA_ID_2214450; Annot_ID_182427

SEQ ID NO: 28164 - DNA, 3000 bp, Unknown
  misc_feature (1)..( 3000): 2750-1469P.txt file - cDNA_ID_2994309; gDNA_ID_2214670; Annot_ID_136605
aatagtttttgctcgttgtttctgtcttttgatcatgtggaatacaaaacgttattgcagggatcgctccgggaaaatccgagccaagcgaaagagtacattattccgtatggagattggtttgggatggtgtcttctccacatttcttggcagaaattgtaataaaccctccttagtagatatcttaacgttcttctatttttcttaactcttctttaatgatatgatgctgtgaaatttaggttttgtatgcgggtttactgattgcgagtggaggaacagatataaccatctggttactctttggttttgtggtatggttcactctctcatttgcaagatccactaatgaaatgcttcttttttctggattctgagaaatagtacttatgttttttctttttgggtgtttgtttttcttttgtaggctgctaatctgacatacgcggctggagaaacgcaccgttggtatctccggaagtttgagaattatccggctaatcggcatgccattttcccttatgtctactaaatggttaagagatacaatggttgtcttctgtaaatgctgaattctgaacatcgaagatttgtggtgctttgttatgttttaatttagctatgcttctcagttctcatcttctttatactggtgcttttttcgtttcaagaatgtattttacacaaacaaagagtgtgactttggcatttagctgtcttttacagtggcatgagttcgactcgtttacttggccagttgataatacctcctaagtttttttgttttttttgggttcaattttccttgtattcccgaaatgttgttaatataactatttgactacgatttggaatgaaaaatgttggttttagtaaactaactacgtaccattactaaatccaagacttccgaaaattatcttaccttgcttcttatgaaatcaatcttggcttcttttttttcatcgatacactttactaagcataactagcataatagacttaaataactaatcggtgaagagcaagtcttctccaacaaacttagtagataactaaggaaactaaaacataatctaaataatagagcaacaagttactcctacaatctaggagatttattttcaaaagactaattcaaaaccaaacaagaacaaacttattctcacaagtgtattaagagtcatataacctaaggaaaacaaccttaaagatacttggaggatatgggaactcaagatggccaaaaaccgtcaccagttctgatttatatagactttacttcaagggtttgataagggaggaaacaagagggtttgtggcaggatttggtgttgcaatttgcggccaagaggacaatctcttgtttcaagtgaaaagttcacttcatgactccgcaattacagttttggaggctgaacttatggcattgaagctaggactaactgaagccgtgagtttggggatcactcatatctcaatctactgcgatcattttcagatttttgaactggtaaattgttcttgaaatatttacacatttctttaggttttgattagttttgcatgccaaacttgttttttaaaataaatttaacattttaaccaaaacaaaaatttatgatgacgagaaaaatctcctaattgagtaggttttgtccttatcatctttttaggttatgtggagatcagtgcctgataaagatagcattgcaatgataatgtatgatgtgcaacgcataagacaacaattgacatcaagcacacctcttctggtgactggaaatcaaactaataagttagcttatgaacttgcactagaaacactagtttcagaaatcagcataagtatcgaagagaaagctctaacatgtgacaaaaattaaacgtggaaagtacgtaagctgcaggtatcatctctaatcacattctctagactctagctactatacattaattttaatttatcgtcgtggaatgttgattatgtttacgcctaatgttgtaatttcatggttgatggatatatatagatgtgggtattccttttgctatatgtgtggagtcgaatggaaacaacggctaggagctggtggttgcattcatagcaaagcagagatttattttatcattatttgttttgcagtcttgtttggagtgaacttttgtttctttttgattgttactttaatcaattgggttgtgaatttattcaagtgatttacccagagacttgtaaacgggacataaaaagaaataaaacctttcatttctatgtcttatgattgcatgagtagcccaaacatctatggtctagtggtaggagaagatttagggaatagtgaaacttgtagatccgagttcgatcctccctgaaaacaaaaatcatatttgttttgagaagtctctcagttaggccttgggtcaattggtttacctggtagttagaaatgcagccggtctgactatcccctttcattagtcggaaaacatttcaaattcagaacagacagtatggtagtccttcggtgagaagtccactctaaaatatttcggtgcgtttctgccgaggctgaccagattagccggtagggtttatcaaaaaaaaagaaaaaatgattgcatgagtacttctcaattcttcacgttgtcacaacaacttgttacatgcgactaaacaaattatattgaatccatatacagatttgccaaatactatttctatttggtcccaattagtgatgtttatatggatttaatagcccatttagttatatgggtctgttgttaaaaaatagcccatgtagacccgtttatggaaaaagataaatgggctttaatttcgacccggcccaaaattacaacgtgttcaacaacaactctattatacaaacagactacgtcgttctcttccactcatctgaaaacaaaatccaattctctctctctccctccagattcaaacgatccgatccaaaactttgagatccgagaagatg

SEQ ID NO: 28165 - DNA, 780 bp, Unknown; identical to SEQ ID NO: 13949
  misc_feature (1)..( 780): 2750-1469P.txt file - cDNA_ID_2994313; gDNA_ID_2214676; Annot_ID_136653

SEQ ID NO: 28166 - DNA, 3000 bp, Unknown
  misc_feature (1)..( 3000): 2750-1469P.txt file - cDNA_ID_2994316; gDNA_ID_2214676; Annot_ID_136657
tgtaataaagcaacaaacaaggattatggataaatgacacatacagtgttgtatcttcgataatattaagttctacaccatgccgtggatagtccatgatttaataccgttttgtcgatatattagggatgacttacacacgtaaaatcaaagagtgatatgttaaggatgagcacatgtaacattgaagagcctatgagttttattagagagcgttcacaatgaattttagtgtttgagctagttattgattcattctaaagataattagtttttgaggatgttaaagatgaacacataaaatcggagcgactatgagccttggagagctcacttagggttgtattgtttgagacagagttattttttgtctaaatatactaagaatttttgttgtttccattttggttcatcactatctaagtctatttagcccatattgttctaaggaacaatagacttagatagtgatgaatcaaaatggaaacaacaaaaattaatgaagtttagacaaaaaataatgtattaatatattcataattatgctttattcagcccatattgttctaagcttaatgaagtttggcccacttagttattgtttgtacacttcttatagaggctggctcaagttatttttgggcattgtgcccactgcccatttaaagaaaattctgaaaactgttcataatataaaatcataggaaacactacaactataaatatgtacttaaccctaagatacttctgatgagagcaataacattgtcgttcaattttatatcaatcctcactcgatcatggtatatcagagttataattatctaacaatcggttacattcctgtttttaagccatgtacttctactttttatatttgttttaacccaattgcttccaatattcaagttcatcataacctctgaattaagccaaagtacttccataattcaagtctataatatacctcgcaatcaacccaaattgcttctaaaatcaagctaaaatgtttttttatgcaataaaaaacaaatctcatgttttcttaagctgtatacatttattatgtcttcagagcttatatgcttctttaaagtttttgtttattaaaaaacagattttcttcaaaatatatttggttttagttttatctaagaaatacaagaaaagaaagaaaacagccttcggtttgttcttctcgacagaagatcaagcattctccatggcttcaaccatgcgctcatgcagcctctatttttcccttttacttcttcatcatacgaaacatcttgattgaatttagttctagtaaataatgttaagttttttttttcttttctactaaataaaaactcatgatgaggcataatctatatactttgcaagaaatgctttcatattagtgttttattcatccataaaaaaactatttaagttgaaataataataaatattagtatcatataggagtataacttatatatcagagaaccatttattaaacttgtcttaattatgtccttaagattgtacacatgacatggctctgcaaaacataactcagttcaagtatcccttgggatgacatgcgttttcggggttttgtttctcgatcattaattagtttctagaaagagagacgacgtcaagagtcaaaaccaaatgaaagtaggaaccacacacgcgttgaaatgttcatagttttcttcacctttgatattcgctttttacctgcatatccatgttttatgatagaagacaaaaacccttttgcttttttattgtttataagtcaacaaacgaataacattttgagggatattatttgtttttccttttgtcaagagagcagttagaaactgttcatactctttgtcccttttagttaattttttatcacaacaaaggaagacttgtgaaaccttgactacttacttactaaaccacgaccaagtaaaacattgttttttttttgtaactatataaagctttctttataatagttaggtttaaatctgaagtgtcaagaattttaaaaaacgcgtgcgtgctttgtgaccgaatcatcatttatgtttctctatgatttaatttcaaaatggtgcgggtttatagtctaatagcagtatttgtttatagataaatagcatttatttatttctttttactctaattaaattctttggttctttctttcctttctatttggttgtgacatttacatttcatatcaatacattgtatctcccttgttatttagctttcaactaataagaaaactcttcttaaagaaatctgactagttaacgtgatcaattatacgttctatattgtcgatcggtaagagttccatatattcactcgtttcaaacaaagttatatatcaaaaccggcagtaaaactaaattttaaaactgtcaagatccgaacaatcttaccatttgttgtgtacaataaaaacttatgactgaaaatgcatgaaaataatctattaaaaaccaaataaaaattcaaaatcctagttttcaaactaaattgttaactgttaatagatcaccattaattcgtcacaaagttcaccttaaccttttaatcactacttttaacttttggttctatgttggctctatcaaaataaattttagttttaactttataaaaataactagaaactagtataataaccaaaaatggcggtgaaatagtcaaacaattcatgcaagcttgggacatttggataccaaacccaagatttagtctctttgatttcaaaccattttttcaatacattgtcattttttaatatatctcttaattgattaaaccccaatcaagttaccaactctattgccttgctttttcctcttcatgacgctataatccacgaaccctctggcctatatatactttcgattcttcttctaatccttcatatctcctaccatcacaaagtcatctccttcttctttcttgatctagctagcggaaaatttgacaatg

SEQ ID NO: 28167 - DNA, 3000 bp, Unknown; identical to SEQ ID NO: 28166
  misc_feature (1)..( 3000): 2750-1469P.txt file - cDNA_ID_2994316; gDNA_ID_2214676; Annot_ID_189200

SEQ ID NO: 28168 - DNA, 3003 bp, Unknown
  misc_feature (1)..( 3003): 2750-1469P.txt file - cDNA_ID_2994328; gDNA_ID_2214693; Annot_ID_189441
atgaagtcaataactatgctcttgaccagaataataatgaagagagggtactcaacttgtaattttgttttactggagaaaatgtactggttctaaataattgagtttcaggtaaccttgactggatctccagatggacctcttgtggcgctggctttcaaattagaggagggtcgttttggtcaattgacatatttgaggtaaatgttgaatctccctcttgattatattgctgtgtttactaaatattaaaagtattttgtgcctttctgtcatatgactaaattggtgaatgctgaatcctaattcatgttgttggttgttatgaagagtttacgaaggtgtgattaagaaaggtgattttatcataaatgtcaacactgggaagagaattaaggttagttcttgcatcttagtgttgctttgagtttttcaacgccatgaagtattgtgcataaatttataccaaattacactgagtaagtatagttttctacttgtccctcatctgtcatgaatacttttttcatagaagcaaaatgtctgaaagtcagaccactttgtcatatattttatctcaacccttgcaagtagtgcatgtgatgtttgattttgcctaaaggttattcaatgtttcttggtgtaggttccacgcttggtccgtatgcattcgaatgatatggaggttagttgaagtttatttttctccttaagattccattatggtagctccgtggtggcaactatagtgccatgtgactggattctaaatttttattctattttcaggatattcaagaggcacacgctggacaaattgtagctgtgtttggtattgagtgtgcatcaggtacagtaaaatattcttccgtacttgttcgaacttaacataatttgcttctctggggatgaaattctgatattgtgtttgttgttgggtcaattttcctaaatcaggtgatacatttacggatggatcagtcaagtacacaatgacatcgatgaacgttcctgaacctgttatgtccttagctgttcaaccagtttcaaaagattctggaggacaggtaacttctgtgaactttgaagctaaaacagcaacatatttttccttcaattctggttttaaacatttgcaactgaaatctattttttggtgttagttctcgaaagcattgaatcgattccagaaagaggatcctactttccgtgtgggtttggatcccgagagtggccaggtatcatctaaaaactcttttgcttctcagcacctctctcttaattcaccccatagtatttaacattgatgattcttccatttatccttcatgggacagacgattatttctggtatgggggaattgcatttggacatctatgttgaacgcatgcgaagagaatataaggtgcctgcctgactttaaaccttcccaatgttctcactctattgcttctcgacaaaacccttatttctgcttatttttggaaatatcaaataggttgatgcgactgtgggcaaaccccgtgtcaattttagggagactattactcagcgggcagagtttgattatttacataagaagcaaagtggaggagcaggtcaatacggtagagttacagggtgagtatcaaaaacttatagaccctaaatgatgtggtatggatccctgctaaaccattcctaacgatgtgtataattgttaggtacgtggaaccgctaccaccaggctctaaagagaagtttgaatttgaaaacatgattgttggacaagcaattccgtctggttttattccagcaattgagaaaggtttcaaagaagctgcaaactcgtgagtgatcttggtctctcaaattctttgtctttctcaatttctacttttttctcttgttttggttgaggaaatgttgttgtaagtgatagtgaaacgccctattccattgcaggggctcactaattggtcaccctgtagagaatcttagaatagtattgacagatggagcttcacacgcggtagattccagtgaacttgcgtttaaaatggctgcaatatacgcattcagactgtgttatacagcagctagaccggtgattctagaacctgttatgctggtcgagttgaaagtaccaacagagtttcagggcactgttgctggtgacatcaacaagtaaactctaaaaactctaaaccctttaacaataccatttctttctccttgtcctattagtataataagtcaaacttgtttcaatttcaggaggaaaggtataatcgttggaaacgatcaagagggtgatgattcagtaatcactgctaatgtaagaaccaatatagaaagcaaagtttcctttatcaacagtaattaacaacacgtaatgtgtgtttattaacaggtgcctttgaacaacatgtttggctactccacttctctccggtccatgacacaaggaaaaggagaattcacgatggaatacaaagaacattctgctgtgtccaatgaagtccaggctcagctcgtcaatgcttatagcgccagcaaagctactgaataagcaaacccttcaatccaatatattatggtttgttttctcataatgttgacataatttatttatacggttcacacaaccatcaaaatcactcaacataaactgcctaatgggctatgtcagaaaatcacttatgtttattgggccattaggtaggtcacattttttggtatccaccagtcccaatcattttgataatggtaaaccagcatatatctttcttctttttttccacgcaacaacagattcctacattaattctctctatatagtaagatagggtcaaaaacaagccaaccaaaaaatcgttagaaacaacaatcattgacatagagtcgtcttcacgtcaaatagaagaagaagtagcagtctctaacgaacgaggtcagactttttctttataacttcatctcaaagccactcctttagttttcttgaagaggagttggtgatg

SEQ ID NO: 28169 - DNA, 3003 bp, Unknown
  misc_feature (1)..( 3003): 2750-1469P.txt file - cDNA_ID_2994331; gDNA_ID_2214702; Annot_ID_136890
gccattgaaatggaggagcttttttggatgaggaaggaagtgagaatgaagcaaaaggcttatccagcaccagatcgtaaaaactgtaaagataattgtgttggggcttttaaagtaattatcaagtttctttacaaattggccacaatatattttataataacatttgaaccctcatatccttttgtttgaatttgggctcttcgctcactcctccctctttgtggcccaatgaagtttcttcaagcccatacaaaagtaactagtagtaatccacatcaaaccctataggcttgcggatacatcttaggtttactaaatcttaaaatagaaaagatcagtgaccatatgctaattcaacattttatttttacatactttggtcatttttaatatggactttgttttaattaagatcgattatactaactacaatcgcatatgacaccaacgagcaacgttaattgcttttatgattttaaaagtatgtgatttgcaaactaattaaaaggtgaccatatataaaagagtgtactacaaaaagggcctactactattcaattaacgttgctcgttagtgtcacgtggggaagttaaggttcccacttcccccaccacttctctcagttctcttcttctttttattgtcccattccaaattttaaccaacacatcaagcaaacttcattaatttatgttcagtgttgtagttgcaaacgttatttattattttacgtttacaagtttagaactagttcgaatcgtgataatcttgaataaatcataactttgttcatctaatcataagaacatagaactttgacatggtgtctccggatcttgttgacttagttctatcttaaagttaagctacacatattatagggaccccatattatagtacccaaacaaacaattagagagtttgtatgcaaatccataatatttaccgtagaattgtatgggtttaatgaggaaagaaaaagaaaagaaaaagaaaagaagagaaggacactgaaggagaatgtgatgctgctgaataaaagatacaatcaaaaaattgacaggcagtacaataatgataagtagtgtcatgacagctgacgactctactgcccaatcttgacgttatttatttttgtccattttttcttaagatattatttcaacttaaaagaagtagaaaataaaccataagtgcataacaatattccttttataaattgggttcaagatattgattcgattctgtttatttcaagtgtcgtggaactcaattttatgttatgcctgcctcggcaacaaagattttcgttcaagtggctctatgaaaataagttagggcaaactagatcgattgatgtaaacacaaatagagctaaatagtggagatagtaaactggtgattttgtttcgtaaatagtcaaaaggagggggtgacaaaaaatagatttgtcccttacctctaagagatatagagcaaaacgtttgcatagcgctgtaccatttccttctatattttatatatgtggatgtgcatggatctagctgatgacataacacggcaaaatcatttaacatttgattagcattggcatcaatatttgacgacgctcctcattatttatatatgtggatgtgctgatgtgcatgaatctagctgatgacataacctagtatatgtgcatggttttatggtgtgaacaagttttttttttttcttttcttggttttaggtgtgaactttaagttagagatgatcttcaaatctcacgaaccacaaacctccttgcacgttaagaatagcctctctttttttcttttgttgcttctagtctcagagtgtcttcgagatatgtgtagtctttagtgtaccctgagacctgagtacaagatcgaaaagaaaatatctcgaataacagagttgtgtttgctgtttttaccatttaattatgctaatatctttgttttacataataccaattgaaaaatgaatacataattcaagtttggaccattcttgtatatccacttttggcttcgtggccccgatagctaatttgattgaccttatcatctacaccaaacaagaaattaaattgtcaaattaatttagtggtggccctatactataaaatcgtaaacacttctttttgaaactaaatataaaccttacgacacatttatgtgcaaattagtggacatattcctcagtaataacgtttttacaaacctacagttggataaattattgagtcactccatgattaaaccaacaacataagagaaaaataaaatagtacactacgaatgatcttttaaatatgttattcttttttgatacagaaactttaactaccaaaaaaaaaaagcgaatgattcataaaaacgcaatgtggtatgtttggtctgttttttagttcgaatctcaacttcttgttaccacaaaaataaaacattacacaatgtaaatttactgttcagtcttgcttttccaatcactacattagcacatattcttcacatgtattttccactaatctcgcgacaaaatgttcacagtgtttctcagtttctctctctcaatattttcttgtcaaacaacatgcatatttgaacccgcatggtgaaatagcatcggcattaacatgatcaaccacaaaataaaccggggtggtgtcatagcatcgacattaacttaaaactacaaaatagagctgggtcctcgtcaggttttaaggatacatatgtatgcatgtatgcatatacaaaataatagagcactaaagcttgttcgtactcttttttacacaacatgctaataatttttataccttaggagtgaaattttagtggtccaacaacttaagcacctaagatccttccccacttttgtttggggctcctttatatctcttccaatggttacttttacttcctcttcttctcttcttgttccatctttcatgtgagagagagagttgaattttgcagatgagtatg

SEQ ID NO: 28170 - DNA, 3003 bp, Unknown
  misc_feature (1)..( 3003): 2750-1469P.txt file - cDNA_ID_2994331; gDNA_ID_2214702; Annot_ID_189712
gctgtcgccattgaaatggaggagcttttttggatgaggaaggaagtgagaatgaagcaaaaggcttatccagcaccagatcgtaaaaactgtaaagataattgtgttggggcttttaaagtaattatcaagtttctttacaaattggccacaatatattttataataacatttgaaccctcatatccttttgtttgaatttgggctcttcgctcactcctccctctttgtggcccaatgaagtttcttcaagcccatacaaaagtaactagtagtaatccacatcaaaccctataggcttgcggatacatcttaggtttactaaatcttaaaatagaaaagatcagtgaccatatgctaattcaacattttatttttacatactttggtcatttttaatatggactttgttttaattaagatcgattatactaactacaatcgcatatgacaccaacgagcaacgttaattgcttttatgattttaaaagtatgtgatttgcaaactaattaaaaggtgaccatatataaaagagtgtactacaaaaagggcctactactattcaattaacgttgctcgttagtgtcacgtggggaagttaaggttcccacttcccccaccacttctctcagttctcttcttctttttattgtcccattccaaattttaaccaacacatcaagcaaacttcattaatttatgttcagtgttgtagttgcaaacgttatttattattttacgtttacaagtttagaactagttcgaatcgtgataatcttgaataaatcataactttgttcatctaatcataagaacatagaactttgacatggtgtctccggatcttgttgacttagttctatcttaaagttaagctacacatattatagggaccccatattatagtacccaaacaaacaattagagagtttgtatgcaaatccataatatttaccgtagaattgtatgggtttaatgaggaaagaaaaagaaaagaaaaagaaaagaagagaaggacactgaaggagaatgtgatgctgctgaataaaagatacaatcaaaaaattgacaggcagtacaataatgataagtagtgtcatgacagctgacgactctactgcccaatcttgacgttatttatttttgtccattttttcttaagatattatttcaacttaaaagaagtagaaaataaaccataagtgcataacaatattccttttataaattgggttcaagatattgattcgattctgtttatttcaagtgtcgtggaactcaattttatgttatgcctgcctcggcaacaaagattttcgttcaagtggctctatgaaaataagttagggcaaactagatcgattgatgtaaacacaaatagagctaaatagtggagatagtaaactggtgattttgtttcgtaaatagtcaaaaggagggggtgacaaaaaatagatttgtcccttacctctaagagatatagagcaaaacgtttgcatagcgctgtaccatttccttctatattttatatatgtggatgtgcatggatctagctgatgacataacacggcaaaatcatttaacatttgattagcattggcatcaatatttgacgacgctcctcattatttatatatgtggatgtgctgatgtgcatgaatctagctgatgacataacctagtatatgtgcatggttttatggtgtgaacaagttttttttttttcttttcttggttttaggtgtgaactttaagttagagatgatcttcaaatctcacgaaccacaaacctccttgcacgttaagaatagcctctctttttttcttttgttgcttctagtctcagagtgtcttcgagatatgtgtagtctttagtgtaccctgagacctgagtacaagatcgaaaagaaaatatctcgaataacagagttgtgtttgctgtttttaccatttaattatgctaatatctttgttttacataataccaattgaaaaatgaatacataattcaagtttggaccattcttgtatatccacttttggcttcgtggccccgatagctaatttgattgaccttatcatctacaccaaacaagaaattaaattgtcaaattaatttagtggtggccctatactataaaatcgtaaacacttctttttgaaactaaatataaaccttacgacacatttatgtgcaaattagtggacatattcctcagtaataacgtttttacaaacctacagttggataaattattgagtcactccatgattaaaccaacaacataagagaaaaataaaatagtacactacgaatgatcttttaaatatgttattcttttttgatacagaaactttaactaccaaaaaaaaaaagcgaatgattcataaaaacgcaatgtggtatgtttggtctgttttttagttcgaatctcaacttcttgttaccacaaaaataaaacattacacaatgtaaatttactgttcagtcttgcttttccaatcactacattagcacatattcttcacatgtattttccactaatctcgcgacaaaatgttcacagtgtttctcagtttctctctctcaatattttcttgtcaaacaacatgcatatttgaacccgcatggtgaaatagcatcggcattaacatgatcaaccacaaaataaaccggggtggtgtcatagcatcgacattaacttaaaactacaaaatagagctgggtcctcgtcaggttttaaggatacatatgtatgcatgtatgcatatacaaaataatagagcactaaagcttgttcgtactcttttttacacaacatgctaataatttttataccttaggagtgaaattttagtggtccaacaacttaagcacctaagatccttccccacttttgtttggggctcctttatatctcttccaatggttacttttacttcctcttcttctcttcttgttccatctttcatgtgagagagagagttgaattttgcagatg

SEQ ID NO: 28171 - DNA, 3000 bp, Unknown; identical to SEQ ID NO: 8343
  misc_feature (1)..( 3000): 2750-1469P.txt file - cDNA_ID_2994335; gDNA_ID_2214705; Annot_ID_136944

SEQ ID NO: 28172 - DNA, 3000 bp, Unknown; identical to SEQ ID NO: 8343
  misc_feature (1)..( 3000): 2750-1469P.txt file - cDNA_ID_2994335; gDNA_ID_2214705; Annot_ID_189805

SEQ ID NO: 28173 - DNA, 3000 bp, Unknown; identical to SEQ ID NO: 8343
  misc_feature (1)..( 3000): 2750-1469P.txt file - cDNA_ID_2994335; gDNA_ID_1971751; Annot_ID_175321

SEQ ID NO: 28174 - DNA, 3000 bp, Unknown; identical to SEQ ID NO: 11689
  misc_feature (1)..( 3000): 2750-1469P.txt file - cDNA_ID_2994339; gDNA_ID_2214510; Annot_ID_184224

SEQ ID NO: 28175 - DNA, 3000 bp, Unknown; identical to SEQ ID NO: 11730
  misc_feature (1)..( 3000): 2750-1469P.txt file - cDNA_ID_2994343; gDNA_ID_2214513; Annot_ID_133891

SEQ ID NO: 28176 - DNA, 3000 bp, Unknown; identical to SEQ ID NO: 12246
  misc_feature (1)..( 3000): 2750-1469P.txt file - cDNA_ID_2994352; gDNA_ID_2214539; Annot_ID_134435

SEQ ID NO: 28177 - DNA, 423 bp, Unknown
  misc_feature (1)..( 423): 2750-1469P.txt file - cDNA_ID_2994360; gDNA_ID_2214547; Annot_ID_134603
gtttgaactttgatgtttacaaaaaaaactcatttagtaagacacataatgttgttctactgaggaaaatattatattttcatgcaatggtttcggtttgtcacaaaactcattttatttaaaagccggatgaatttaatgggcctaatataaaaggcccaataagccactggttagagtatatgtggactggtttcaccaccgccgcaaaaagggagactgagataaattcgtacagcaatcggagttactatgtggacagtgaaactggcggcgatgccggttcaatttctcatggagcaatctccgttggctatttacagccaccaccaccgcataaagtaatgatcaagaattcttctgaaattttctgagctcaatttcttattctgtgaattgatttgtggcaagagcgactccatg

SEQ ID NO: 28178 - DNA, 3000 bp, Unknown; identical to SEQ ID NO: 12411
  misc_feature (1)..( 3000): 2750-1469P.txt file - cDNA_ID_2994364; gDNA_ID_2214548; Annot_ID_134623

SEQ ID NO: 28179 - DNA, 3000 bp, Unknown; identical to SEQ ID NO: 12412
  misc_feature (1)..( 3000): 2750-1469P.txt file - cDNA_ID_2994364; gDNA_ID_2214548; Annot_ID_185495

SEQ ID NO: 28180 - DNA, 3003 bp, Unknown
  misc_feature (1)..( 3003): 2750-1469P.txt file - cDNA_ID_2994378; gDNA_ID_2214555; Annot_ID_134770
tcgtgtagaaagtcgacgtttacgttcttctttgaaaccagagtgataattccggttcgagcaaataattaactcgtgtcttctcatgtatgttggattaattatttggttgtggttaatattaatgctcgttagtcgttaaaaaaactaaatattttaattgtcccagtgacagaaaccaatttcacatgaaaaaaggaaaaagctaattttgtcaacagttcacatatattgacattgaacacaactccggttcgacaaaaaaaaagaacacaactccggtcaactatttttggcagttgtaattaagaacaaaaagatgtaacttaaagaagagacaatttaaccgattagttcaaatctttggtcatcaaaaattccacaagttttaagaagactgattggtgattaataaacgttaaaaaaaaaaaaaaagccaagtcaaagatgtgtcggtaatagcgattgaccaaactctatctgttttagagcatcattaatggtagtttcttagcataattttaatatagtttttatgaatatttttataattgattttgaaaattctgaagttaaaaacttggttaagagattgaaatttaggcaatatgcaatggtggaatcttaacttggagttcttaaaaagaaaatttgaaaaaaaaaatagaaacattataattttaaaaaacttaatagttattacaactcataaaatttaaaacatacatgacataaaattttaaacaaatatgacaaacaattctatttaatacttaagttatctaaaaattaagattaattaaattaaaatattatatttaagacctaatttatctaagaattaacttaaaaaacattagatttggctcttatataagagctattcttaaccattaattgaattataacattaaatttaagatctactttatctaaaaactaacctaaaaaactatcaataatgatggtcttacgaatgcctagattctcttcaatatacaaaaagtacggtttagttattgtttggacatttgaaatctaactaattctctttttagtcttaatgcaatggaattgcaaatactccataaaccatagtgttgcaccctaaccgtatctctctctaaaagagaatctagtcaacaagattatgtttaatctctaattaatgacaataagatttactgccaaaataaataaataaataataataataagatttactgccatttattcttctatatttttcaattttttatttacacttgttccataatcgtcccaaggagtagactagggttgatgctctttcatctataaaacgacttaacacaacatgttctttcacatcatcatcataagcctcaacaatccatcaccatacatattagattctccctctttccatagtttatttttggttcgttttattgtaaaaagatatcaaactctttttgggggacattcgttcttcaagtgtaacagaaggagctcccttcctccaaaacgaagaggacaagatttgaggaactaaaatgcagaatctaagagttcatgtcttcctcatagagagtgcgcggtgttaaaagcttgaagaaagcacactttaaggggattgcacgacctcttagattctccctctttctctacatatcattctcttctcttcgtttggattgaagggagctccttttcttcttctcttaattagtctctgttcttcaaaacttggtttcgatctaacttgttttctttttctctagtgcattttttttttcaggttgtcatgtttatttgcaggtgtttgtggttgatgcttgcatggaagcaatattaatgttgtttatttacgagaagacgttcgtgtgccaatttgaaaatatgatattaatggaaatacagattaaaactgacaaatgtataaatatttcttgttccttgttttaattttaacattagtcgtgtgtttgtcgtaaatacgaaggggacatttcacctaaaaaaagaaaaaaatatattcatcaaaactggtcttggatacgtttttagttaaaacaagaacaataataaagttaggtttaacttcgatcagatcgaaacaagtacactataattgttttggtttgagaaaatataccatcgatggtttcaagaaataatagcagctgggttgcttgtagtcgatacgttaagtcgtatcatctcaaatgatccctagtagtacacaacatagtcaactggtttgtcatgtgttggcctacgaagaaatgtataccggccggatttcaatttataaattagtccttttttttttgtcaagttatcattgcatagccaagtttcactcggtcaaaatctaattaacaaagtctgtaaaacgttgaagtaattgtattttattaaaagaaaactccaaattagactttgattccaacgaatatttaacgacataaaaggcattgccgtttgttgaacgagttgtcttcttaccaaatttgacgctttccaactaaatacactcctaattttgcctattacctttttcctcctctaattaagtaaatgctaaatttcccccaaatactaaaaatcgaatccgataagtcaaaatcaaaatcgtacctacgcgatttatgcaaaataccggaaaaagaaccaaagtgcttattacaatcaaaagaccaaaccggttaaacaattagttaggctggcattaacgaacctctttgtctttaattagcctttatccgtcaccgccctgttaccataaccgttcaacgtcgacccgctctttgtttcagaaaaaaaaaacagagaaagacttttttagtgtttctttgtcattttcgttcctcaaaaaaaccttttcgaatttgacccttattgttatcctgattcttctgctcggttctcgccggagagaagacacggagaagagggttttcgaaaaggaggatgagaggttccaataacaccgatctatttgaccctaagacggagatg

SEQ ID NO: 28181 - DNA, 3003 bp, Unknown
  misc_feature (1)..( 3003): 2750-1469P.txt file - cDNA_ID_2994378; gDNA_ID_2214555; Annot_ID_185700
cagggaagataatcatcgtactctcaaggataagctgatggaagctcgtgtagaaagtcgacgtttacgttcttctttgaaaccagagtgataattccggttcgagcaaataattaactcgtgtcttctcatgtatgttggattaattatttggttgtggttaatattaatgctcgttagtcgttaaaaaaactaaatattttaattgtcccagtgacagaaaccaatttcacatgaaaaaaggaaaaagctaattttgtcaacagttcacatatattgacattgaacacaactccggttcgacaaaaaaaaagaacacaactccggtcaactatttttggcagttgtaattaagaacaaaaagatgtaacttaaagaagagacaatttaaccgattagttcaaatctttggtcatcaaaaattccacaagttttaagaagactgattggtgattaataaacgttaaaaaaaaaaaaaaagccaagtcaaagatgtgtcggtaatagcgattgaccaaactctatctgttttagagcatcattaatggtagtttcttagcataattttaatatagtttttatgaatatttttataattgattttgaaaattctgaagttaaaaacttggttaagagattgaaatttaggcaatatgcaatggtggaatcttaacttggagttcttaaaaagaaaatttgaaaaaaaaaatagaaacattataattttaaaaaacttaatagttattacaactcataaaatttaaaacatacatgacataaaattttaaacaaatatgacaaacaattctatttaatacttaagttatctaaaaattaagattaattaaattaaaatattatatttaagacctaatttatctaagaattaacttaaaaaacattagatttggctcttatataagagctattcttaaccattaattgaattataacattaaatttaagatctactttatctaaaaactaacctaaaaaactatcaataatgatggtcttacgaatgcctagattctcttcaatatacaaaaagtacggtttagttattgtttggacatttgaaatctaactaattctctttttagtcttaatgcaatggaattgcaaatactccataaaccatagtgttgcaccctaaccgtatctctctctaaaagagaatctagtcaacaagattatgtttaatctctaattaatgacaataagatttactgccaaaataaataaataaataataataataagatttactgccatttattcttctatatttttcaattttttatttacacttgttccataatcgtcccaaggagtagactagggttgatgctctttcatctataaaacgacttaacacaacatgttctttcacatcatcatcataagcctcaacaatccatcaccatacatattagattctccctctttccatagtttatttttggttcgttttattgtaaaaagatatcaaactctttttgggggacattcgttcttcaagtgtaacagaaggagctcccttcctccaaaacgaagaggacaagatttgaggaactaaaatgcagaatctaagagttcatgtcttcctcatagagagtgcgcggtgttaaaagcttgaagaaagcacactttaaggggattgcacgacctcttagattctccctctttctctacatatcattctcttctcttcgtttggattgaagggagctccttttcttcttctcttaattagtctctgttcttcaaaacttggtttcgatctaacttgttttctttttctctagtgcattttttttttcaggttgtcatgtttatttgcaggtgtttgtggttgatgcttgcatggaagcaatattaatgttgtttatttacgagaagacgttcgtgtgccaatttgaaaatatgatattaatggaaatacagattaaaactgacaaatgtataaatatttcttgttccttgttttaattttaacattagtcgtgtgtttgtcgtaaatacgaaggggacatttcacctaaaaaaagaaaaaaatatattcatcaaaactggtcttggatacgtttttagttaaaacaagaacaataataaagttaggtttaacttcgatcagatcgaaacaagtacactataattgttttggtttgagaaaatataccatcgatggtttcaagaaataatagcagctgggttgcttgtagtcgatacgttaagtcgtatcatctcaaatgatccctagtagtacacaacatagtcaactggtttgtcatgtgttggcctacgaagaaatgtataccggccggatttcaatttataaattagtccttttttttttgtcaagttatcattgcatagccaagtttcactcggtcaaaatctaattaacaaagtctgtaaaacgttgaagtaattgtattttattaaaagaaaactccaaattagactttgattccaacgaatatttaacgacataaaaggcattgccgtttgttgaacgagttgtcttcttaccaaatttgacgctttccaactaaatacactcctaattttgcctattacctttttcctcctctaattaagtaaatgctaaatttcccccaaatactaaaaatcgaatccgataagtcaaaatcaaaatcgtacctacgcgatttatgcaaaataccggaaaaagaaccaaagtgcttattacaatcaaaagaccaaaccggttaaacaattagttaggctggcattaacgaacctctttgtctttaattagcctttatccgtcaccgccctgttaccataaccgttcaacgtcgacccgctctttgtttcagaaaaaaaaaacagagaaagacttttttagtgtttctttgtcattttcgttcctcaaaaaaaccttttcgaatttgacccttattgttatcctgattcttctgctcggttctcgccggagagaagacacggagaagagggttttcgaaaaggaggatg

SEQ ID NO: 28182 - DNA, 3000 bp, Unknown; identical to SEQ ID NO: 12522
  misc_feature (1)..( 3000): 2750-1469P.txt file - cDNA_ID_2994382; gDNA_ID_2214555; Annot_ID_134773

SEQ ID NO: 28183 - DNA, 3000 bp, Unknown; identical to SEQ ID NO: 12494
  misc_feature (1)..( 3000): 2750-1469P.txt file - cDNA_ID_2994382; gDNA_ID_2214555; Annot_ID_185704

SEQ ID NO: 28184 - DNA, 3000 bp, Unknown; identical to SEQ ID NO: 14229
  misc_feature (1)..( 3000): 2750-1469P.txt file - cDNA_ID_2994430; gDNA_ID_2214712; Annot_ID_136981

SEQ ID NO: 28185 - DNA, 3000 bp, Unknown; identical to SEQ ID NO: 14226
  misc_feature (1)..( 3000): 2750-1469P.txt file - cDNA_ID_2994430; gDNA_ID_2214712; Annot_ID_189918

SEQ ID NO: 28186 - DNA, 3000 bp, Unknown; identical to SEQ ID NO: 11854
  misc_feature (1)..( 3000): 2750-1469P.txt file - cDNA_ID_2994434; gDNA_ID_2214519; Annot_ID_134033

SEQ ID NO: 28187 - DNA, 849 bp, Unknown; identical to SEQ ID NO: 12120
  misc_feature (1)..( 849): 2750-1469P.txt file - cDNA_ID_2994444; gDNA_ID_2214531; Annot_ID_134298

SEQ ID NO: 28188 - DNA, 774 bp, Unknown; identical to SEQ ID NO: 12106
  misc_feature (1)..( 774): 2750-1469P.txt file - cDNA_ID_2994444; gDNA_ID_2214531; Annot_ID_184951

SEQ ID NO: 28189 - DNA, 3003 bp, Unknown
  misc_feature (1)..( 3003): 2750-1469P.txt file - cDNA_ID_2994456; gDNA_ID_2214558; Annot_ID_134825
aatgattaacttgcattacagttgggaagtatcaagtaaacaacattttgtttttgtttgatatcgggaatctcaaaaccaaagtccacactagtttttggactatataatgataaaagtcagatatctactaatactagttgatcagtatattcgaaaacatgactttccaaatgtaagttatttactttttttttgctattataattaagatcaataaaaatgtctaagttttaaatctttatcattatatccaaacaatcataatcttattgttaatctctcatcaacacacagtttttaaaataaattaattaccctttgcatgataccgaagagaaacgaattcgttcaaataattttataacaggaaataaaatagataaccgaaataaagatagaatgatttcttagtactaactcttaacaacagttttatttaaatgacttttgtaaaaaaaacaaagttaacttatacacgtacacgtgtcgaaaatattattgacaatggatagcatgattcttattagagtcatgtaaaagataaacacatgcaaatatatatatgaataatatgttgttaagataaactagacgattagaatatatagcacatctatagtttgtaaaataactatttctcaactagacttaagtcttcgaaatacataaataaacaaaactataaaaattcagaaaaaaacatgagagtacgttagtaaaatgtatttttttggtaaaataatcacttttcatcaggtctttttgtaaagcagttttcatgttagataaacgagattttaattttttttaaaaagaagtaaactaactatgttcctatctacacacctataattttgaaacaattacaaaaacaaacaatgaaaatgcaaagaaggacgtaggcactgtcacactacaaatacgttaataaaatgtattttggtcgaattataactttccatacgataaagttgaattaacatgtcaaacaaaagagatgagtggtcctatacatagttaggaattaggaacctctaaattaaatgagtacaaccaccaactactccttccctctataatctatcgcattcacaccacataacatatacgtacctactctatataacactcactccccaaactctcttcatcatccatcactacacacatctcctattgcaaacgaacataaaacactacctaagagatcaatatggctggagtgatgaagttggcatgcttgctcttggcctgcatgattgtggccggtccaatcacatcgaacgctgcgctaagctgtggctcagttaacagcaacttggcagcgtgcattggctacgtgctccaaggtggtgtcattcccccagcgtgttgctccggcgttaaaaacctcaacagcatagccaagacgaccccagaccgtcagcaagcttgcaattgcattcaaggtgccgctagagccttaggctctggtctcaacgctggccgtgcagctggaattcctaaggcatgtggagtcaatattccttacaaaatcagcaccagcaccaactgcaaaacgtatgttaatctctctcactctctcagatatttaagctataatttgtttctttttggggttaaatattcgaaaggttatattaacggtgttatattaatttgtatatatgtggttgcagcgtgaggtgatgagctagcaacggtgagatgatgctactaccggaagtttcgaatccttattatataatggatgagattaatattaaataagatgttcgaatgtttgtttttagagtttttaatttcttgtctttttctattgtggtgttcttgttatatgggtttgtctgtactatgttcgcaggcaacaacgttatatgaaatttcagagtacttgaagtttaagtttttctatattcttacttattaaatcttgcattagtttaatcgatatgaaactgattaatcaatatcgagtatggcaacattttgtgtaataacggaaatctgaggaccaaaatccacactaattttcggatttgtgaaaagctaaatattcgtcaataattggggacgtgatggaaccaatttataagaggaaataaagtaactccaagtttctatttccacaaaaggatataatctccaagtttgtagtaatattgaacacgtgtttagataaccgagaaaaagatggattggttccataattagtgttaaaaactctttaaccccaaattcatgaaaaaccaaagtttagttatagagacatacgtacacgtgttcaaagaaaattattggcgatggaaaattgggtgtatctgcattttcgtcattaccgtcctttacatggaattttggtagatcctgctttaaatgccttcacttctgcttctcccaaccataataaattgatatggatgcgatccattggtatttggtagatagatggtattattgtcccctcttaatggatttctttttaattttaaatatctaaattttgcctgaactatacataaattccgtaactatgtctataattatcatctcattgtttcaaagtgatacttttcttctgcaaacaataaaattgttgaagtcagttgttgactcaaggtttattagaacaaaagtcaggtttttagctcattaaagtcaaccggataaagacgaccggtctaattcggtttgggatttagaaagactctatatcgctcagagggtctaacgcagacgcttttcaactttcgagatatttttcttaggtatatatttccaaatgttacggcgtcgttttcaaaaacatatttttgttgttgcgtagtagtccttcggaaattctttgcttcctagttgaagcactcacaacacacagcttttgtaggaatccctaagcttaaagtctctattattctctaatctcttcttcgccgacgacttctctcaccaaggcgacgttttgatcaggcgatgatgagtatcccaatggagttaatg

SEQ ID NO: 28190 - DNA, 3003 bp, Unknown
  misc_feature (1)..( 3003): 2750-1469P.txt file - cDNA_ID_2994456; gDNA_ID_2214558; Annot_ID_185795
ctttagtttaatcgatatgaccaaaatgattaacttgcattacagttgggaagtatcaagtaaacaacattttgtttttgtttgatatcgggaatctcaaaaccaaagtccacactagtttttggactatataatgataaaagtcagatatctactaatactagttgatcagtatattcgaaaacatgactttccaaatgtaagttatttactttttttttgctattataattaagatcaataaaaatgtctaagttttaaatctttatcattatatccaaacaatcataatcttattgttaatctctcatcaacacacagtttttaaaataaattaattaccctttgcatgataccgaagagaaacgaattcgttcaaataattttataacaggaaataaaatagataaccgaaataaagatagaatgatttcttagtactaactcttaacaacagttttatttaaatgacttttgtaaaaaaaacaaagttaacttatacacgtacacgtgtcgaaaatattattgacaatggatagcatgattcttattagagtcatgtaaaagataaacacatgcaaatatatatatgaataatatgttgttaagataaactagacgattagaatatatagcacatctatagtttgtaaaataactatttctcaactagacttaagtcttcgaaatacataaataaacaaaactataaaaattcagaaaaaaacatgagagtacgttagtaaaatgtatttttttggtaaaataatcacttttcatcaggtctttttgtaaagcagttttcatgttagataaacgagattttaattttttttaaaaagaagtaaactaactatgttcctatctacacacctataattttgaaacaattacaaaaacaaacaatgaaaatgcaaagaaggacgtaggcactgtcacactacaaatacgttaataaaatgtattttggtcgaattataactttccatacgataaagttgaattaacatgtcaaacaaaagagatgagtggtcctatacatagttaggaattaggaacctctaaattaaatgagtacaaccaccaactactccttccctctataatctatcgcattcacaccacataacatatacgtacctactctatataacactcactccccaaactctcttcatcatccatcactacacacatctcctattgcaaacgaacataaaacactacctaagagatcaatatggctggagtgatgaagttggcatgcttgctcttggcctgcatgattgtggccggtccaatcacatcgaacgctgcgctaagctgtggctcagttaacagcaacttggcagcgtgcattggctacgtgctccaaggtggtgtcattcccccagcgtgttgctccggcgttaaaaacctcaacagcatagccaagacgaccccagaccgtcagcaagcttgcaattgcattcaaggtgccgctagagccttaggctctggtctcaacgctggccgtgcagctggaattcctaaggcatgtggagtcaatattccttacaaaatcagcaccagcaccaactgcaaaacgtatgttaatctctctcactctctcagatatttaagctataatttgtttctttttggggttaaatattcgaaaggttatattaacggtgttatattaatttgtatatatgtggttgcagcgtgaggtgatgagctagcaacggtgagatgatgctactaccggaagtttcgaatccttattatataatggatgagattaatattaaataagatgttcgaatgtttgtttttagagtttttaatttcttgtctttttctattgtggtgttcttgttatatgggtttgtctgtactatgttcgcaggcaacaacgttatatgaaatttcagagtacttgaagtttaagtttttctatattcttacttattaaatcttgcattagtttaatcgatatgaaactgattaatcaatatcgagtatggcaacattttgtgtaataacggaaatctgaggaccaaaatccacactaattttcggatttgtgaaaagctaaatattcgtcaataattggggacgtgatggaaccaatttataagaggaaataaagtaactccaagtttctatttccacaaaaggatataatctccaagtttgtagtaatattgaacacgtgtttagataaccgagaaaaagatggattggttccataattagtgttaaaaactctttaaccccaaattcatgaaaaaccaaagtttagttatagagacatacgtacacgtgttcaaagaaaattattggcgatggaaaattgggtgtatctgcattttcgtcattaccgtcctttacatggaattttggtagatcctgctttaaatgccttcacttctgcttctcccaaccataataaattgatatggatgcgatccattggtatttggtagatagatggtattattgtcccctcttaatggatttctttttaattttaaatatctaaattttgcctgaactatacataaattccgtaactatgtctataattatcatctcattgtttcaaagtgatacttttcttctgcaaacaataaaattgttgaagtcagttgttgactcaaggtttattagaacaaaagtcaggtttttagctcattaaagtcaaccggataaagacgaccggtctaattcggtttgggatttagaaagactctatatcgctcagagggtctaacgcagacgcttttcaactttcgagatatttttcttaggtatatatttccaaatgttacggcgtcgttttcaaaaacatatttttgttgttgcgtagtagtccttcggaaattctttgcttcctagttgaagcactcacaacacacagcttttgtaggaatccctaagcttaaagtctctattattctctaatctcttcttcgccgacgacttctctcaccaaggcgacgttttgatcaggcgatg

SEQ ID NO: 28191 - DNA, 3003 bp, Unknown
  misc_feature (1)..( 3003): 2750-1469P.txt file - cDNA_ID_2994460; gDNA_ID_2214567; Annot_ID_134982
ataatttggtcaactatttcccatcataaatatgacattactatatgagtgagtatatagatatttcgtcaaaatgaacgcaccgatcaatggaaaataaaaggcacccatcaatgagaaccttataataaaacacacacacacaaattccgtatagaccaggtttcagtatttttgttagtttggagtgtaataactcttttttttttcttggagtaaaaatgagtacaagtaccttagtgaacaaatttattgttttgttggaattaaactgttgatcaataattcgacacgacagtaaataactcactgggacaaccaaaaaagtcatattaattcatggaacatatatatgctgacaaacaaaaacaaatcatggaacatctatttggtgttttccaaaagcaaatatcgtctttaagtcagaaaatgcaaacaattttggccgcaaaaaaaagcatgggttagaaagtttgaaagaaatcgagttatatcaaactggtgaaaattggcgacacaatctgttttttactgaatatgtttctattaaaacgagttcggttgtgatgtttactcaactagtagaaaaaaaaaaaaaaaaaaagaagaaaaacgccattctggtcaacaaattttgggccaatattccaaatacacgttactatattttcgattgaaatgtcgtattgtaattaatacagtatagtagtagaacaatattagagacacgtacgtaggtttggttagatgcttttgtctataactctatgccaagtaatgattggtgattcgtcaatcgtaattctttttttttatatataaacccaaataatttgctttacaatctctgaattctatgttttgagatcatccatattccaatctaactgtcgttaaggctcttctttcaaaggaagaccctatttgcaagttggacacagacggacaagttctcaacgattaggagaaaatcgttaggactaatcaaagttttagataggtaccactacctaaataaactatgtacgaggacgatacatccagtacaagagaaatatatatgcaacctcatcatataaaatcatagtcacgagattttatgacagatcttagtcgtacataaatggctgacagatttgcatgatatattgcaatgatatatttttttttaacccaaaacattttaccagcttatatcaacaatagacatatatataatctgaaataaggaatctaataaaatagctcttaatattgaatttaaagaagaaaaaaagtgaaacaaagcattcgagatttgatgtcgaagtccacatcgggaagcgaaggtcatcaaacggccacttggactccgatgagaaaatttcaagtgggctgcttgttggcttttagtataatattgaccacaaattatttatatgctttttagttataatatgcagatattgtatctatataatactccatgaatagtatacatatgagtgtgtttctttttgttaaatatccaaggaagagtgcataatcattttggaaccatttatgtttaaataataaaatttatgatatatatactgtatcaaaataactatgtgttattagagaaaatgaagatatagtcattaagttaggtaatttaatatgtacaatattttaagaatatcatgtcattttataaatttatattatttcaaaccaaactaaattgctttagcttctgtcgaaactgcctactatttaaatttgtttttctaaaaacttctttgatcgaattagctttcccgaagttctagtacaattctaaaaattgtgtactagaatctacaaatagcatattaaactttaaatttcctttgaactagcttgtacataaactaccatttcttttcttgtttatttgtgacttaagtgttaaaatttttcttcacaccatctagcaaaacacctaacattgttccctttccaataatcgaatcgcctatcctacaatcatcgataatttagtataggatctagaagacttactatgactaattttgacaatggtgaaataatcaaactttttttattaaactaatgtgttgtattggatcagaaaacatgatttacataatgtttgtaacattgatatcaccccctacatgtatattaaaagccttatcgactccaaatttttaccgaaaaaattgaaaaattgttcaaaaacacagttttaggatctcattatacagatcaaatcacacgaattcatatcataataatttttttggaagtccggttattttactaatttgatccaacatatctatgatgaatcttagttaagatgtggtgatcactcaaacagtaaatttgtaaattttgttcattaaaatcagtttcttgtggacaaaaccatcctatttttggcaaatcaaagaaaatataattaatctcaaagaaaaaagctacaagaaaaaaaaaatggcctcaaaataaaaatagaaaatatctgacaagactgcccgaaatcacaagtaactgtaacaaaactgacaacgggcaaaaaaaaaaaaaaaaaaaaaaaaaactgcccgtcgggcaaatcctccaatagagagtcgtctctctttatctccgtctctctcttttttttttaatcaactttataaaaaaaacaaaaaaaaaatttaaaaattaatatcttctcaacaaatgactctatcaatgtgtacataaatgtgaatcttcttccctcttcttcttctccattgttaaaagctctcacacaaccaccgttctccgtcacggtggcgctttattctctcatcggagcgcctcaccggtggcagacggtgtcgttgttcctctcctaaaacctccatcaatcaccatctctttacacagagctctaaccaaaatcttcgagagatggggcagagtatgagctgtggaagtcgaccggagcacggaatattcgcctctgtacagtgcggcgatatcatcactatccgtcgtgtgatg

SEQ ID NO: 28192 - DNA, 3003 bp, Unknown
  misc_feature (1)..( 3003): 2750-1469P.txt file - cDNA_ID_2994460; gDNA_ID_2214567; Annot_ID_186054
cccataccaccacaacacgctttgaatcatcttcaatagatgataagagtcatgtagtaaacgctatacgactattcagtaagaaaataaataatttggtcaactatttcccatcataaatatgacattactatatgagtgagtatatagatatttcgtcaaaatgaacgcaccgatcaatggaaaataaaaggcacccatcaatgagaaccttataataaaacacacacacacaaattccgtatagaccaggtttcagtatttttgttagtttggagtgtaataactcttttttttttcttggagtaaaaatgagtacaagtaccttagtgaacaaatttattgttttgttggaattaaactgttgatcaataattcgacacgacagtaaataactcactgggacaaccaaaaaagtcatattaattcatggaacatatatatgctgacaaacaaaaacaaatcatggaacatctatttggtgttttccaaaagcaaatatcgtctttaagtcagaaaatgcaaacaattttggccgcaaaaaaaagcatgggttagaaagtttgaaagaaatcgagttatatcaaactggtgaaaattggcgacacaatctgttttttactgaatatgtttctattaaaacgagttcggttgtgatgtttactcaactagtagaaaaaaaaaaaaaaaaaaagaagaaaaacgccattctggtcaacaaattttgggccaatattccaaatacacgttactatattttcgattgaaatgtcgtattgtaattaatacagtatagtagtagaacaatattagagacacgtacgtaggtttggttagatgcttttgtctataactctatgccaagtaatgattggtgattcgtcaatcgtaattctttttttttatatataaacccaaataatttgctttacaatctctgaattctatgttttgagatcatccatattccaatctaactgtcgttaaggctcttctttcaaaggaagaccctatttgcaagttggacacagacggacaagttctcaacgattaggagaaaatcgttaggactaatcaaagttttagataggtaccactacctaaataaactatgtacgaggacgatacatccagtacaagagaaatatatatgcaacctcatcatataaaatcatagtcacgagattttatgacagatcttagtcgtacataaatggctgacagatttgcatgatatattgcaatgatatatttttttttaacccaaaacattttaccagcttatatcaacaatagacatatatataatctgaaataaggaatctaataaaatagctcttaatattgaatttaaagaagaaaaaaagtgaaacaaagcattcgagatttgatgtcgaagtccacatcgggaagcgaaggtcatcaaacggccacttggactccgatgagaaaatttcaagtgggctgcttgttggcttttagtataatattgaccacaaattatttatatgctttttagttataatatgcagatattgtatctatataatactccatgaatagtatacatatgagtgtgtttctttttgttaaatatccaaggaagagtgcataatcattttggaaccatttatgtttaaataataaaatttatgatatatatactgtatcaaaataactatgtgttattagagaaaatgaagatatagtcattaagttaggtaatttaatatgtacaatattttaagaatatcatgtcattttataaatttatattatttcaaaccaaactaaattgctttagcttctgtcgaaactgcctactatttaaatttgtttttctaaaaacttctttgatcgaattagctttcccgaagttctagtacaattctaaaaattgtgtactagaatctacaaatagcatattaaactttaaatttcctttgaactagcttgtacataaactaccatttcttttcttgtttatttgtgacttaagtgttaaaatttttcttcacaccatctagcaaaacacctaacattgttccctttccaataatcgaatcgcctatcctacaatcatcgataatttagtataggatctagaagacttactatgactaattttgacaatggtgaaataatcaaactttttttattaaactaatgtgttgtattggatcagaaaacatgatttacataatgtttgtaacattgatatcaccccctacatgtatattaaaagccttatcgactccaaatttttaccgaaaaaattgaaaaattgttcaaaaacacagttttaggatctcattatacagatcaaatcacacgaattcatatcataataatttttttggaagtccggttattttactaatttgatccaacatatctatgatgaatcttagttaagatgtggtgatcactcaaacagtaaatttgtaaattttgttcattaaaatcagtttcttgtggacaaaaccatcctatttttggcaaatcaaagaaaatataattaatctcaaagaaaaaagctacaagaaaaaaaaaatggcctcaaaataaaaatagaaaatatctgacaagactgcccgaaatcacaagtaactgtaacaaaactgacaacgggcaaaaaaaaaaaaaaaaaaaaaaaaaactgcccgtcgggcaaatcctccaatagagagtcgtctctctttatctccgtctctctcttttttttttaatcaactttataaaaaaaacaaaaaaaaaatttaaaaattaatatcttctcaacaaatgactctatcaatgtgtacataaatgtgaatcttcttccctcttcttcttctccattgttaaaagctctcacacaaccaccgttctccgtcacggtggcgctttattctctcatcggagcgcctcaccggtggcagacggtgtcgttgttcctctcctaaaacctccatcaatcaccatctctttacacagagctctaaccaaaatcttcgagagatg

SEQ ID NO: 28193 - DNA, 3003 bp, Unknown
  misc_feature (1)..( 3003): 2750-1469P.txt file - cDNA_ID_2994464; gDNA_ID_2214571; Annot_ID_135073
aaagggcaaaatggtaattataggtcaccggaggcatcaaagataagggcaaagatattgtacgcaacgtcgaaagatgggctgaggagagtgttggaagggattcactatgaacttcaagctactgatccgacggagatgggtttcgatattatccaagaccgtgccaaatagattgatcacttaagagaatatgatttgactcactttgtcaataattaacattaattaggtcatcggttaatgtttaattattgctggttagtgcttactcttttttgagtttattatccttgatcagtcttaccggcactatcctttaattatgacgtttgtgttttgattgtgttgttaaaatatttttttgtcggttaagcaaacataaaaagctacgaatttgtcctacgagtaacggatattatacatttatgagagattttattttataggtcttgtggtcttctatataaatttgttgtgacttattgtgaaatattggccgtgtttgagatacatcgtgtatagaaaacatcatggattttttattttctggaattggaattattgggatgttgaaagctgagattgacaatagtagagttggtaagaagataaagttcggacaattacgtatgaagaagagattagatttgtccatctttaacgacgttgacattagtcttttttaaagtcaacttttctttttgtagtcaattaagttgggtctaatttgcctccgtgtcgtgtttaagcatttatgagtttttttctgaacagaactgtgtattagaagatttcaatcaaatttttattgagcatatattattgtcgaagggaccatttatgtattatcgatatgatctttatgtctacaatagccaataggtttgtgcatcagcattacaagtaagatcgttacataccatattcagttttgatatagataatctgattatctaaaactattatccaaaatatattttaaaatacaatatttaatgaaaaataatgttgatttggatctacatagtccatattttcctatgaattccccacacgtcacattgtcaattacatatttgcttctctaatagacaccgacataccaaatcaacaaatcttatcatcatctccactttcactcagagaaagaaagagagcgaccatatttttatctgaatagaagaataaaaacgaacgtattgatctttttattttttatgactttctcttttctatgcatactccgaccaaagccagctgtttgattctgtaaatcaaataatgaatttgtactaaggggtttagacaaattcacttctttcttatctcacaagtaatcaaaggaaaataattaggatgtttgaataaaaagttagggtttgctctttaatagtggtctcttgaattaggttaaagatggatctaatagatggcaaaacccttctatttatacaatgaattcaatatatcaaaatatgataaacttctaattatctaagaattaaatcttcattacttctattctgcacgagatcctcttctctgaaatggaagtcttccctttacaaggtttaggaagtcggctgggcgacctcaattgtcaaattaggtcttctggcgatctcataacttaggccgattaacaggctaaccggggtaccccggttaaatcgagttctcgattttatacacattttcctccgatttaaaccggtattgtcggaggtgccaattcctgcaccaacaccagccatgcatttcaaatgagataatcctttatgaatattttcgaatgtcatgcaagatctagaatgagcattaggtctcaactatggcttgtacagggccgaatgagtaagcccaaaagagggtgatgtgtaaattgaagtccaagtcttgtacaatgcagcaatacaagagagagagttcttcttgtggttgtgtgtcaagtgtgtgtgattttttctgtgatcttgtaacacattcgtttttactttcttagtgagatagaaagagttttttgatatgtttctcctttgattaatagggaatgtaaagaagtacaaacggcaaatatatatcactaagaatagaaaagggaaacccttaaaactacagttacttggcataatagattcattcattagccatgatcagtcacaccccacgcgactcacaatgggataatctgagttacaagaacagagttccgcaccacatgtcttccaccacaaaccaagtaacagatccaaaaaaattttcagcaaaaaaatgcttttaaaaatccttgtaaattttttaaaaactcttttaaaaaacattgtaaatttttttaaaagttttggtagttgttataaacccttgtaaatcattttaaaacctattaaaatctttctagagtctttaaaaacatatgtaaatactttaaaacctctttttaaacctttgtaaatcattttaaaaccttttacaataggtttacaagatttacaagagtttttaagagttttaaaaggatttacaaagattttcaattatttctttttctttttattataagggaatcttaaaagagaccaccattgctcatgctcttagttttagattttatggtgctatatacttgaatagtttatgaaaattggttaccttttgtaattcaccgattatttttaaaatttatttgtctgttttttgtttgctccgtaacttatacggcaaattcgaaaatagtttaaatattcaacactgatagtactaaaaaaataatattttggtatataaacgagacgagtccaatttagttttagtatatttatatatctaaatataatttgaagatatttgtatttctttaagcaaaagaaaacagacttgttcattttccaacttcggtttagaaaaaaaaaaggagacgtcgtcgtcttctagcttctgattaagtctgataaattatgcccctaaatctgtaattctccaaggattcggattcgatcgatg

SEQ ID NO: 28194 - DNA, 3003 bp, Unknown; identical to SEQ ID NO: 28193
  misc_feature (1)..( 3003): 2750-1469P.txt file - cDNA_ID_2994464; gDNA_ID_2214571; Annot_ID_186185

SEQ ID NO: 28195 - DNA, 3003 bp, Unknown
  misc_feature (1)..( 3003): 2750-1469P.txt file - cDNA_ID_2994470; gDNA_ID_2214573; Annot_ID_135129
aagtcagccaatggaatggatcaacccattagatatatatgctcacaaaaaaaaattgattccatattcatttgcaaataaaaaatgaagtgacgtcttaaaactcacgtgaaaaataagctggagaatactactacacatggatggagaaggtagacagtagatatactcttttgatattgaatcaaatctgcctcttgttccctactagaagaatcttgttgacattgttagaagcgtgctgctcaatgttacggatcggattcctgatgtctactcacagtaataaaaaagaaaagaaaagaatgaatgtgatcttagtagataatatttgctaactaatatgtagaagtaagagaaaaaatagatctgttgcaaatgtaattttttgttgcacaaggcctgaaattgaactaattaaaactgtgatctaaaactaagagtaaagataatagtttagtttagaaagatgattcaactgtgacttgatacacaagtaaaatgccaatagctccaatatgtagtatgttacgataagatcaaaccagttacgcgatatttccagattcccaccataataaagaaggaacacatccataaaacaaacagctaaataaaggataaaaaagcaaaattaagtggatagattcttagagaatatcacaactaaacatgttgtgattataaaaaaaacggtcttatcacaaatctgatgcttaattcacttcccatcaagctgaatggtccataacttgaaattaatattgtcaacacgcagttccactaataagtggaaatagacaaaaactttgtctcaaagaaaggagaagcagagagtttttgctcgttggcaaaagctgtgactgtgatgaagtgaaggctttagcctcactagtcatgggccttgagctataactttcagatccagcccaataaaaggagcgatgcatcagatattcagatggcagagatcctaaataatctcaaccgttctagagatcctaaataatctcaaccgtttatttatttaagccacgtcatcgatcctcgcgaaaaacaaatacccatttacaagcagttacatatctgtatataaacaattatcatcattcagcatcaacgcgtctctcaattctcacattctcaaaatcactaaaatcaaactcaattttcatcaaatatctctaatggcgccgaaagcagcggagaagaaaccggcagagaagaaaccagccgggaaagctccggcggagaaactcccaaaggcggagaagaaaatcagcaaagacgccggaggaagcgagaagaagaagaagaaatcgaagaagagcgtcgagacttacaagatctacatcttcaaggttctgaaacaagttcatccagatgttggaatctctgggaaagctatggggattatgaacagtttcatcaatgacatcttcgagaaacttgctcaggaatcgtcaaagctcgctaggtacaataagaagccgacgattacatcgagggagattcaaaccgctgtgagacttgtgttgcctggagaactcgctaaacatgcggtttctgaaggcacgaaggcggttaccaaattcaccagttagggttttcctgtaaatttccggttaagtgtttggtttagactcggtttgtttagatgttttgagtttcgtgaattgtttgatgatcactctaatggttcaaaattgatggttgaatttgattcttcttcttcctttcagtgatttataattgttttatttaacgtttgagtccctggaatttggataatatgcaaattgctccatcaggtatttataaactaatttctatccatcaattgcgttatagagttgcgtttgtgtgtgacatcgacaaaacaaactaaacgctatttctctaattagtggattttattacaagagaaacttgttatatcgtcgtcttctacaccaacaggccgttgaatcatgagacgctattgataagaccgacctaataattaggtagatttttttggtgtagtttatttccagtctattattctcagcccattagacccaaaaggaaaatatcaaggcccgtaaggaaagtctaaaaagataagggacacgtgtacagtcataaatctatctaaaggtaggccgccacatctatcaccgttggatattctagtttaaaatcgtcatcaatcataattattcatttcttcttcgtcttcttcttctttctcaaattagcttttctttatcgtcttcctcaagcgtgagattcgttgtggatatagtttttctccttgattctctggttctttccatgatccaattttaagggtttcacggcttcgtttttttgggtatatctagctctatcgttcgtggtggttttctttctggatcaaagttttctgagatctctgcgatttctgggattcgaaaattggagaattagggcttttttacggtaacagggtttcgaagagcataagataagaatgccttcggtgccctctaagcttcttcctctcctgtctttgattccttcgttgactccttatcattctggtttgagttctaatcgtttgaaacctcttgaaaagtgtgattggcgtggtaatcttagttaacatttcctttccttcttctctcctttttaccctttcttctctcgccctcgtttacttcttgagattttcttagctcgatttgatctttggtgctttaacttctggcggtgtttgatttgcagcacaaaaaggtgattttttttttgtttctttgacttctgcaaatttaattctgttcaatttgggatctaaacacatagtctatgttttaattcatgggcttctataatatcatgcgagtagagtgaataaaatttgagcatgagtctttgttttcgttgtgtgctctaaagatcatatttactgatgataactttaaatttgtttgtgcagttactactactactgtgattaccttgtactgttagttggatatg

SEQ ID NO: 28196 - DNA, 3003 bp, Unknown; identical to SEQ ID NO: 28195
  misc_feature (1)..( 3003): 2750-1469P.txt file - cDNA_ID_2994470; gDNA_ID_2214573; Annot_ID_186266

SEQ ID NO: 28197 - DNA, 3000 bp, Unknown
  misc_feature (1)..( 3000): 2750-1469P.txt file - cDNA_ID_2994479; gDNA_ID_2214588; Annot_ID_186682
aatgtcctctattttagaggaaatatatttgattttgtttcattgtatatctgtaaaataaagttaactctaaaatagagaaaaaatgtagaaattccttttttttactctatatatagagtaatctttacacttttcttatgttttatagttaactctattttagaaacatacaatagagcaaaactaaatatattttctttaaaatagaatcaactctaaaatatagaaaaaattaaagttaaatattggaaatggtccattacattaccgatctaatcgagagtagttttttcttccatcccattatctttttttaaaaaaaggttttagacttgagtcaaactttaatttacactaattttcatattttctatattttccaccgggtcaactctatagctatgacaataaccgattatataattcgttgtgtgtagcagattacgacatttaaaaaaaatagatataaaaatagataagcataaattgagataaagtaagtaacgtccctttcaaaaactaacgttttcattaatttcatacataggaacacgataagatgcatccaaaagaggttgttttggacaaagatgggaggttggaaattccaaaagttgacattgttccgcaacatgtttttgtttgatcaataaatagtaaactataaaacatgtacgagacatacataatcttggatacatcagcaggtaatgttgttagagaaggattgttcttatgagaaccgagaacgttatttaactttggtgagtacgaaggggtttgttcgaccattaggatgaatataatcaaccttctcgtttgatcgtgatttggtttatgtttgtcgatctcatattatacagaaacacgattaaaaggagatttcaagaaaagcccttataataagaactctatgaaacctaagttataagaagaggtgacttgactacattttatggttgggaatgaaattcgaagatctagctgttggaaagacaggcgtaaagtttgtgtaatgtataaacagaatctcttttgtacgaaagaccattctacagaattgacgtgttaatgtgtatatctggaattaggtattaaacattaattttgagtttgtatatcttctctctttttcttacgatcaatatgcaaattagcaaatagagagacgtaatgatgatgtttgtgcattaccgagtgagataactaaatgatgtttcaagaaatgcaaaagtgaaacaaggaaacctaaaagagtaagcaaacaaacaacaaatcagcaataaaatatttaaatcattttaaaatttaattaatattaattcgtttttactttaaggtttttggtaactttttttggagaccgtgatgtcgtcaaaacattcaagatgtatattgattattgacattctctctttctctctattgtccttcttttttttcttcttttactttttaactttaaaactatatatttatatccataaaatatataaaagaaatcttattagtaactaaaagttgtgcaagttttttagctattaattttatcggaatagtgcaaaactgttagaaaaaactgtataaaaaactgttaaaaaaagctgagaataaaattttttataacacttttggtaacaattttgtgattggtaaatgtcaaactatttatactgttttaaagtgttaagtggttaccattcaaaaccaaaaccttaaaaattaaagccgttatgctatttttttaataaagaagacatgattttgccctatcaaattaaaattggtgtgttgatgagtgcaaaagcgtaggcaaataaatcacacatcattaacaaaaaaaaaaaatcacacataaaagtgtaattgtgaggaaaaaagatgtttccaatttttaagtccaccaccaaactggacccactaacccctactcagggtatacaattccatttccacccatacacaattatagtagtccaccttttttcttttctttctacacatatctggattccagtttttaagtaggattattattggttggtaaaagatgcaaagaatatgagaaaaggtctaattgcgtgctccataaacccttattctagttcaaccataattgtcagtcaatagaagcaagataatttgaacgtccaagtcatcatcatctttttttttctttctgaaatttcgttttacaataaacaaagaaaggttccgagtcctcaagcatctctcacgtcggagcaagttgccatgcactctccaaaataaaataaaaaacagacaaagactttagacttgtgacttttcgacctcattatgtacttacttacttcatcttctatttggcacccacaaacagtagtttccactttcttcctcaataagttccatttttggattctttcctatttttacacaaatttgttgtattctaaaaagttatatattctatttgctgggctttagatatgggctggctctggatatgtgtgtaatggatacatattagtaaatagttaagtccaaaaaagaaattataaaccccctatgtagtttgaaaactggatcatctgacaaaacgagcagggaaggcccataataaggcctaataagtaaggtaagcccacagagaaatatacttacgggcttggatttccgaaccttcctaaaaagtgggacctacgcggctgagaagaaagacgaaggccatatcagaccggcgataactgaaaagtcaaaagtcaaaattcaagaggaagaggagtttctaatcatgtctctctctgttttcttcttattcttctatcaaaccgtcaagttgggaaacaaaacaaaactcgcaagtttaacaacgcgtcttctacctcctcctcatcggactatttatctatagtcttcgttagatcaattcctctgttttactcctaagtttcgagatccacatttctctttaacctcatctcatctcttagtcgagatcttcactttctgatg

SEQ ID NO: 28198 - DNA, 3000 bp, Unknown; identical to SEQ ID NO: 12994
  misc_feature (1)..( 3000): 2750-1469P.txt file - cDNA_ID_2994483; gDNA_ID_2214588; Annot_ID_135363

SEQ ID NO: 28199 - DNA, 3003 bp, Unknown
  misc_feature (1)..( 3003): 2750-1469P.txt file - cDNA_ID_2994490; gDNA_ID_2214595; Annot_ID_135478
atttttttctctctctcggactgtgcccaaagttgctcctttttttagggtttttgttttttatttacaaacgctgtttttttatcttctcccttgttttatacgcaacgttgatttctttttcttttttttttattattgaggcattttcgattaacctaaaaatcgaaatttttgtctaaccaaagcatgcttaggacagtatatacaattcgcaactgctcttagaacctctggtagtagaactaaatcattttcagacaaaaccaaaaagaattcgtaactcatgtatagaacttacacttcatcttttattccaacaggcattagcccaaacatataaaccccaatattcttttacaattgaaatgcatcaagccgtcaacagatatacacccaatgacccaaactgaacaaaaacaaaaaaagttaaaacagaacagaagcaaatgagggagggagggagagagagagagagagagagagatacacatggtggatgattttcagcttattcccagttgcagactccaaagtttgttttatctactattaaggcaaatgatgatcctgctgaattatttttagaagatgtgaaggggcgagagatattacgtgaaactattgcacaccgcgatcaggcagtcgacttgaagttgccagattcaaatggttagaggattgaaaatttccatcctctaagagaatcaatacttatctctgaggaggatcaactgtcctgacatttgcacctgtcataccttcaattttatctttggtgatctccacaaagtgaccaattacttcgtgaaactgcttaagacccgataacggtagaatgatggaagacctgtcagaacctgccacctatattgagaaatgctttaatgttaaaaccatggtaaatacaagctctcaagagataagccagcaaaagattgttcttccaagattacctcagatatccttaagaaatggcccctgttattgttcccaagatcaaagaagaaccgtttctggtcagctctgattactttagaaacaccagtcattccggtttcttcctggcctggcgagtcaattgttcgatccacattatgttctgaagaagatggctgctgactaccatgtccaggtataaaaccagctccaacatcatcaaccaagtgttcctgtccatcagaaggtttctgtttccaaaacgaagatacaatgagaccagagaacttagttaaaggcttttcaatcaaaggagacgataataccacctgatttggcatcacaaaaagtcctgatgcttcatgtatctcagccaatatattcctgaaagctgcccatccttcatcaggagagcttccagctggaacaataatggtacttcgatttctactaaccgatgcttctgacacctaacaccacaccaaaacccatcagaacattcctacaacttctgatacctcaggataattagtcacataaccaaaatgaaaagaacattcctaaccataagtctagtactccctaaatcttcaattcacatataccaaagaaaaaaaacttcagattcattaagtaaaacagaaaaatttctaccttcaagaagcgtcctcttctgttctcaccgatatcgaagtaaaacacctgaataaagcaacaacagcagaaattaaagagagtggaaaagtcaacgatcgccagaagagagtgatgataaagttgaaaccttggaatcaagctgcaattctttgctaaaaagctcgtgttcctcagaattgacatagtagttgaagagatcaaggaaccaagagatgccggaggaaggaacaatgatggttgacctcgtcgccgacgtcttctccgatatctttagataccttccacgaggattctccttaagatcaaaatagaatagcttatgctccacttgcaacgtcttgctcaccaattccacatcgctccctcctcctcctcctcctcctccggttaccgctcttccgccttcagctcctcctcctccgcctgaattagcttccatttcaatcttcaattgatcgatcggagtagaaaattcggtgaaagaaatctcttcactgaagagttgaaattgacgtctgatctggtaaaggaagtgcgattggaagaatgaggaattggtggaggtgagagattacggagcaataagggtttaataccggaccggatgttttaaaccggatacattgtttggtcggggtccgaacatttctgattggtcggatattcagattaagcaacagattaatttttcttggagtaactgcaattacgtataataattcttttttttaaagttggttttagtttcactgatagtcaaaccgatcggttcaaccttatggtttgattaaagatgtgttataaggagccgatgccacgtacttttactaatctcttttttgtcgaccatttttgtttctgagttgttcttcttgattagctttgtccgcttggaaccaaacatggcgagtcttggccatatagccagagaatcatcagacatcacacgcctcgcccagttttacaaagaggtaacgacacctaatcgacgttttcaatttcttacacttttctttttcttatctctcttcgtattctctgttctgggtttgtgttgttactaccaatttcgacccaaaaaaacaaacgcactgagtcgattacccatctggattagaatctatggtttgtaatttggctttttatttagagatttgtgttgctattgtggctttgtctctttctcttgtcacttatctcgtttctagtttctattgagagtgtccacttttggatgcctttaatccttttgattaagttagtgttatcttcatcttcgtggtttgttctgaaaccaatggattatatatgtataattgtcaggtgtttgggttcgaggagatcgaaagtcctgattttggagacctacaggtggtgtggctaaacttaccaggtgcttttgcaatg

SEQ ID NO: 28200 - DNA, 3000 bp, Unknown
  misc_feature (1)..( 3000): 2750-1469P.txt file - cDNA_ID_2994494; gDNA_ID_2214602; Annot_ID_135587
gttctccaaatccccattcaaaacacatttagtctccagtctttgcttcagttttactcttctctctatttattaccctttcttaagtctaatgattatgagtctgcctcctcttcttttcaattaggtaacctaaaataaaaatatcttctttgtttatgttattttaaacaaaaggtatgtgaaaaaatgatgaaaagaggtgaactagattagggttctgtaaaaaaaaaaatggaatatgtaagatattcaaaaaaagccaatattacgattacttgcaatgccatcattgcttttgcctgtagaagagtccaaacctgctttttctctctttaactacttttcattattacttccttttatataagtttttaaaaaaaattggtggatgtgctctttgtttgcagttgactggtgaaacagtaggagaagtaagagcagttgcagatatgcaccaaaggaaagctgagatggctaagcactctgatgcttttattgccttaccaggttgtgtttttaaaccccatccacccaaaattatcatcattttttcacattactttaaacctaaaacttttctttcaaaccaagtaatgatgataaggaaaaactggtcaaaactctagttacacatgagtctcaagaacaccagtttaggcatttgttagccttttaaatgaattttatgggaaatcaaaagtttaaaagaggaatatttgttcatgaaaatattaaaaaagtttgactgattttgccaaaagagagaagaaaacaatttggttaaactaaaaaacatgttgtcttggtcaagctgtagtgtgaaagctacactgaaaagttttttttggtatgaaatttttaaaaaaattatgaaaagtccctacagtctaagataaaggaccttgacccatcaacatctggcacttaaaattagacattttttttttgctcttctctttactctgtttattgctctgcttttaacttaggaggtactatccatatagcttgtgtagtcttactgtgaccaaagttttctccttacctatttcaaggtaagagacaaaacctgaaacagtcccacaaatagcatatttttgcccacactgaatctgaaatcattatggaaagtcaagttctttcaaagatcttgcttttctaatcatattcatcccattgtacaaacttgtaacagagaagagaagactctattatttggtttgtcttgtacataacaaacttgttgacttgaccatatcatagttactaatttatctcctctctttttttttcaactatcaaatctaaaagttttgtatgaaaattgtaggtggttatggaacacttgaagaattgcttgaagtcataacttgggctcagcttggtatacatgacaagccggtaaacaaataaacccttctatcacattttaatcaaaaagtttcaactttaataacaacatatcatgcatcatttttctgtaggtgggtttgctcaatgttgatggatactacaactctctgctctcattcattgacaaagcagtcgaagaaggatttattagcccgactgctcgtgagatcatcgtctccgcacctactgctaaagagctggtgaaaaagctagaggtaaattaaacttataatgaagatggatcattaatgtttcttcataatctcataaattgttgttgttgtctttgtaggaatatgcaccttgccatgaaagggttgcaacgaagctttgttgggagatggaacggattggttactcctctgaagagtgattcagatcaagattatctatataactatttaaaatattttataatatagatttgaaactttcggagatttcatgatttaatcttactaaaaaaggaagggatagattttgattagttgggtaaaatttccacttcggaggagatttttaatgtaaattattagtaatgtctttttaagtcgaagctaaatgtttttagtttatgtaattgtcgcaactctctactattgtaagttgtaaccaagacaagtttcacactttcgtatctatctctcttcacattaaaatcaatacagacgaaaaaagaaagatatatattatctgtataagattatgtattgtcaatactcaatgccagagactgtctcttaacaacaacaacaacagaaaaaacaaacgaaaacaacaaaaaaatctaaaaaagcttcataaaaaatgaaatctaaaaaagcaaccagcttttcttgaaatggaaaaatatcttttgccatttcaagaaaagctggttgcttttttagatttcattttttagccatttaatactaacctttattataaactgtctaaaaaatattcaaaaaaataaaggcgtatgtagatagattctaatttgcatgagaaattaagtaatacagtggtaaaataaaaataaaacgaaataacgtaatttagtaaaataacatgttatcaagcaaaataatttatatcatataataccataatccataactgcgtactttctaagaaaataaaacttttatttgttaccacgaaaattgtaaaataaattgtgaatatctacctaaaaaactcaatcatttacctaatttatgaaaaatgtaaaattagacgtcaacatctttcaaatagacgttcaaaacataaatcaatcaaaaccgacactaatactatgtttttgtcgatgttaaagttaacatatactgtttttataattttttaacaacgtcggttactctgttcaatggaatgttaaatgtaacattaaattattatatgcttttgttagaaatattaaagtttcaaactttaaagtttaagaacactaatagtaagttttgggtcaattttatttgttaaagaagttttgggtccatttacatgacattatttatatcatttgtcaaaaggcccaaacgtctttttcagttgctctttcttggtgggaactgtttgagctcgagttctatgatg

SEQ ID NO: 28201 - DNA, 3000 bp, Unknown
  misc_feature (1)..( 3000): 2750-1469P.txt file - cDNA_ID_2994494; gDNA_ID_2214602; Annot_ID_187101
accctcatgcctagagaggtaaaacatttcaagatttccctatttttaatactaaaacactattgtttgtttattaatatgtatctgtaggttctccaaatccccattcaaaacacatttagtctccagtctttgcttcagttttactcttctctctatttattaccctttcttaagtctaatgattatgagtctgcctcctcttcttttcaattaggtaacctaaaataaaaatatcttctttgtttatgttattttaaacaaaaggtatgtgaaaaaatgatgaaaagaggtgaactagattagggttctgtaaaaaaaaaaatggaatatgtaagatattcaaaaaaagccaatattacgattacttgcaatgccatcattgcttttgcctgtagaagagtccaaacctgctttttctctctttaactacttttcattattacttccttttatataagtttttaaaaaaaattggtggatgtgctctttgtttgcagttgactggtgaaacagtaggagaagtaagagcagttgcagatatgcaccaaaggaaagctgagatggctaagcactctgatgcttttattgccttaccaggttgtgtttttaaaccccatccacccaaaattatcatcattttttcacattactttaaacctaaaacttttctttcaaaccaagtaatgatgataaggaaaaactggtcaaaactctagttacacatgagtctcaagaacaccagtttaggcatttgttagccttttaaatgaattttatgggaaatcaaaagtttaaaagaggaatatttgttcatgaaaatattaaaaaagtttgactgattttgccaaaagagagaagaaaacaatttggttaaactaaaaaacatgttgtcttggtcaagctgtagtgtgaaagctacactgaaaagttttttttggtatgaaatttttaaaaaaattatgaaaagtccctacagtctaagataaaggaccttgacccatcaacatctggcacttaaaattagacattttttttttgctcttctctttactctgtttattgctctgcttttaacttaggaggtactatccatatagcttgtgtagtcttactgtgaccaaagttttctccttacctatttcaaggtaagagacaaaacctgaaacagtcccacaaatagcatatttttgcccacactgaatctgaaatcattatggaaagtcaagttctttcaaagatcttgcttttctaatcatattcatcccattgtacaaacttgtaacagagaagagaagactctattatttggtttgtcttgtacataacaaacttgttgacttgaccatatcatagttactaatttatctcctctctttttttttcaactatcaaatctaaaagttttgtatgaaaattgtaggtggttatggaacacttgaagaattgcttgaagtcataacttgggctcagcttggtatacatgacaagccggtaaacaaataaacccttctatcacattttaatcaaaaagtttcaactttaataacaacatatcatgcatcatttttctgtaggtgggtttgctcaatgttgatggatactacaactctctgctctcattcattgacaaagcagtcgaagaaggatttattagcccgactgctcgtgagatcatcgtctccgcacctactgctaaagagctggtgaaaaagctagaggtaaattaaacttataatgaagatggatcattaatgtttcttcataatctcataaattgttgttgttgtctttgtaggaatatgcaccttgccatgaaagggttgcaacgaagctttgttgggagatggaacggattggttactcctctgaagagtgattcagatcaagattatctatataactatttaaaatattttataatatagatttgaaactttcggagatttcatgatttaatcttactaaaaaaggaagggatagattttgattagttgggtaaaatttccacttcggaggagatttttaatgtaaattattagtaatgtctttttaagtcgaagctaaatgtttttagtttatgtaattgtcgcaactctctactattgtaagttgtaaccaagacaagtttcacactttcgtatctatctctcttcacattaaaatcaatacagacgaaaaaagaaagatatatattatctgtataagattatgtattgtcaatactcaatgccagagactgtctcttaacaacaacaacaacagaaaaaacaaacgaaaacaacaaaaaaatctaaaaaagcttcataaaaaatgaaatctaaaaaagcaaccagcttttcttgaaatggaaaaatatcttttgccatttcaagaaaagctggttgcttttttagatttcattttttagccatttaatactaacctttattataaactgtctaaaaaatattcaaaaaaataaaggcgtatgtagatagattctaatttgcatgagaaattaagtaatacagtggtaaaataaaaataaaacgaaataacgtaatttagtaaaataacatgttatcaagcaaaataatttatatcatataataccataatccataactgcgtactttctaagaaaataaaacttttatttgttaccacgaaaattgtaaaataaattgtgaatatctacctaaaaaactcaatcatttacctaatttatgaaaaatgtaaaattagacgtcaacatctttcaaatagacgttcaaaacataaatcaatcaaaaccgacactaatactatgtttttgtcgatgttaaagttaacatatactgtttttataattttttaacaacgtcggttactctgttcaatggaatgttaaatgtaacattaaattattatatgcttttgttagaaatattaaagtttcaaactttaaagtttaagaacactaatagtaagttttgggtcaattttatttgttaaagaagttttgggtccatttacatg

SEQ ID NO: 28202 - DNA, 3003 bp, Unknown
  misc_feature (1)..( 3003): 2750-1469P.txt file - cDNA_ID_2994504; gDNA_ID_2214603; Annot_ID_135611
ctcaagatgcggtgaggatacggcggcttcagaagcaaagagaggccgaacgcaaaaaaatacaagagctcaagagcaagtctgcctccggcaatgaccaatctggtcttctccaattcggcaccagctcgtgcgaggtaatcgatttctaaggtttcgagaggagaaatggtggattgtggtagaaactagatttagaacttgttctggctctgacttagtagcttccgcaatatttagggtttagtataattctaacgattagttctgagaagtatcggagaacaagattagatcatcattgcttgagattgtattgcagttttggtgtctcaagtgtttacgaatcacaaatgttatcttgctatttgggctgtgactaattcatttgtttttggttagattcttgacactgctttcaagaaggaaacagtgggtttagttacaagagaggagtatgtggagaaggtaattggagtcatggcttgtattactctccaactttaacagtcatctagattgtggtgtttaattctgtatgtgatatatgtagagggttaatattcgtaataagttcgaggaagaagagaaggagaaactgcagaagctacagcaagagtgagttttgtttttaggtctattgttcatagttattggtgttattctttggattaagcttgattgactttttttttttaactacagggaagaggagttgcagctagagaagcgtaacaagaagagaaagattaagggatcttcccgcttatcttttgctgaagattttgagaatggcagtgatgaagatgatggagaaaacagtaagtgcattcattcatcaatctcgtagataggacttagtctacctcgactgtttttattagattttcttaagcttttaacttgattcctgaatatgctgttgttacatcaatggtgaattgtggtatagttaggattaggtgtgatacatgctgtcattcaattaaaccactataacttttttcctttttgtaaaagttgaaaaaatatttatctatctttcgcagatttaataaaatcctttttaaaatgtatggaagttgacaaaatatagtctccatcttttgcagtaataaagaatctcatcatgtattacagacattaattctacaaatgtagattggaatattgcttggttgttggaggatttgagatgcaaatagcttgctgcgtaggaatttataatatcatctaatgttgtcctttttgtaacttctatcatgtacactatttatgcagagagttctgggacagggaacttacgctgcggaaaacttggcaaggacccctcagtggaaacgaatttcctgcctgacaggtgatctctagctctcttgtttatctttatcttccttgtctgcttttgcagtaagtctcaactttagctgtggtgttttgaggttgctgtttcagtgagagggaggcggaggaacaagctgaacgtgaaaggctgaagaagcagtggcttcgtgaacaagagcagattaaaagttgtccattttctagttaccttctaatttcagttgtaatacttgattcaaggaagattgtctaactattttttgtttttcagacgagcctcttgagattacttacagttactgggatgggactggccatagacgagttattcaggcaagcacaaactacacctttgtcatactgcttgagccttacgtgtgtgatcatttacttacctttatgatatatacccattttacaggtccgcaagggtgacccaattgggaattttctgcgggctgttcagcagcagcttgcccctgacttccgggagattcggacggcatcagtggagaatttactatatgtaaaggaagatcttattattccacatgtgagaaccctttaaacttaccaagttatcctccctttactatataggacttaacgataacatggggtatttttttgtaaatgtagcaacacagtttctatgagctgatcattaacaaagcgagggggaagagtgggccggtatgccttgtcgacactttttgaaattcagtttatatagaaattgtaaccgagactcacttctcctacattgttcttgttaacagctgtttcactttgatgtgcatgaagacgtgagaacaatagcagatgcaacgatagagaaagacgaggtatgtttccctgacccgatcacatgagaaaagagagtagtttgatgatggaaagttgtttctaaagcattgtaaaatgtggtgttaatgaagtcgcatgcgggtaaagttgtggagaggcattggtacgagaagaacaagcatatattccctgcttccagatgggaggtaactctcaaataatcttttctctgcacttttcattctcagctagactttgaatcttattgttttgcattataattgttcagatttacgacccgacaaagaaatgggaacggtacacagtccatggggattaattctggaccagaacatgcttttgatggatcgtttgttgacatgattgatcagatttggtgtaatagtagtggaatgttcatggcatttttaatgctcattcttcttccctcaatgtaccattacactcgttttttaatttttcttaaaataatggaactgtttgatttctttagtacccgttattttgtgatttttcatgtcatgtgaaaatttagtatgagatcttgtgattacaaatttataatgagagcacacaaattaagaatgttagaaaccaatttgtgaatcccctgatgtatacaaggcaacaaaatcacacgaaataaattgagagaccagacaaaacgctgtcgttttgcgagggtttctatggttgtgttgttatcttttttttttcagaaataaattaatttagtgtgaaagagcaaaagcataaatagcatcgagagagacactgttctcattcattcgcaaattcgttgaccatatttgatagaatcaagcgatgatg

SEQ ID NO: 28203 - DNA, 3003 bp, Unknown
  misc_feature (1)..( 3003): 2750-1469P.txt file - cDNA_ID_2994504; gDNA_ID_2214603; Annot_ID_187134
cggctcaagatgcggtgaggatacggcggcttcagaagcaaagagaggccgaacgcaaaaaaatacaagagctcaagagcaagtctgcctccggcaatgaccaatctggtcttctccaattcggcaccagctcgtgcgaggtaatcgatttctaaggtttcgagaggagaaatggtggattgtggtagaaactagatttagaacttgttctggctctgacttagtagcttccgcaatatttagggtttagtataattctaacgattagttctgagaagtatcggagaacaagattagatcatcattgcttgagattgtattgcagttttggtgtctcaagtgtttacgaatcacaaatgttatcttgctatttgggctgtgactaattcatttgtttttggttagattcttgacactgctttcaagaaggaaacagtgggtttagttacaagagaggagtatgtggagaaggtaattggagtcatggcttgtattactctccaactttaacagtcatctagattgtggtgtttaattctgtatgtgatatatgtagagggttaatattcgtaataagttcgaggaagaagagaaggagaaactgcagaagctacagcaagagtgagttttgtttttaggtctattgttcatagttattggtgttattctttggattaagcttgattgactttttttttttaactacagggaagaggagttgcagctagagaagcgtaacaagaagagaaagattaagggatcttcccgcttatcttttgctgaagattttgagaatggcagtgatgaagatgatggagaaaacagtaagtgcattcattcatcaatctcgtagataggacttagtctacctcgactgtttttattagattttcttaagcttttaacttgattcctgaatatgctgttgttacatcaatggtgaattgtggtatagttaggattaggtgtgatacatgctgtcattcaattaaaccactataacttttttcctttttgtaaaagttgaaaaaatatttatctatctttcgcagatttaataaaatcctttttaaaatgtatggaagttgacaaaatatagtctccatcttttgcagtaataaagaatctcatcatgtattacagacattaattctacaaatgtagattggaatattgcttggttgttggaggatttgagatgcaaatagcttgctgcgtaggaatttataatatcatctaatgttgtcctttttgtaacttctatcatgtacactatttatgcagagagttctgggacagggaacttacgctgcggaaaacttggcaaggacccctcagtggaaacgaatttcctgcctgacaggtgatctctagctctcttgtttatctttatcttccttgtctgcttttgcagtaagtctcaactttagctgtggtgttttgaggttgctgtttcagtgagagggaggcggaggaacaagctgaacgtgaaaggctgaagaagcagtggcttcgtgaacaagagcagattaaaagttgtccattttctagttaccttctaatttcagttgtaatacttgattcaaggaagattgtctaactattttttgtttttcagacgagcctcttgagattacttacagttactgggatgggactggccatagacgagttattcaggcaagcacaaactacacctttgtcatactgcttgagccttacgtgtgtgatcatttacttacctttatgatatatacccattttacaggtccgcaagggtgacccaattgggaattttctgcgggctgttcagcagcagcttgcccctgacttccgggagattcggacggcatcagtggagaatttactatatgtaaaggaagatcttattattccacatgtgagaaccctttaaacttaccaagttatcctccctttactatataggacttaacgataacatggggtatttttttgtaaatgtagcaacacagtttctatgagctgatcattaacaaagcgagggggaagagtgggccggtatgccttgtcgacactttttgaaattcagtttatatagaaattgtaaccgagactcacttctcctacattgttcttgttaacagctgtttcactttgatgtgcatgaagacgtgagaacaatagcagatgcaacgatagagaaagacgaggtatgtttccctgacccgatcacatgagaaaagagagtagtttgatgatggaaagttgtttctaaagcattgtaaaatgtggtgttaatgaagtcgcatgcgggtaaagttgtggagaggcattggtacgagaagaacaagcatatattccctgcttccagatgggaggtaactctcaaataatcttttctctgcacttttcattctcagctagactttgaatcttattgttttgcattataattgttcagatttacgacccgacaaagaaatgggaacggtacacagtccatggggattaattctggaccagaacatgcttttgatggatcgtttgttgacatgattgatcagatttggtgtaatagtagtggaatgttcatggcatttttaatgctcattcttcttccctcaatgtaccattacactcgttttttaatttttcttaaaataatggaactgtttgatttctttagtacccgttattttgtgatttttcatgtcatgtgaaaatttagtatgagatcttgtgattacaaatttataatgagagcacacaaattaagaatgttagaaaccaatttgtgaatcccctgatgtatacaaggcaacaaaatcacacgaaataaattgagagaccagacaaaacgctgtcgttttgcgagggtttctatggttgtgttgttatcttttttttttcagaaataaattaatttagtgtgaaagagcaaaagcataaatagcatcgagagagacactgttctcattcattcgcaaattcgttgaccatatttgatagaatcaagcgatg

SEQ ID NO: 28204 - DNA, 3000 bp, Unknown; identical to SEQ ID NO: 13223
  misc_feature (1)..( 3000): 2750-1469P.txt file - cDNA_ID_2994508; gDNA_ID_2214606; Annot_ID_135667

SEQ ID NO: 28205 - DNA, 3000 bp, Unknown; identical to SEQ ID NO: 13226
  misc_feature (1)..( 3000): 2750-1469P.txt file - cDNA_ID_2994508; gDNA_ID_2214606; Annot_ID_187237

SEQ ID NO: 28206 - DNA, 3003 bp, Unknown
  misc_feature (1)..( 3003): 2750-1469P.txt file - cDNA_ID_2994523; gDNA_ID_2214630; Annot_ID_136035
gggggtccaccggctatacccagttacctccaggtttcttccggtatcactggaactcgtgtaagagaagattaaaaaatcaattaaaataaaattaatctcaaacggatataatatggctcggcttatactaatcggctcagctccactcaagctatacgtggaaaggaatctctgtgttaaattaataatctatttttaaaaattgaataatcgagttttctttttattaatcttttgaaattgtctattcaccatgtaaaagttattataacatcacaatattgtgtttagaagttttatagtagtgtgtaacaaaattggttatcagaattattttgttaaatgctaaaatcatgaatgctttagagatatttttttgacaacattttacaaaatatgtttgtcttattcgcatggtaatctaatcatcatgtcttctttaatttgttaaagttgtaataattggattatatgcgttttttattttctctaacccattaaaaaatttataaattaaagttatagggtgatgactttcgtggcaatgcaaaaatgagacaagagctgttgggcctcgatgacagcaacaagagtgagttttttgctttctttttatttgggttaggttcttttgattctccaaaacatatttatattctcttatatatttggaaagtttttgggtttttggttctttgatttttttcaccttataagttcctatatccggtatcatccattgataatataattagtttgttttctttataaaatgtaaattatattttttaggtataacatcatcttaactatagtcaaaataattcttttggatcgaaactaacaaccttaatatcaacatgaaattgtgtttattttagaggtgaaaatgcgccaaacctcttcttgtctttggatttcggaggaccataggttctggaatgctgactcgcgtatggaaagatccatggattcccactatcctagcgcggcctgcaaagagcattcttaacataagagattctctactctatgtcaatgatttaattgaccaaaacacaaatttgtggaaattggaccgtctccaagcactgatcgatcccgttgatattccactcattttagggattcgcccaagtcgtacctacttgagtgatggctttagctggtctcacactaaatccggtaattatactgttaagtcaggatattgggtcgcgagagatctttctcgtcctacttgtgaccccccttttcagggaccaggtgtttcggcacttcaggcacaagtatgaaagcttaaaactacgcggaagcttatgcatttcgtgtggcaatgtatctcgggttgtttagccacttgtcaaagattgacatatcgccatatgggtacagataaaggttgtccccgttgcgaagaagtagaagagacaatcaaccatctattgtttcattgtccaccttcgagacagatttgggctttatcgcctattcctacctcagggaatattttccctagaaactctctcttctataatttcgacttccttttttggcgtgaccgagaatttggaattggagaaaaggtgttggaactctttccatggataatttggtatatctggaaaagtaaaaatcgttttgtttttgagaacttcagggaacctccccctgaaactttggttttggcacttcaagagacagctgtttggaaacaagcaactctaaaagaggatgattccactcgtccaatcgtgttcgtaggttcttctcagaccccgtccaccttgctccctgaatgtcaactcgatgcatcatggcatgtagatgacacattgagcgggcatggttgggtacttgttcgacaagacttggtcatccaccttggccttaagagcactcgtcgaaatttatcaccgcttcatgcggaatttaactctttgttataggcaatggagtgcatgatctctattggtgatacttctggtacttttgcttcggattgctcagacttgattgctatccttgataaccaagacgattggctgacttttgcagcggaattggcttcatatcgttctttagtttgttttttcccttcttttcgtattagatttctttctcgtagttctaatactcgagcagattgtttagctaagaaagctcgggctcgcaatagccttttttcccatgtaagcacattggttcctaaatggctctctctagcggagagtctcttcccgataacttaatataaatggtgtttgaagaaaaaaaaaaaaaaatgcaacaaaatctactcgattttctattttgatacaatgctccattcttataaaaaaaaataaaagaggaaaactgtaaagtaaggtgtaaatttggtgaagaaaatcattatccaatcaaaaacgttttgtgtaatagaaacgtaaataaaacgagtcaaggcaccgacacaagatgatctcaatggggatttgtgtttccacctaatacgacatcgtattcaattcctaaacgacgccgttccgctcgtgcttacccataaatggaaaaatatctatacaactgccacgtcagcacaccaaaaaatatcaccggcgaaaaacacacacagtgatattctacggcggtggttcagtctcttcgaagctcgtcgtctctctcttcaaaactccggtgaaaatggcgtcgcttactctccggtgcgattcgacgcatcttttgccttcccggtaatcaaattgaattgtatttctctctgtttcactgaatttgaattgatagtttttgattagatctgtttatcattcggaatttgaaattacgtttgcttatgattcgattttggattcaattgaaacacatatctatgtatttaggttttgatggttatgttgtcttcatgggtttttcagtgatgttgtcaagggaacaaaaccatttggaacgagcttggtgtatcctaggatcatatcgaagaagtttaatgttagaatg

SEQ ID NO: 28207 - DNA, 3003 bp, Unknown
  misc_feature (1)..( 3003): 2750-1469P.txt file - cDNA_ID_2994523; gDNA_ID_2214630; Annot_ID_187934
aatttaatgcatagtacttgatgatctttactctcttaaacccatcaagaaaagagaaaactttgaaggaagagagaaagagaaatggagagaaattaaagacaatggagattcttctatatacagagagagagaggagagagattgttgaggttgatgagcgttttccatatgaacaagcttggtttcacactttctctcagtttaaataaactcaaaggttgggttagaaagtaaccatggttaagtagatattgtcttgggtgttttcttttgtaaatgatttttttttttttgttaaaataaatttgagggggtccaccggctatacccagttacctccaggtttcttccggtatcactggaactcgtgtaagagaagattaaaaaatcaattaaaataaaattaatctcaaacggatataatatggctcggcttatactaatcggctcagctccactcaagctatacgtggaaaggaatctctgtgttaaattaataatctatttttaaaaattgaataatcgagttttctttttattaatcttttgaaattgtctattcaccatgtaaaagttattataacatcacaatattgtgtttagaagttttatagtagtgtgtaacaaaattggttatcagaattattttgttaaatgctaaaatcatgaatgctttagagatatttttttgacaacattttacaaaatatgtttgtcttattcgcatggtaatctaatcatcatgtcttctttaatttgttaaagttgtaataattggattatatgcgttttttattttctctaacccattaaaaaatttataaattaaagttatagggtgatgactttcgtggcaatgcaaaaatgagacaagagctgttgggcctcgatgacagcaacaagagtgagttttttgctttctttttatttgggttaggttcttttgattctccaaaacatatttatattctcttatatatttggaaagtttttgggtttttggttctttgatttttttcaccttataagttcctatatccggtatcatccattgataatataattagtttgttttctttataaaatgtaaattatattttttaggtataacatcatcttaactatagtcaaaataattcttttggatcgaaactaacaaccttaatatcaacatgaaattgtgtttattttagaggtgaaaatgcgccaaacctcttcttgtctttggatttcggaggaccataggttctggaatgctgactcgcgtatggaaagatccatggattcccactatcctagcgcggcctgcaaagagcattcttaacataagagattctctactctatgtcaatgatttaattgaccaaaacacaaatttgtggaaattggaccgtctccaagcactgatcgatcccgttgatattccactcattttagggattcgcccaagtcgtacctacttgagtgatggctttagctggtctcacactaaatccggtaattatactgttaagtcaggatattgggtcgcgagagatctttctcgtcctacttgtgaccccccttttcagggaccaggtgtttcggcacttcaggcacaagtatgaaagcttaaaactacgcggaagcttatgcatttcgtgtggcaatgtatctcgggttgtttagccacttgtcaaagattgacatatcgccatatgggtacagataaaggttgtccccgttgcgaagaagtagaagagacaatcaaccatctattgtttcattgtccaccttcgagacagatttgggctttatcgcctattcctacctcagggaatattttccctagaaactctctcttctataatttcgacttccttttttggcgtgaccgagaatttggaattggagaaaaggtgttggaactctttccatggataatttggtatatctggaaaagtaaaaatcgttttgtttttgagaacttcagggaacctccccctgaaactttggttttggcacttcaagagacagctgtttggaaacaagcaactctaaaagaggatgattccactcgtccaatcgtgttcgtaggttcttctcagaccccgtccaccttgctccctgaatgtcaactcgatgcatcatggcatgtagatgacacattgagcgggcatggttgggtacttgttcgacaagacttggtcatccaccttggccttaagagcactcgtcgaaatttatcaccgcttcatgcggaatttaactctttgttataggcaatggagtgcatgatctctattggtgatacttctggtacttttgcttcggattgctcagacttgattgctatccttgataaccaagacgattggctgacttttgcagcggaattggcttcatatcgttctttagtttgttttttcccttcttttcgtattagatttctttctcgtagttctaatactcgagcagattgtttagctaagaaagctcgggctcgcaatagccttttttcccatgtaagcacattggttcctaaatggctctctctagcggagagtctcttcccgataacttaatataaatggtgtttgaagaaaaaaaaaaaaaaatgcaacaaaatctactcgattttctattttgatacaatgctccattcttataaaaaaaaataaaagaggaaaactgtaaagtaaggtgtaaatttggtgaagaaaatcattatccaatcaaaaacgttttgtgtaatagaaacgtaaataaaacgagtcaaggcaccgacacaagatgatctcaatggggatttgtgtttccacctaatacgacatcgtattcaattcctaaacgacgccgttccgctcgtgcttacccataaatggaaaaatatctatacaactgccacgtcagcacaccaaaaaatatcaccggcgaaaaacacacacagtgatattctacggcggtggttcagtctcttcgaagctcgtcgtctctctcttcaaaactccggtgaaaatg

SEQ ID NO: 28208 - DNA, 3003 bp, Unknown
  misc_feature (1)..( 3003): 2750-1469P.txt file - cDNA_ID_2994527; gDNA_ID_2214630; Annot_ID_136027
gcaatgataatcagtaaaagggagtttttcctaattgatccatgttttctaaagctacaatatatatatatatatatatatatatatatataaaattggttgtatatatgccatgtaatacagaaaccgatagaagcgttgctaagtgtaggatttttcatttttgactcaaaagttaactatattatttgcaggaaacaatggatttagatatgattattgcattgcagaatgttcagaacattttttagatgatgtatgcaagccagtgtgtatagacaaggggtactcggatggaggatgtattggtttagcaccaaattttaaatgttgttgtaagaaatgatagaaaccaataatctttatagtaaaacggtgatggtgatttgatatcttgtatgttcttcgatgaaataaagctaatcttatctttgataagcttcagaagtcttaataatttcacaaaagcttagcattatcgatatcctagagataagaaggtataaaaaagagtaaaatttatattgaaccaaacaattcatgggactgttttatcagaggatttggcgagtaatggcaccggaacgagtccgtgtttttctctggttagtggtgcagcaagtgatcataactaatgtggaaagatatcgaagacacttgagtgatacgagggtgtgtcagatttgtcaaggcggggaggagacgattctacatgttctccgcgactgtcccgcaatggcagggatatggagccggttagtccctcgtgatcaaatacgacaattcttcactgcttctttgctggagtggatctacaagaacttacgggaacgtggatcatggccgacggtgtttgtaatggcagtatggtggggatggaaatggaggtgtggcaacatctttggcgggaatggtaagtgtagggaccgtgttaagtttattaaggatttggcggaggaagtggcgatagcgaatgcttttgtgaaggggaatgaggtgcgggtgagtagagttgagcggttggtgtcttgggtatcgccggaagatggttgggtaaagttgaacacggatggggcttcgcggggtaatccggggtttgcaacggcgggtggggttttacgggatcataatggagcgtggattggaggttttgcggttaatataggtgtttgttccgcacccttggctgagttgtggggtgtctactatgggttattcatcgcttgggggaggggagctcggcgggttgaattagaagtagactcgaagatggtggttgggtttctcacgacagggattgcggattctcatcccttgtcattcctattacgcttgtgctatgactttttatcgaagggctggatagtccgaatctctcatgtgtatagggaagctaatcgtcttgctgatggattagcgaactatgctttctcgttatccctaggtttgcatttgttggagtctagacccgatgttgttagttctattttgttagatgatgtagcgggggtttcgtacccgagacatgtccaagtgtaatttttttattttcttttaataaaacgggagacgcagtctccctcattctaccaaaaaaaaaacaatgcagatatttgcaaatttttcttctttttagatacagagtatatgtaggcatgtagctaaagatacttgatttggtgtgattttgatcatctggatgtaaaaggtatggtgatgcgtctagtgttggagcacttgaggctttggttattggtgttgtggtcattgttaattagtaccaatgtgaagcacctttatcgatttcacagggactggaccatagtgatgcttgagtgacgactcttattcgtcgtggtctaagccgcctctttatcatttttagggctctttggtcgactaattttattttatttttccctttcactagggtttcctgacttgttaaacaagctttagctctccgattaacagctaacagctcttttaccactcagaccctttatttttttatcccggccacctattatttattttgcttgattttatttcattaataaaatttataggaaaaaagaaaaaatttaaaaataagaaacaagaggtaggctcttctagcgaactcctttcatacgttttctctctactctcatcgcttttcttatctctctcggagctcttccgtcgtccaccattgattacggtaagattcaccttctcctactcaatttcataactatagataaataaatctctgtcttctctgcctctgttagtttttttctacgattgaaaccatcaaatcaattcaaggttttacacagtttcttatgcttgtcctgattgtttcgttcccggagagggagaaattacggcttttggaatccgcccagaaaatttcccgcccagctcggattttgatagaaatgttttgcctttttggtttctgtaaaattgatattcttattgtactttgattgaagtatgtgtgttcaattgaaattgatgttgtgtatttcttaagtttgaatctttgtgtaaggattgggggtttagggttttgactcatgattgctttctgcatttttaaagttaaaaagccagactttgaggcttagagctacttatattgtgttgcagggagtgtattgagctaaatatggctataatacaacttggaagtacatgtgttgctcaatggagtattcgtcctcaatttgcagtcagagcttattatcccagcagaatcgaatcaactcgccatcaaaagtatgatttttaagtctctggattgcattcagttctgtggctttaagcctttcaagtattttgatttgttcacattgcacatcttaagattagtcttcgtagaatgaagtttgtattatgtgatttctacactgagagttttatatatgaaatagcattaaaggttttccttttcacaacttttacagttccagtagccaagtaaattgtttgggagcttcaaagtcgagtatg

SEQ ID NO: 28209 - DNA, 3003 bp, Unknown
  misc_feature (1)..( 3003): 2750-1469P.txt file - cDNA_ID_2994527; gDNA_ID_2214630; Annot_ID_187922
taccaccggagattaaaaggggaaatcactttcataggatggccagtttgggcttcacactgcaattttcatttaagcttcgaaatcggagattcatgaaacgtttggccggagtttcgagcaaaataaaataaaattataggatcgattaattgacagagatggtgttgttcagctaagaaaatcacaattctagagctgtgtaaaagttctcgagaaaaaatgtacggtcaatgcttttaattggattgaaacttgtttatgtgattaaggaaaataatgtattttcaataaaatgaaattgtctattcttgttaaggcaatgaaaagttctacttttagcaatgataatcagtaaaagggagtttttcctaattgatccatgttttctaaagctacaatatatatatatatatatatatatatatatataaaattggttgtatatatgccatgtaatacagaaaccgatagaagcgttgctaagtgtaggatttttcatttttgactcaaaagttaactatattatttgcaggaaacaatggatttagatatgattattgcattgcagaatgttcagaacattttttagatgatgtatgcaagccagtgtgtatagacaaggggtactcggatggaggatgtattggtttagcaccaaattttaaatgttgttgtaagaaatgatagaaaccaataatctttatagtaaaacggtgatggtgatttgatatcttgtatgttcttcgatgaaataaagctaatcttatctttgataagcttcagaagtcttaataatttcacaaaagcttagcattatcgatatcctagagataagaaggtataaaaaagagtaaaatttatattgaaccaaacaattcatgggactgttttatcagaggatttggcgagtaatggcaccggaacgagtccgtgtttttctctggttagtggtgcagcaagtgatcataactaatgtggaaagatatcgaagacacttgagtgatacgagggtgtgtcagatttgtcaaggcggggaggagacgattctacatgttctccgcgactgtcccgcaatggcagggatatggagccggttagtccctcgtgatcaaatacgacaattcttcactgcttctttgctggagtggatctacaagaacttacgggaacgtggatcatggccgacggtgtttgtaatggcagtatggtggggatggaaatggaggtgtggcaacatctttggcgggaatggtaagtgtagggaccgtgttaagtttattaaggatttggcggaggaagtggcgatagcgaatgcttttgtgaaggggaatgaggtgcgggtgagtagagttgagcggttggtgtcttgggtatcgccggaagatggttgggtaaagttgaacacggatggggcttcgcggggtaatccggggtttgcaacggcgggtggggttttacgggatcataatggagcgtggattggaggttttgcggttaatataggtgtttgttccgcacccttggctgagttgtggggtgtctactatgggttattcatcgcttgggggaggggagctcggcgggttgaattagaagtagactcgaagatggtggttgggtttctcacgacagggattgcggattctcatcccttgtcattcctattacgcttgtgctatgactttttatcgaagggctggatagtccgaatctctcatgtgtatagggaagctaatcgtcttgctgatggattagcgaactatgctttctcgttatccctaggtttgcatttgttggagtctagacccgatgttgttagttctattttgttagatgatgtagcgggggtttcgtacccgagacatgtccaagtgtaatttttttattttcttttaataaaacgggagacgcagtctccctcattctaccaaaaaaaaaacaatgcagatatttgcaaatttttcttctttttagatacagagtatatgtaggcatgtagctaaagatacttgatttggtgtgattttgatcatctggatgtaaaaggtatggtgatgcgtctagtgttggagcacttgaggctttggttattggtgttgtggtcattgttaattagtaccaatgtgaagcacctttatcgatttcacagggactggaccatagtgatgcttgagtgacgactcttattcgtcgtggtctaagccgcctctttatcatttttagggctctttggtcgactaattttattttatttttccctttcactagggtttcctgacttgttaaacaagctttagctctccgattaacagctaacagctcttttaccactcagaccctttatttttttatcccggccacctattatttattttgcttgattttatttcattaataaaatttataggaaaaaagaaaaaatttaaaaataagaaacaagaggtaggctcttctagcgaactcctttcatacgttttctctctactctcatcgcttttcttatctctctcggagctcttccgtcgtccaccattgattacggtaagattcaccttctcctactcaatttcataactatagataaataaatctctgtcttctctgcctctgttagtttttttctacgattgaaaccatcaaatcaattcaaggttttacacagtttcttatgcttgtcctgattgtttcgttcccggagagggagaaattacggcttttggaatccgcccagaaaatttcccgcccagctcggattttgatagaaatgttttgcctttttggtttctgtaaaattgatattcttattgtactttgattgaagtatgtgtgttcaattgaaattgatgttgtgtatttcttaagtttgaatctttgtgtaaggattgggggtttagggttttgactcatgattgctttctgcatttttaaagttaaaaagccagactttgaggcttagagctacttatattgtgttgcagggagtgtattgagctaaatatg

SEQ ID NO: 28210 - DNA, 3000 bp, Unknown; identical to SEQ ID NO: 13515
  misc_feature (1)..( 3000): 2750-1469P.txt file - cDNA_ID_2994531; gDNA_ID_2214633; Annot_ID_136085

SEQ ID NO: 28211 - DNA, 3000 bp, Unknown; identical to SEQ ID NO: 13515
  misc_feature (1)..( 3000): 2750-1469P.txt file - cDNA_ID_2994531; gDNA_ID_2214633; Annot_ID_188034

SEQ ID NO: 28212 - DNA, 3003 bp, Unknown
  misc_feature (1)..( 3003): 2750-1469P.txt file - cDNA_ID_2994535; gDNA_ID_2214634; Annot_ID_136102
gaaaaatttgttacatagaaaactattaaagagttctcattagatgagggtcatttggtcattttacttaagagaaggggtatttttaaaaatagataaaagaaaaatgtattattgcaaaagggtagtacaaaaatggtacttttgcatatcccccaaaaatataaagatgatcaatcaagagtcattaaatccgtttttctattaccactttcgtaaccatcaacaaccaccatcgccacttgcataacaatcacacgttactcctatattttttagtatgacatgctattttattaaatgacattgcttttccccatgattctcgttggatatttctcttaagttgttaatattccaatattgactttttttttttggatttcgtgtaattagtacttattttactcttttttatataaattacaatacgttgttgtatgtttatcttttgtttgagattaatttattttttacccatggctatttggctattttcatacttattttaagtcaacggtggagtatttatgaaaaagttagttttcttgatgagaaaatatagataattttttatatatatagatgtgagtatttacaaaaaaaaatcttataggattagttaaataattgtataatttccttgtccttattctatttatcaatttatttctggtttagttagtaacttccaattaaaatgtttaaaatatttttttaatttctatatttataaaaaacagacatataattttattatatataaatatagtttccttccgatccttattaaattcacgacatatgacaccttcttctctttctccatacgcttgatggacatgttcaatatcttctctgcgtagaatcctggcgaacggttataatcgtacatcgttggagatctcctgcacacttgcctccattaatctgtaaatttgctaataaatcgcagtagctgggattcgaaccccagacctcttggtgtagaagcactaataaaccattggtcaaccattggaacaagggagcttccacaaaaaatatattcatatatatatatatatatatataaacagttgttacaatcccaatcatcataaaatctgtagagtcctcttccaatcttaacatcgtagacaacgtttggatttctgcaagtggagtgggtacttattactctccaggtattcctgtcctgcatgaagttgttgtcaactgtatagagtccgtcttccttaataagtatagtgaaagagcttgtttcaaggaacagtaaatggttgttgtcataaagcgttgtccactcagcagcattaagccaactttgggttgatgctttaagtacatgtgcgacatctggcaaatatagcatcaaaatatattagatttgtagatatataaataactatcttagttttgctacaatgtcttcttcaattagaattttccaagcatcagttctatcacaaaccttctcctagatctccctagaatccagatctgctacattcttagatttttaaatcttgcctaagtgttacaaattccatagatcttgcattccctaaatcttgatgttctaaaatttctaaatacaatgcctcgatttcccaaattcgccacagtatctcgatgatctccttcaaaactaaaagagtttttaactaaccaaatactcaaatactcctaatttgtattcttaaccctttaaccatagcctaaacaatacccaatttttaaaataataaataaacacttacattgtttttattgctttctttgtaaactatgaatttttttttgtatatatatataattttatatagatttcactatacatatgaagaaaattaatcagacacatattattagttgcactctcattttcttggaagtaggaaaaatgatataacttgtttaattgtacaaacattacccaattttttttattttatttttgtcgtattgttttggccgaaccattttcttcttttataaaatgggaatttttgcattctattttcgtagacaaagagtaaattaatcatttgtgagagataataataaactttggatgttcttgtctagtagcttaaaataaaattgagtatttttggtttagataaatgtataaatggtgtctaatgtattcttaccattggatgtttgacaaattacacatttctccattttctttagagtaatcaaagggataagcattgtaagagtttataacgatggtccttgtgatgatctaaataatgcattaggcagtgcttgttgattaaagaatgatgaaatcctttaacactcacatgttaaaatatttgttaacatcttgtccttaatattgttaaagaaacttaactaaacttgttaacattttgattatgggtgtcaaaatgggtcaaaatttatgggtcaactcaattcaactcaacccatgaactctaatgagttcaaaattttgactcaaatgagttgatgggtcaaatgagttgatgagtcaattggtttgatgagtaaaattagttgggttgtaatggttaatggtactatgagatcatttcaaattttttgatacatggtgttttcctcccaaatatatgactataatatcactaaatactatgagatctcgtagagttgttgagtacgataaaagaatctatgaaaaaagaacttaaataaagaggtatacgtttgacaaaaaaaaaaagaaaaaagaaaaaggaaaaggtataaaaaaaaacatttgagttgggcttatatgggcctgtttgaaatttggtgacattacttttcgccaaaagaattaaaaaggcccatataggcccaactttaaacattactctaatatttatatctttctcacttttgctttattctgatttcttctcctatctccttctccggcgaagaaattgaaaattcattatccctaaaaccctaataaaggtccagagagtcgtcagaaaccaccgattagcttttgaaatg

SEQ ID NO: 28213 - DNA, 3003 bp, Unknown; identical to SEQ ID NO: 28212
  misc_feature (1)..( 3003): 2750-1469P.txt file - cDNA_ID_2994535; gDNA_ID_2214634; Annot_ID_188065

SEQ ID NO: 28214 - DNA, 3003 bp, Unknown
  misc_feature (1)..( 3003): 2750-1469P.txt file - cDNA_ID_2994546; gDNA_ID_2214638; Annot_ID_136177
tcaacagaatcccatccaaaccggtcaacgtagtcttgaaccgattttctagcatcaagactcatcatctgtaaaactcttctttgttcgtctgtataattcgttcctcctccaacattcatcccaattttgacgtattgtctaacaaaattggagtaaatgtaagctgcaccactgaacattggtagcaccaaccacatacagaacaaaagcttcaagtatggccaaaatggtagcctacaatatgcaaaagaacaccatttttttgtctttataggcataaatttttgaattcgtaacagaatttagtgaataatattgtaattaccaggcaaggactctccaaacggatagctcgaatatcgttattaaagagtaaatgatccaatatgtaagccattgttgatcatctaacattgttggactctctattgctcgaaatgatgcatacctaatcatttattcagttaactatcaagttgcatttgtaaaaaccaaacatttaaattcagatttgatatcacttacagaggatagagaagcatgactccaggcctgcatgcaacaagaaaaaggaagaaaataatgttaaaaatttgacaaatatagtgtttatttttattatatgagacagaatttgaataaaatcctacccaactagagcatcaaaacgttttgcaatcgcaataatgaaacccattttctttttgagtttttactcttctttcaacagaaactttctcaaacgtctttagcactgtgacgttggatatatacacaaaagcttgaaatttcttcaagcaaaagaatctttgtgggagttaaggcaacaagccaggtaaagaatctccaacgcattgttacgttttcatgaacctatttattatatgttctaagaagaaaaaaaatatctcaaagtaaacgttggaaaatttctgatgaagggaaatccaaagtcttgggtttagtatccctatgaatggtatttggaatatgttttcgtcaaaacaaaagattcttttctttttcacaagagttagtgatcaataacttatgcactaattaatgagattggacgtatacacaatttgattatgatacttgagtaaaaatcacctgtcctttaatttggaaatctctctttcttacccatttatatactacttcttttcattaaaattaaatttcaattatcaatcatcgttcaatttgataaagatttaacattttttgtcacagggctagtaaaagcaatctttacataattcatctttcttacatatatatattacctttttcttcattagtattctatttgattatgattattttgtcataaagctagtaaattaaacactcgatatgagaattatattacttcacgctaattaactcttaacacaacaagaactagtgcatattcaactttcaaagcatatactatatattgagaatatagaccacgaaagtcaatcaaaagacctaccagctctcatcaagttctttcttgaaatgattttgcagaatttccaacttaattaattcgacatgaatgtgaaaatgtgtgttgctcgttaagaaaattgaatagaagtacaatgaaaatgatgaggaatgggcaaaacacaaaagagtttcctttcgtaactacaattaattaatgcaaatctgagaaagggttcatggataatgactacacacatgattagtcattccccgtgggctctctgctttcatttactttattagtttcatcttctctaattatattgtcgcatatatgatgtagttcttttgtctaaattacgtaatatgatgtaattaattatcaaaataaatattcaaattgccgttggactaacctaatgtccaagattaagacttgaacataagaattttggaaaaactaaaccagttataatatatactcttaaattgccatttctgaacacaaccaaataataatatatactatttacagttttttttaattggcaagaacactgaaatcttattcattgtctcgcttggtagttgacaagttataacactcatattcatataaccccattctaacgttgacgacgaacactcatataaaccacccaaattcttagcatattagctaaatattggtttaattggaaatattttttttatatataaaatgccaggtaaatattaacgacatgcaatgtatataggagtagggcaataaaaagaaaaggagaataaaaagggattaccaaaaaaggaaagtttccaaaaggtgattctgatgagaaacagagcccatacctctcttttttcctctaaacatgaaagaaaaattggatggtcctccttcaatgctctctccccacccaatccaaacccaactgtcttctttctttcttttttcttctttctaatttgatattttctaccacttaattccaatcaatttcaaatttcaatctaaatgtatgcatatagaatttaattaaaagaattaggtgtgtgatatttgagaaaatgttagaagtaatggtccatgttctttctttctttttccttctataacacttcagtttgaaaaaaaactaccaaaccttctgttttctgcaaatgggtttttaaatacttccaaagaaatattcctctaaaagaaattataaaccaaaacagaaaccaaaaacaaaaaataaagttgaagcagcagttaagtggtactgagataataagaatagtatctttaggccaatgaacaaattaactctctcataattcatcttcccatcctcacttctctttctttctgatcataattaatcttgctaagccaggtatggttattgatgatttacacttttttttaaaagtttcttccttttctccaatcaaattattagggttcttcagttaatccttataaaccatttcttttaatccaaggtgtttgagtgcaaaaggatttgatctatttctcttgtgtttatacttcagctagggcttatagaaatg

SEQ ID NO: 28215 - DNA, 3003 bp, Unknown; identical to SEQ ID NO: 28214
  misc_feature (1)..( 3003): 2750-1469P.txt file - cDNA_ID_2994546; gDNA_ID_2214638; Annot_ID_188198

SEQ ID NO: 28216 - DNA, 3000 bp, Unknown
  misc_feature (1)..( 3000): 2750-1469P.txt file - cDNA_ID_2994549; gDNA_ID_2214639; Annot_ID_136203
aaaaaactttttaagactgtttataaatgcggtataaacaatgttttatttgacaaacaccatttttaagatatcttattttgtattttttttttaaatagaccaaaaacagcggtatcataaaatcggtatttgcggaattctactttaaaaaaaaaaacataataccaaagggggaacgcaactagatgatgaaaccatatgactaaaattatcatgtaaaaaactattaaataaaatatttgctaaatattatttactatataatatattaatatggaagatatattaaaaaaatatatcatggaagattattgataaattctttcatgttatggaagatctattaaagtgagtttgaatggttcatatgatgttaatttattcaattctagtcaaaaccattaaaatgaataatagaaatattataaaaccaaaaggtaaatcatcaatattttgaccaaaaagaaaggtaaatcctaaatataatattaaacttcataaaaaaatgttgaatattttttttaaagaagacaagagatgtcctcttattacggattcttaacactgattttgattactttttctaggtttttctttcttttgaatctaactatattttccgataaaaaaaacttggtgtattctcaagaaacatctaatggccatcacaaaaatgtcatctcttataatactttcattgatgatgttgactttcatctatattcccatgatttcaggtaaaaaatttatctgtttataagtaattatctcatttttttcatagattatcttaagaaaatgatagttttgccacttgagtcttttttttggtggaaatccacttgagtctaaatagtaaatagtagatgcaaagaagaagaaaaaaaattatgtgggggcaataaaaatctttaaatgttctattgactatttttttactgttgatatatgaatcaaatagggcaattcagaggaatcaaacagtgtgagatgaaatgttatagcacaccagaatgcaatgcaacatgcttacatgaaggatatgaagaagggaaatgtctgaaaagttgggatggtggagttgagtgttgttgtctaggcctcctggctagttctcatcaagatagttctcctatttctagtcctcactatataatatttcatggcatatgtattctcaatatatgaattcaaaaatatatattcaaatattatgatcgacaatatctcatccaagttctacactaatcaaattttatatccattatcattacttattctcactgcaatctccacagatcaaaagtcttctcttttgtgccaaacattctcagatttattcttcgcactgaaccgattggttatttcggttaaccgttatttcgaatttgggataaaagaaaacaaaaataaccgattttgggaaaaaaacggcgagacgagagagagatataagtagttatgggcgttaggttattcattcggttttggtttctattaggttatcgattcttttggttctaatgtttaatccattcggttattttgaaatgttggttcggttccggttctttcggtttaaatatttagtatccattcgattattttgctttgtatatttttcgatatttcagttatttttaagtatttttattattttatatatattttcaagtattttaattatttagtataaaaataactaatattttaaaaatataattatatttccgatatttttgattacccgaaataattcaatttggtaccgattcggtttcggttctttcggttatagaatttactatccattcggttatttcaaattttcggttcggttcgattcggtttaattcttcggtttcggttccgtaagttcggtttggtttatttccccaggttttttttttttaacaatttctttcaattgatatgattaatagtgattacagtgtagggcgtttgtgataaaatttggtacaaagtaatgataaataaaggaagtgtcttgtggcagatgagattttgcaagcatatcagccggttggttgttcgttctcggcgtccaactgaaaataacttcttcaaaacgtttgctccatgaccaagcttcacgtatccaattaaaagctccaaaatgcatttgttttctgttcagtagttcttccacctgtttgctatcaccttcaaagatgactttacggtacccttgactccaagtatgctgcatggccatgaccaaagcttggagttcactttccaaagcattattcattgttcctccaactgcttgtgctgctcctttatagaatcctttgtcgtctctgattagccatcctgagtttgtttgttgtgtgcggtaattgaaagagccatcatagttgcatttaatccatcccattggtggttgttcccatttctgatgtgtcgattcccgattgttgcagccttctcttactgtgtaatgattcagactttggatatattcttgcgcattctcccattcttgtacgtcatcctttgctcgctttagtgtactttgccaagataaattctggtgctgaaaaacaagctggtttctactcctccaaagtctccacataatccaaagtgcaagttgagatagttgcggttgatttttagccaaaattcttgatagaatgatctccaactttgtctctaccgatgcaccaacgcttgttagaatatgatggggaatgcccgatgcgcgccaaacctgttgagcataaaaacaatcaaaaaataaatgctgtgacgtttcctcatcctgacagcatctgcgacatatagaatggttgttgatgtgtctgcgacgaagattatctcccgttgctaaagcctcagaacaaatcttccataagaaatgtttccccaggtttatagataaaagaatggtttacttcactgttgaaacgttcaaaacaaaatagcaaaaaaaaaagacataacgggcccattaaggcccaaaatatcatg

SEQ ID NO: 28217 - DNA, 3000 bp, Unknown; identical to SEQ ID NO: 28216
  misc_feature (1)..( 3000): 2750-1469P.txt file - cDNA_ID_2994549; gDNA_ID_2214639; Annot_ID_188250

SEQ ID NO: 28218 - DNA, 497 bp, Unknown; identical to SEQ ID NO: 13805
  misc_feature (1)..( 497): 2750-1469P.txt file - cDNA_ID_2994569; gDNA_ID_2214653; Annot_ID_188697

SEQ ID NO: 28219 - DNA, 497 bp, Unknown; identical to SEQ ID NO: 13805
  misc_feature (1)..( 497): 2750-1469P.txt file - cDNA_ID_2994569; gDNA_ID_2214653; Annot_ID_136458

SEQ ID NO: 28220 - DNA, 3000 bp, Unknown
  misc_feature (1)..( 3000): 2750-1469P.txt file - cDNA_ID_2994580; gDNA_ID_2214663; Annot_ID_136542
aaattctcagcttctatctcttatgtttgttgtgagcgatagtgtaatgactatattcaatttttaccgtacgaaacagtaaaccgtcagctctagtgatcgacaaaataacagatcgggtctcctcgcacctatattttaatatgacttgtcttcacgacctcattagatgttggctcgaaggaagaagtactgatcaagattgtttcttttcaacttccattcttctaaaagtctatttgtttcttttcaatcttcattcttttaaaagtctatcttttctttcaaacttttgaaattctctattaattaaaatataaatatctttgttgaagctaaattttacattccaacagaaaaagagaaagttaaactaatagaaatgtacagacggcacttattcccaaaatgtaagttacatttctataataaaactaacaacactgagaaatgagaatgatcttatcaaaaagagaatgataaaaaaaaaaagaaaaaaaaaagagggaatgatcccatcaagttttcggagtattgcttgtacacacttggtctaggaaaaatcttaggaggtgaaatgttacttttgcatttaggcccaattatatcttctgtttttaagaagttctgactagtctgtttatttgtaatctgggctaaactaaatttatttgtaaaagcaaaggtacatttaaaaaaaaaaaaagacgctcactctattgtgttcttcttgttcacgttttcttttgtcgctcaacaatatagagtaaaaacaaagacattagggaaaaaaaatgaacaattgaacattacatagaaagtatgaattaattaagcacattgttaactctaacgacacaatcatgttatatataaaatatatatagagcgagtgtcagttcttgaactcactctcacaattctccgacacaatctcaaccttcttcgcatctaatagtcccttaaccttaacatcacaagtcaccaccacttccttgttccgtttgaccggccctgcttcatactcagccttcagctccatattcagcatcagaacaaccggttgcttcgatccacgaggttgtacaactgcgttcttggtcgacccattaagcttcacattgaccttgtcggatccagatgcggcctgggacaaccccggaaatttcccgctccccaggctcttattcttgtacgttaaggaaacgaccccgttcttttccatcatgtagcgtactcccatgttagacgttggattctcggctcttaatgtgacctcaaaattactaggatttacggtcaatctctcgaccgcgaaaacaggaagagtggggttgaaagcgaaatggaggatgagaatgattgcaccgagtaagaatccgaaaatgaccaagataatgaagaaccacaaaagacgtttagaacaccctttctttttgtttttctccgggttcttgctgcgtttctcgacgtattttgcatgttccggaggaggggtccaatagacttgatctctcgggacttggacaacgtacgtctctaactcagggattgaatccggaggaggaagaggcggagaagatgtcgttgggagtggagacagattaagagaatgattacgccaatggtgtgaaccgtgcgatggaggatctaaagatggcaatgcggggaggctagaggttggacggtgccaaacggacggaggatcatcgggtttgtcatcgtcagagtcaggggcggtggcggaaggaggacgccgtggcccctccatcggagaaaggtgggagttacgagatgtgtggtggagattggtctacagagaagacgaaagagagagaattaagagaggatgcgaaaattagggtttgcatgggaaaagtaagtggttgttgttgcatgactcaaacttttggttggttttgagaagattttgctatttagagttagccagctcaccttaaatttccctttttctgttatttagaaaactatattacagaactcatataatatagtattatggcatttgatgatgatcaacgaagttgttactttttgtttacaagatatcgattttctaacataaattatatatgcatataagacatacatgagtaaaatcttaaaaaggttagcacatattggtaatgtttatcatgaacgagtcttattttattttgtacgtttcgaactaaaaccatttttgggtggtatttctggaccaaattttcattaaagtgttttttatttcaattctcttgcaacttctgtttctttagaaagcgaaaaatgcatatatacgaatatacgttgggattgacatgaacggaatgtatgtatttacacacattaatccgcagcaaccggccattcaaaattatgtttgtgggccttgttgctgcttcgctgacaatactatccaaaatttatttcatttttctttctttgaaaaacacacaatcacttaattttcatttataaatcaaacatatgtacatgaaaatatcaaggaaattaaaggaaatcttaccttcatatggtcgaaagttttctttcaaaaagcaaaaacaaaaattaatgtttctctaattcttccccggccccaatccacgtgaaacatgttatgttgcgagcattacactggaaactgttacattacattctaattggcgaaaaatgaagtgcatttgtattgtatctcacgaagatttgcgtttgtgacaaaaaaaaatatgcaatttttttcgaaatctgacaacccatgccgacctgtccgccgagttaacgacgtgcttataggatccttaagtatttttattcttatttcttactcattccaacggaccaaaaacgaccacgtcatcttcatacgcaactcccaaaacagacgataattaaatcattgaaatctaaactctcatatactttagcattttcaacatttctattaatatttccatagactagatctctctttcttatacatccatatcaccgatg

SEQ ID NO: 28221 - DNA, 3000 bp, Unknown
  misc_feature (1)..( 3000): 2750-1469P.txt file - cDNA_ID_2994584; gDNA_ID_2213638; Annot_ID_132206
gcccttttcttcctctgtatgaacaggcaatgtacaatgaattttcgacggcaaatatccaagtcgataaagatttcagcgccaagctatcaggatacggttgtgcaggccatgcgcctgagacagagacatctaatagttcggcacttgctaatctctctgtcgagactctagagagagggcttttgaccccgaagagcaatgtgtggagctatggaatagttcttcttgagatgttaacgggtcggaaaaatatggacgggtcttacccgaaagaagagaggaacttagtgaaatggagcagagcttttctagcagatgattgcaggctctcgcttataatggatcctcagcttaaaggtcggtttccggcaaaagcggctaggagcatagcagatatagcacagaaatgtctgcaggtggagccttcagagcgtccaaccatgagaaacatcgtggatcaactcaagatcatacaggacatgaagtactcgtgtaggttcccattgagagaacccgcaccggtcgtggcaaggaaacatatgggaagatcaagcagtctcaacacgattatttggaccccggcatcagtgccaccaaggtcgagtttttcaccgtcacctccaccacgacgaccgtctgtctcacccacaaggggacggacgctcgtgtttcccccagtgtttccgccgcgagcgtgttcatctttggaggaaatggctcgggaagaggttcgaagatcgtcttcagccagtggtaggagaactagcctcgaagggttttgatttgttcatatctctcttctttcttctttttcctatttgtttttaatttttggcgttgatttgttttttggattccaaatataaaaaattgtttttttctttttcttttgttgtttatgaatccggacgtcgatagagagggtttgtgatgttttgtacataataatcaacatttcttctttcacattaaaaagagatccaagtattgtgtactcaacagaaaaactgagaaaggaaaaagaaacctaccttattcaagaatctatctctctgattcgattcaaatctttccagtgatcgttcatggcttcctcaaagtgtttgttgttgccgtcgctaccatttgagttgatagaagaaatactttacaagattcccgccgaatccttgatccgattcaaatcgacgtgcaagaaatggtacaatctcatcaccgagaagagattcatgtacaatcacttggatcactactcaccggaacgattcataagaacctatgaccaacagatcattgatccggtgaccgaaatcctctcagacgcactaatcccggacgagtttcgcgatttgtatccgatttattccatggttcactgtgatggactaatgctgtgtacgtgtcgaaaatgggacaacagtctcgcagtttggaatccggttttgagggaaattaaatggatcaaaccgtcggtttgttacttgcacactgattacgttgggattggatacgacgacaatgtatctcgtgataactacaaaatcttgaagcttcttggtcgtttgcctaaggatgatgattcagatccaaactgtgagatctatgaattcaagtctgattcatggaaaactcttgttgctaagtttgactgggatatagatattaggtgcaacaacggtgtgtctgtgaagggtaagatgtactggattgctaagaagaaggaagactttactattataaggtttgatttctccactgaaacattcaaggagatatgcgtctgtccttatactttggtgactcgattaggctgtttcgatggagatagactctctttgttactacaaggtgaagaatcacaggggattgaggtttggatgacaaacaagttgagtgataaggttgtttcgtttagccaatatttcaatgtcactactcctgatcttccagcgttacatctccagtcttgtatggcttgtccgggatactccattggtaagcgcagaaatataagggtgtggtgtgagggaagtgtagacgtggatgataagtcgtatgttatcatcacgttttacgaaattgatgaaggtggggtcataaaacaaattgagacagcaagctatggacagtttgagtacgatgacccgtttatttgttgctatgtttatgttccgagtctgattccgattcagtgattcccgccgtccagaagaaaaatagttagcgatatgagtgttgtttcgtgttcttaaagctagggttttgtttggctttgtgtttggtgatcgtctaccatgtacatattgaaacgaactaggttattgaaattgacttctggttttggtttttgtatttatgagcttgagaagttttaggtttggtacagagttgtatcatcttccatatattgctaaaactaagcatcattatccgaagacctaaacatttacaatgaacaaatctaacatttcaattgatttgttcatgtgcatacatataaaaaataaaatgtaactatttgaggaaaaaaacatctaatggcatttgattggaattggtactctaaaaaatcagataaaagcgtatgtaaaccggataattgaattgaaccgaattacggttcggttttgttgttggtgtgataaaggttcgattgagccgtaaaaccttccgtcctcctcgagtcctttccatcaggaccttatccacagtccacacacagcgagactctatttactcgccggcggaagaacaaaatggcgggaagagcgattttctctgtatcttgttcatctactccttccttgtgtatcccttattcaactgcttcgttttcatcgatgaatcgactggcgctccccgccgtccggatttctccccgaaccaacagatttcccagttaatatctctattcgcttctttaaattcgatgcatgcattgattttgaaatttatattcagacacgtttgatttttgcagggattcactgctctatg

SEQ ID NO: 28222 - DNA, 3000 bp, Unknown
  misc_feature (1)..( 3000): 2750-1469P.txt file - cDNA_ID_2994584; gDNA_ID_2213638; Annot_ID_181109
gtgacggttctgacacaagaatgttggtgtacgagaggcttgctctgggcagcttggaccgtttactgcatgggagatcagatgggcctcctcttgattggaacactagaatgaagattgcactatgcgcagctcagggtctaaccttcttgcacgaagaaggcccttttcaggtacgctaaacaaaactccatcaacatttgtgaatttgggtggtaacaaggtttgttgtgattgagcccttttcttcctctgtatgaacaggcaatgtacaatgaattttcgacggcaaatatccaagtcgataaagatttcagcgccaagctatcaggatacggttgtgcaggccatgcgcctgagacagagacatctaatagttcggcacttgctaatctctctgtcgagactctagagagagggcttttgaccccgaagagcaatgtgtggagctatggaatagttcttcttgagatgttaacgggtcggaaaaatatggacgggtcttacccgaaagaagagaggaacttagtgaaatggagcagagcttttctagcagatgattgcaggctctcgcttataatggatcctcagcttaaaggtcggtttccggcaaaagcggctaggagcatagcagatatagcacagaaatgtctgcaggtggagccttcagagcgtccaaccatgagaaacatcgtggatcaactcaagatcatacaggacatgaagtactcgtgtaggttcccattgagagaacccgcaccggtcgtggcaaggaaacatatgggaagatcaagcagtctcaacacgattatttggaccccggcatcagtgccaccaaggtcgagtttttcaccgtcacctccaccacgacgaccgtctgtctcacccacaaggggacggacgctcgtgtttcccccagtgtttccgccgcgagcgtgttcatctttggaggaaatggctcgggaagaggttcgaagatcgtcttcagccagtggtaggagaactagcctcgaagggttttgatttgttcatatctctcttctttcttctttttcctatttgtttttaatttttggcgttgatttgttttttggattccaaatataaaaaattgtttttttctttttcttttgttgtttatgaatccggacgtcgatagagagggtttgtgatgttttgtacataataatcaacatttcttctttcacattaaaaagagatccaagtattgtgtactcaacagaaaaactgagaaaggaaaaagaaacctaccttattcaagaatctatctctctgattcgattcaaatctttccagtgatcgttcatggcttcctcaaagtgtttgttgttgccgtcgctaccatttgagttgatagaagaaatactttacaagattcccgccgaatccttgatccgattcaaatcgacgtgcaagaaatggtacaatctcatcaccgagaagagattcatgtacaatcacttggatcactactcaccggaacgattcataagaacctatgaccaacagatcattgatccggtgaccgaaatcctctcagacgcactaatcccggacgagtttcgcgatttgtatccgatttattccatggttcactgtgatggactaatgctgtgtacgtgtcgaaaatgggacaacagtctcgcagtttggaatccggttttgagggaaattaaatggatcaaaccgtcggtttgttacttgcacactgattacgttgggattggatacgacgacaatgtatctcgtgataactacaaaatcttgaagcttcttggtcgtttgcctaaggatgatgattcagatccaaactgtgagatctatgaattcaagtctgattcatggaaaactcttgttgctaagtttgactgggatatagatattaggtgcaacaacggtgtgtctgtgaagggtaagatgtactggattgctaagaagaaggaagactttactattataaggtttgatttctccactgaaacattcaaggagatatgcgtctgtccttatactttggtgactcgattaggctgtttcgatggagatagactctctttgttactacaaggtgaagaatcacaggggattgaggtttggatgacaaacaagttgagtgataaggttgtttcgtttagccaatatttcaatgtcactactcctgatcttccagcgttacatctccagtcttgtatggcttgtccgggatactccattggtaagcgcagaaatataagggtgtggtgtgagggaagtgtagacgtggatgataagtcgtatgttatcatcacgttttacgaaattgatgaaggtggggtcataaaacaaattgagacagcaagctatggacagtttgagtacgatgacccgtttatttgttgctatgtttatgttccgagtctgattccgattcagtgattcccgccgtccagaagaaaaatagttagcgatatgagtgttgtttcgtgttcttaaagctagggttttgtttggctttgtgtttggtgatcgtctaccatgtacatattgaaacgaactaggttattgaaattgacttctggttttggtttttgtatttatgagcttgagaagttttaggtttggtacagagttgtatcatcttccatatattgctaaaactaagcatcattatccgaagacctaaacatttacaatgaacaaatctaacatttcaattgatttgttcatgtgcatacatataaaaaataaaatgtaactatttgaggaaaaaaacatctaatggcatttgattggaattggtactctaaaaaatcagataaaagcgtatgtaaaccggataattgaattgaaccgaattacggttcggttttgttgttggtgtgataaaggttcgattgagccgtaaaaccttccgtcctcctcgagtcctttccatcaggaccttatccacagtccacacacagcgagactctatttactcgccggcggaagaacaaaatg

SEQ ID NO: 28223 - DNA, 3003 bp, Unknown
  misc_feature (1)..( 3003): 2750-1469P.txt file - cDNA_ID_2994588; gDNA_ID_2213638; Annot_ID_132201
atgtggctataaatcattacatgatgtgttttgtgttctcttgcagttgctgttgaatgagaaagctttgatgtgagcgagcctgagagtgtaacaaaggactgatgatgaagattattgcggcgtttctcttcctcttggtcacgacttttgtttcccgttgtttgtctgcagacatagaatcggacaagcaagcactgcttgagtttgcatctcttgttcctcacagtcgcaaactcaactggaactccactattccaatctgtgcctcttggactggtatcacctgctccaagaacaacgcccgtgtaaccgcactccgtttgcctggatctggactttatggacctttaccagagaaaacatttgagaagcttgatgccctcaggatcattagccttagatccaaccaccttcaagggaacattccatctgtcattctttcacttccttttatccgatcactatactttcatgaaaacaacttttctggtactatccctcccgtcctttctcatcgcctcgttaatcttgatctctccgccaactcgctctcgggaaacattcccacgagtctacaaaaccttacccagctcactgatctcagcctgcaaaacaattctcttagtggtccaattcctaacctccctcctcgccttaaatacttgaatttgagcttcaataaccttaacgggtcagttccatcttctgtcaagtccttcccagcatcctcatttcaaggtaatagccttctatgcggtgctcctctgactccatgcccagaaaacaccactgcaccatctccttcaccgacaacaccaacagaaggtcctggtacaaccaatataggtcgtggtaccgccaaaaaagttctctccactggtgctattgtgggcattgcagttggaggttcggttctgttgtttatcattcttgccatcataaccctttgctgtgccaagaaaagagatggcgggcaagatagcaccgcagtgccaaaagctaaacccgggaggagtgacaacaaggctgaggagtttgggagtggggtgcaagaggcggagaagaacaagctggtcttctttgaaggaagttcatataactttgatcttgaggacttgctcagagcctcggctgaagttttagggaaaggaagctatggcacaacgtataaggccatcttagaggaaggaaccacggtggtggtgaagagactgaaagaagtagcagctgggaaacgggagttcgagcagcagatggaagccgtgggaaggatcagtccacacgtgaatgtagctcctctccgtgcctattacttttcaaaagacgagaagctactcgtgtatgattactaccaagggggcaatttctccatgctgcttcatggtaatatgatgttttacatgttactcaaggttataaaaagtggctttaaagtaacactttagatgaattctatgcaggaaacaatgagggaggaagagcagcgttggactgggaaacaaggttaaggatctgtttggaagctgcgaggggaatttctcacatccattctgcatctggtgctaaactcctccatggaaacatcaaatcaccaaatgtcctcttaacccaagaacttcatgtctgtgtctctgatttcggtatagctccattgatgagccatcacaccttgatcccatcaagaagcttaggttacagagcacccgaggccatagaaacacggaaacatacccagaagtccgacgtatacagctttggtgtactgttgctagaaatgctgactgggaaagcagcagggaagactactgggcatgaagaagtggtggatctgccaaagtgggtgcaatcagtggtgagagaggagtggactggagaagtgtttgacgtagagctgatcaagcagcaacacaacgtagaggaagaaatggtgcagatgttgcagatagcaatggcatgtgtgtctaagcatccagattctaggccttcaatggaggaagtggttaacatgatggaggagattcgaccttcagggtccggtcctggttctggtaacagagcctcctcgccggagatgatcagaagctctgatagcccggtttagattggttttaaattctctttctctcattctcaaatcattatttatttttgcttttccttcttcttcttcttcataaaccgtttattttagttctctatgtctgactgcataatttattccaatcaatatctggaattgtagtgtaattgaaaccctcaccatgaatggttgtagttcttagattggttataagtgtgcgactagttttgaattttcatttgttgttgtatgattcgtttaaattaaatcacaagagtctttgggtgtttgaaaatctaactgaaatagtgatacaattatatgtgaaatttatcgtctcaaaaagataaactacatgagtaaataaataaaaataaaatcattgctctgtattttttgactgcatgagtcctaattggtgaaataaaaaaacttttggcacgagaattaataaatatatagaaaaggtgaaataggtgaggcggtacttgctgatagaatcagaagcttcgagactgacttgttttagattctctgactataaagaaaggcaaagtaacaagtttcgttttctcctttgcactccatttttattctcgattctcttctctcccgataaagaagctctcgctttgtgttgtccgtccttcttccaggtctaattccaccatttctctttggttaaaccctaatttctttctctcccgaatcgtcctctgtttttgttttgcgcgattagtttccaccgcttaataatagggtttccgatcacttacgttttgtgttgttttgttcggtctctggttcttccactgtgatctgttttgttcttaagttgattgtcttaagttatatcctctgttcaataatattctggtcttgttgggggtttccacaggttttctcgtctctgacgcatg

SEQ ID NO: 28224 - DNA, 3000 bp, Unknown; identical to SEQ ID NO: 10221
  misc_feature (1)..( 3000): 2750-1469P.txt file - cDNA_ID_2994592; gDNA_ID_2213638; Annot_ID_132193

SEQ ID NO: 28225 - DNA, 3000 bp, Unknown; identical to SEQ ID NO: 10221
  misc_feature (1)..( 3000): 2750-1469P.txt file - cDNA_ID_2994592; gDNA_ID_2213638; Annot_ID_181098

SEQ ID NO: 28226 - DNA, 3003 bp, Unknown
  misc_feature (1)..( 3003): 2750-1469P.txt file - cDNA_ID_2994596; gDNA_ID_2214450; Annot_ID_132909
tttatgttggtaatgcacaacaatcatatggcaattcaacggtttcggcacttttcgcttttggagactcaatacttgacacaggcaacaataatcttcttttaagtgtttctaaagtcaatttttatccatacggtagagactttataggtggaagagctactgggagatttggaaatgggagagttttttctgatataattggtatgtatatatatattgatctctacttgttgatatacttgtaacggatgaattcaatgtttgtaatactatgacacaaatattatctaatagcaagtctttgttttcagctgagggtttgggattgaagaatctcttaccagcatatcgtgatccatacctctggaacaatgatctaacgactggtgtttgtttcgcatctggtggatctggacttgatccaatcactgcaagaacaacagtaaatttttcttagtttgtccaaaagattataacaacttttattttatctatagcaaattttaatagattatattttggtgtgattagggaagtatatgggtgtcagaccaggtcacagacttccaaaactacatcaccagactaaatggtgtagtaggaaatcaagaacaagcaaatgcagttatatcaaatgctgtttacctaatctccgcaggaaataatgatattgctatcacttattttactacgggggctagaagattacaatacactcttccagcctacaatgatcaattggtctcttggactcgtgatctcataaaggtacaaagttagattgttttacatatatataggacatagtaagagattaaaattttggtcaaattgtatgtgacatattctattgttccccctttttttttgttatttgaagagtttatatgatatgggtgcaagaaaatttgccgttatgggaacattaccgctaggttgtttaccaggagcaagagccttaacgagagcatgtgaattatttgtaaatcaaggagctgctatgttcaaccaacaattatctgccgacattgacaatcttggtgcaacatttccgggtgccaaattcgtgtacgtagatatgtacaatcctcttttgggtctcatcattaaccctcaagcttcaggtaataacatgattcataattcaagaagaatactcatgtgtatatatatacgttacatttacaattatattttccaaaaatgtagggttcattgatgtagctgatgcgtgttgttgtacgccaacgcacttaataccgtgcttggatgcgtctcgttacgtgttttgggatgtagcccatccgacccagaagtcatacgaaaccatcgctccacagattattgaaaatatcaaagcaaagctcgcatgatcaagttatcaagctcttttgttttgataataagttatcaagcttttttttttctttttttctttcggcaagctttttagattgttatgattaatatcgatcggtaggttttaatatcgatcggttacctcaaccacaacgtcgctctttggtcaaaaaccaaatatttgttactcttaataaatatttgttttagatcttcgtgttgacttgatccctctcatcttttatgatccaaattaattaaactttgtcgtcactttatttccgatattgaatccaaaatatttagttaaaggccataggctttttgagttttctagtagcgcttactagccaatatcccgaagatacatgaactatatacatcaacgttggattttttcaatgaacatcaccaatttcatgtcaaaaaaaaaaaaaaacaaagaacatcagtatcaacaaattaaaaatctaatctcctgttttagtttttttttttttttaaatcacgtgcatagctttgttttgacattagaacatgacttttccaaaatatttcagatttatgaatgctactgtactatttcttttcgattcggtccatattccttactttattcagagagccttcaaacaccgttttcgtggagcatctttttatgtcgattgtgataatattgaagtttttgaatttatttttcttacagtttttgtctttttttgtaaaacgaaaactctagatttaaatctcacactgcttcatatagctagattcctttgcctgccactaaatccaaaacctcacgtgaattttagttttgaactagtccccatttcgagaattttagtgtaggaatagcaatataatttaaacgatcttgttaattataaaatacctatcagttcataaaattaaatttaatttgatatagtttggaaattagtgaactctacaaaagtgttttaacttttaacgattagaacttttattgcttagacaccagtacgtcttgtgattaaaccaatgtggagaagaaaatgtaaatggtatcatgtatgactagcaaattattgacttaagagtcatataaaacaaaagttcgaattaagttctttagtcttctgacagcatcgagaggtgagataagtttcctcattactacattccccaaaacacatattcgttaagacgttaacgttcgttgtctacaacaacaatgtaaaataactttaaaaaaaaaaaagtaagtaactaaatgtacaaatcttctttaggactgatggatttagattgatatatgatagttactagttacgttgttaaaaaaaatggtattaaatcactaacaacgaataattcattttatagctactagtcaatacgataattttagttttcagctaacaatattaatagttgataattctctactttcaacttatttcttgtacaaaccgtattatgtaatgtaggtaagcttattctcatgattagctcatttgatctaattttaatatttatataaaaaacttataaaccctaataaaaaaatatctgaccaaaaaaaaaaaaaaaccctaataaaaaacaaacagtacactgttttttctctctataaagagaaaatctccaaaagcaatg

SEQ ID NO: 28227 - DNA, 3003 bp, Unknown; identical to SEQ ID NO: 28226
  misc_feature (1)..( 3003): 2750-1469P.txt file - cDNA_ID_2994596; gDNA_ID_2214450; Annot_ID_182425

SEQ ID NO: 28228 - DNA, 3000 bp, Unknown
  misc_feature (1)..( 3000): 2750-1469P.txt file - cDNA_ID_2994621; gDNA_ID_2213619; Annot_ID_131956
taaccatttttaatcagaaaataacatgtatcattgtatcaaagcttaacggtaatgggttttaaaataaatgttttacaaattaataagaagtgaacaaaaaatttctctctacaattatcaacttgattcaagttaaaatagttaatagaacatatagtattttgagaatctgtctcaaggttgagttttggtagtagtacaccagagatcatcgttgttgttggacttatgtgaatcaaatggaagcgatttgaccagcgaggggcgaatgggacattattctctaatagttggaggttgatgcttctggatggtttgttcttgatgggacgcgcatgggagtcgaatcttgaaacaatagctaggtaggtgattttcgagacgacattcttaacgttaatcataatacgataagatgtcagaatagtgaaaaaccaaaaacaaaaaattgggagtagacaaataagaggtagaattgtgttcttatacttgatggtgagctcagaaaaaaagagagacttaagatgtagaagctgagtatcgtcgaatgtaataagcgatatatgttgcttgttgaatgcaagcccaattagcgatatctagttaaggagaacgacatatagatcaaatctcatatatcaaaggtatatgagctagtctttatgaattatgggtgtgttgtaatatatcaagagattctttcgatctgtacagatgtagtgaacgagtatttataagaaatatatgactggaactagtgacaaaaggttgagtgagttggtcgaatcgtttaagttgttggataacaaataatcgaatacgttatattgtgtgtaatttcggcagatggaacatgaactattaacactactagataactttttgtgatgcgtcgtcacttaggtggaagaaggcatgcacgcgttgtcgaacaacacgtttttctccatacatgcacatagccagtctcatgtggatcgtcaagcatttccagcatcataggaatttgatcatttttgcttgaaacatgatttgttctacgcagtatcaaaacttagttttgagatataatactctttaactattgtatataaaattttaattgacctatgtgatactattaatattgtttaattatttatctatatttttctttctaatttatatgtacaaattgatttatttatttttaatttcttactattgttattctatatagtatttttctcatctatatcctcataatttatttgaaatcgtctctaatattttgtttgtgttaattatctatataaaagtttaattccttttatactttatttgtaactagtattatacccggtgcatagcaccgaaaattaatgttatgatacattctttttttgaatttaaatgttatgatatgttacatattatcgatatttatacatgaaaaattaattttataaatagattagtatataatcgtgtagggaaaaatatatcgtttcatgtatttgtggattttattttttcagatgataatttgatatataatggagaattgaagttgatatcacaaaattattagtcttccaaatatagagaattagcttccaacttcaatgctttctagaatacatacaaaagctataaaataaaaaattacatatggtattcaaagactcaatacaaacatagattatagtcatagacaaaaaaaagttaccagagtgaagttgactcaatacatagatgatatcatttatgtcttaatgttgtacacttctacttcgtcttcaacctcctactactttgccattggtgtttttcttgctcaagtcttctactttgtttgtgttttatcctctatcgatcaagtttgcttgtttatttttagtggttgatctatgaagcaaaaagatattaaacatacataataaaagataattcaaaaacagaaagcattaatatactcatctaaacgcaatcaataaaataaaagaaatataacatacgctggccatattgccttatatgaactgattagagattgaagactcttgttacaaagaaggtctcgctcctaaatgattttactctcaaccttcttttaaaaaccaatatcaacaatagaaagatgataccgagatttgtatatataggtttgagatcgtatctgtctttgtttcccaatagttagtttgaatgttttaattgaaaaaaaagagttacatagtttgaatagaagaaaaagaaattgtgggagtatggagaatatgtgggttgatttttattttcttttgagagtgatcgtgggaaaattgacgataatgttttaattttgtacactgttttcacatttaattttattttgagttttgtcgaaaaattcatttttgttttacattgtggattttgtttttgataaatttgccacatgtcaaaacatgatttgccaagtgacttgtgttttataagataaaggatatataatgtattaatgtcacaaaaaaagaattacattgcataattaagagtatgcatcgattacatatttacatcatatcttttcatatttatcctttttcttaatattcagattacgttcaatcttttctaatattacttttttttttaaacaacgagattgacaccaatgggaaagtctgctatagattacggaagcacgatgtgacctaacttgtttgtattaaattcggcatcggaacatggatcttaaggaatatcctttcccaccaccgcaaatgtccgtttgttaaatctgagatttttcaatcccattatataataactcaacaaaatctctctgtccaatttccaaagtcaactcctttttggtttttgttttactttctgttttcctcttctctactctggaacaacaactacacacacacacaaaaaaaaacaattttctgtctatatatatattaaggatccaaattagggagagaccaaagaggaaattaataacaatcaatccaacaacgaatg

SEQ ID NO: 28229 - DNA, 3000 bp, Unknown; identical to SEQ ID NO: 10106
  misc_feature (1)..( 3000): 2750-1469P.txt file - cDNA_ID_2994632; gDNA_ID_2213625; Annot_ID_132033

SEQ ID NO: 28230 - DNA, 3003 bp, Unknown
  misc_feature (1)..( 3003): 2750-1469P.txt file - cDNA_ID_2994643; gDNA_ID_2213642; Annot_ID_132304
tgagtaaaacatgttccatatattgtaaaacatctcaaaagagcactcactggttgtttagttattaacaaagattgtttctcggtggtttaggttcttgctggatgcatctgtggttcactgaagttggtttcagaaattcgcaatctgcatcatgtgttgggaggaacacttaacccagtaaattacttgactgtctcatttatccctcttattatgctgttaattcatgaattctcataaaaggtttgttaacagaacgctgcgtacctaatcatccgaggcatgaagacattgcatcttcgtgtacagcaacagaattcgaccgcttttagaatggccgaaattttagaggcacatcctaaggtatgcaatatctcttttttgagtaaatatcctgacactatccaggtgagtcatgtgagtaaatatcgatgcaattttgatttgcaggtgagtcatgtgtactatccaggccttccaagtcatcccgaacatgaactcgccaagcgacaaatgactggttttggaggtgtggtcagtttcgaggtaatatgatctatcaccaacctaatctctatctactccagattagcatttaagtatgatcctgaacaccttgattatctttcttgggtagattgatggagacattgaaacgacaatcaagtttgtggattctctaaagattccttacattgcaccatccttcggtggctgcgaaagcattgttgaccaacctgctatcatgtcctactggtatgtctttggcaaaatcgaacaaagttatctttgattccatatgcttccgtctttgacaaaatcgaacaaatttccgatttctaatgggtggttttgatttcagggatctgccgcaagaggagagactaaagtatggaatcaaagataacttggttcgtttcagctttggagttgaagactttgaagatgtcaaagctgacattcttcaagctctcgaagccatctgaaaatgacacatcacacaaaaacgctgtcgtttctttgtcctttatttatctctctttgctgttttcagtcaccgtaataatgatgtctttgaactattgttccgcgacatttacgttccgaaataatcgtgtactattatgatgtttgttgtgctatataataaattctgtttagttcgttttgcgtcttaaagaggttaaattagataactggtcccatgtgaacgaccattgtggccattgctttgtggtaagaactccttgtgcttggaacctcaaggtcacggcttcgaacaatggtcatgaccctctagcttctgcttcttcttctctttgtttcaacaacatataaggcattcataaatgcctcgtctttttttgttttctttcctttcaatacgtagttcgatttcgatttcgatttgtagatctcagcaaaatccatgtcttgagagaatgattaatgggcctttttaataagtccactgataaagacgagagcccaaaacgtaattgtattattatcttctttatttgcttttaaattttaaattgacattaagacaagactaacttttgcttgtcaaatccatgtgttgtccagcgggtaatcaacccaaagttccggatccggacccaacagtaagcaacattttacgattcgttgtttttgaatcccaatgaaaaaaaagatggttatttttaaggaatggaaaaatcgagaaaaatggtatcgtgtcgcatcgaggacttattacgtatggcgagagagctcaaaccaaaagatcaccgcctcgactgattcatcttttctcctggtatgtattttggaaaattcgtctcttgctttttatttgatccagatcagaaaacgttgtgcagattgattctgggtttatcagttccttaccaccatagtactctccatgttcttctcaattgtaaattcctttcctttttgtgtgtcaatttacacatatctgatatcttcttcgtgttgctcccaaattttgcagattcttggcaggcttctcttggtctaagtgaatttggagttatgcttctgtcagcacttttaacttcagtgggaatcaatcttggcctctgttttctcttcttcactttgtattcaatattgagaaagcagcctagtaatgtcactgtatacggtccacgtcttgttaaaaaagatggcaagtctcagcagtcaaatgagttcaacctcgagaggcttttgcctactgctggttgggtcaaaagagcattggaacctaccaatgatgaaatcctctccaatcttggcttagatgctttggtcttcattcgtgtctttgtcttcaggttgattgattcattgagcatctgcttcaagtttgactttttttttgtgaaacttcaatgcttttttgtttggcagcataagagtgtttagctttgcatctgtggttgggatcttcatacttcttccagtgaattatatgggaacagagtttgaagagtttttcgacctcccaaagaagtctatggataacttcagtatctctaatgttaacgatggatcaaataagtaaagaactcgaagctatgcttaaacagtatcccgatttctacttgtccgtaaccgatctcttatgcttgtatgtgttttgcttcaggctgtggatccacttttgcgcaatatacatcttcacggcggttgtttgttctctactttactatgtaagacgccttttgttttgtccatccattctactttatatcgcctatatgggaacataaaataatgtttggactatctttgcaggagcacaagtacattttaacaaagcggattgctcatctttattcatccaagcctcagccacaagaatttacagttctggtcagtggcgtccctcttgtatccgggaacagtattagtgagacagtagaaaactttttcagggaatatcattcttcctcgtatctttctcatatagttgttcatcggacagacaagttgaaagttctcatg

SEQ ID NO: 28231 - DNA, 3003 bp, Unknown
  misc_feature (1)..( 3003): 2750-1469P.txt file - cDNA_ID_2994643; gDNA_ID_2213642; Annot_ID_181308
gctacctcgtctgcatctgcggtttcttccgccgcatctgcagccgcagcctcgtccgccgccgccgcccctgtggctgccgcgcctcccgtcgtgctgaaaagcgtcgatgaggaggttgtggtggccgaggaggggatcagggagaagataggtagtgtacagctgacggattccaaacattctttcttgagctccgatgggagcctcactgttcatgccggtacctcctagatccaccagattcagtcatttcatatctgattttgttgttggagattgataaattaggttttacacaggtgaaagattaggccgtggtatagtgacggatgctatcactactcctgtagtcaacacatctgcctacttcttcaagaaaactgctgagcttattgacttcaaggtccgttgattgattcagtctctttcttttatggattagaataacacctattaggttgaaagaatctcttactagttttattgactttgtttatcttcaaaaaattgaattattgtaggagaaaaggagtgtgagtttcgagtatggtcgttatggtaaccctacgactgtggtacttgaagataagataaggttattattattttatctttaataatgtgttttataattgcacttgcctttcctgaagattatgttgttgatgcttttggatttgtttgattaatatattgctgtagtgcacttgaaggggctgaatcaactttggttatggcatctgggatgtgtgcaagcactgttatgcttttggcattggttcctgctggtggacacattgtcactactactgattgctacaggaagactaggatcttcatggagaattttcttcccaagttggggatcactgtaagaagatttccattgcatctaaattttttaattactgtcttcctttttccaattccagtttttcaacttgattgtttaacatcatgtttatgtccaggtcactgtgattgatcctgctgatatcgcagggcttgaagctgcagtgaatgagttcaaggtcagttctgtaacattattgtcctttttacagttggaaagagagtatgtgtctcaaatttattccgacttgtctggcaggtatctctgttcttcactgagtccccgacaaacccattccttagatgtgtcgacattgagctagtttcaaaaatatgccacaagaggggaactctggtttgcattgatggcacctttgcaacacctctgaatcagaaagcccttgctcttggtgctgatcttgtcgtgcactctgctacaaagtacattggaggacacaatgatgtgagtaaaacatgttccatatattgtaaaacatctcaaaagagcactcactggttgtttagttattaacaaagattgtttctcggtggtttaggttcttgctggatgcatctgtggttcactgaagttggtttcagaaattcgcaatctgcatcatgtgttgggaggaacacttaacccagtaaattacttgactgtctcatttatccctcttattatgctgttaattcatgaattctcataaaaggtttgttaacagaacgctgcgtacctaatcatccgaggcatgaagacattgcatcttcgtgtacagcaacagaattcgaccgcttttagaatggccgaaattttagaggcacatcctaaggtatgcaatatctcttttttgagtaaatatcctgacactatccaggtgagtcatgtgagtaaatatcgatgcaattttgatttgcaggtgagtcatgtgtactatccaggccttccaagtcatcccgaacatgaactcgccaagcgacaaatgactggttttggaggtgtggtcagtttcgaggtaatatgatctatcaccaacctaatctctatctactccagattagcatttaagtatgatcctgaacaccttgattatctttcttgggtagattgatggagacattgaaacgacaatcaagtttgtggattctctaaagattccttacattgcaccatccttcggtggctgcgaaagcattgttgaccaacctgctatcatgtcctactggtatgtctttggcaaaatcgaacaaagttatctttgattccatatgcttccgtctttgacaaaatcgaacaaatttccgatttctaatgggtggttttgatttcagggatctgccgcaagaggagagactaaagtatggaatcaaagataacttggttcgtttcagctttggagttgaagactttgaagatgtcaaagctgacattcttcaagctctcgaagccatctgaaaatgacacatcacacaaaaacgctgtcgtttctttgtcctttatttatctctctttgctgttttcagtcaccgtaataatgatgtctttgaactattgttccgcgacatttacgttccgaaataatcgtgtactattatgatgtttgttgtgctatataataaattctgtttagttcgttttgcgtcttaaagaggttaaattagataactggtcccatgtgaacgaccattgtggccattgctttgtggtaagaactccttgtgcttggaacctcaaggtcacggcttcgaacaatggtcatgaccctctagcttctgcttcttcttctctttgtttcaacaacatataaggcattcataaatgcctcgtctttttttgttttctttcctttcaatacgtagttcgatttcgatttcgatttgtagatctcagcaaaatccatgtcttgagagaatgattaatgggcctttttaataagtccactgataaagacgagagcccaaaacgtaattgtattattatcttctttatttgcttttaaattttaaattgacattaagacaagactaacttttgcttgtcaaatccatgtgttgtccagcgggtaatcaacccaaagttccggatccggacccaacagtaagcaacattttacgattcgttgtttttgaatcccaatgaaaaaaaagatg

SEQ ID NO: 28232 - DNA, 3000 bp, Unknown; identical to SEQ ID NO: 10472
  misc_feature (1)..( 3000): 2750-1469P.txt file - cDNA_ID_2994649; gDNA_ID_2213653; Annot_ID_132483

SEQ ID NO: 28233 - DNA, 209 bp, Unknown; identical to SEQ ID NO: 32
  misc_feature (1)..( 209): 2750-1469P.txt file - cDNA_ID_2994649; gDNA_ID_1291; Annot_ID_144955

SEQ ID NO: 28234 - DNA, 3 bp, Unknown
  misc_feature (1)..( 3): 2750-1469P.txt file - cDNA_ID_2994649; gDNA_ID_1292; Annot_ID_144956
gct

SEQ ID NO: 28235 - DNA, 3003 bp, Unknown
  misc_feature (1)..( 3003): 2750-1469P.txt file - cDNA_ID_2994661; gDNA_ID_2213663; Annot_ID_132615
atgaggatagaggaataataaagaggtttgtgatcgcctactattccaatgggctttgaatcagaaaattcagaatcgtggaatgtaaaatatataaaacatgttccaaaacttgacaatgtcccaacgaaatcttaataacgcggcacaaaaccgctttaaggacgtatatatatatagaaaagacacattgtgatacttaagaaaaaaaatcatctcaataacacaaaaaagaacataatctaagatttatatcagaaaatgcatgatttataggttttaataattttacatattatataaagagcacaatattctaaatggccacgcggaagcaaaacacttccacgtacacagtagaggggcacattactaaattaaggattatatatgttgttctctctgcatattccacttatattttaaaaatgtgtttttagtagctattccatattgtaatttaattaagattaagaaatggccatgtcttagtgtaagtggtaaaggcatttgatcttctagctcgcatgaaacaatgccaactttgtttgcttaatttcaacttccactctcgcatatgcagccattgctatattcacatacttgaacaataatcacaacaaaaactaattagttgataatttttctttagtagagtttgtgtgtagcttatgtttatgataataacactgtgggtttttaatttctaaagttgaaaaatatgtggtttatgttttgattgtgtgcaagtatacatttgtgtatgcttgtatacattgatcatcaagcaaatttaaatcataatcacttcttctcacgttttaaattttcaggtaattgtggaaacttcggtttcaacacttcaatagtttgtatcatatttcaaaatttaaagaattataccacataattaatggagtaaatttgtttcataattcaacaaaaacaatgaagttacgaggaacctagctagccctctcataacgaacttgattcataaatttaaaattagttcaagaaaagaaattagcaaatgatttgtttcaaacgtatatatttacacgtttttttataacgatatttgcatttcattcaagatttttttttttttttatagtgatcaatttctcttacaaattgtaaaccccaaactaatctaacatgaatatagcaattacatctccttttttggtgcaaaaaataccagttacatcttgttatatatatattattttattttaacatctcatcatcattatcatcttcatcatacatcacatcttgttatatatgtttacattttaaacttacaaaaaaaagttaataaataagagaaactccataaacgttgcgacttgcgactttatttaacatgttatatatttatatatacatgtatataaactgcatacaattaaacctgcatgtgttatgtgttcaaacagaaaaatgaatgccaggatttccaatatttttaaaattttacttttattaggtcttgatatttccgtacaaactcgatcaatctatgtaaattacttgtaaactaaagtcaaatattattggaccactttttggactatatatagctcatgcatatgtttctcatgcaacatcgcttaatccacaaagaaagggaaaacaaaaccgcacgaacaattctatttgaaaaacaaaaagatgaaatatccttttcagtgttttctagctaaaatcattttgctggctttagcatcttcgtttgtctcttgttacgacccatctcctcttcaagactactgtgttgccgtccccgaaaaaaacggaggtaatctctaattattgttttatacgtaaaacaattagtttatacataagaataaccctatattttttatgttatttgatatggaagacgatgttatgatcataaaacttattatataactttcaaattcaagtctacatttcgttctttttttttattttatcgtagttttcgtaaatggagaattctgcaaagatccaaaactagtaacatcagatgatttctttgcttctggccttaacatcccgggaaacaccaacaaacgccttggctcctttgtgaaccccgctaatatccccggtctcaacactcttggggtcggcatcgcccgtattgactttgcccctggtggtctaatcccaccgcacatacatccacgcgcctccgagatcatcttagtcatcaagggaaagctcctagtcggttttgtatcgtcgaacgactacaactacacactcttctccaaaattctttatcccggagatgtgtttgttcatcccatcggattggtacaatttcatgcaaacatagggaagacaaatgcggttgcgattggggcggttgggagccaaaatcctggttatatctcggtaggtgatgcagttttcgggtcgaagcctccgattgacccaaagattttggctaaagcttttgcgttggacatcaatatagtaagatatcttcgaaaagtgttttctcctcaagatgatatcgttaatgattaagaaataagttgatggttatacaacagataaaatatatactaataaagggtaagaaatacagattaaaaatgaatgtgtgggaaataactacgaaagtgtgtgtaatatgtaaatgtaacagtttaatgaataaatatacacaaatcttgtatttaaaatttaggagaacaggacttggggcttataaatacgtttgtgatcctgtttaagaagagtttgaatcagaatcatgaaatgtgaaagattaaacatctcgttttcttgtcacagttcacaacgttttttattactctatcgacttacgatgaatattttaagaaaaataaatatgggccgaataaagacactaatgggcctaattaaatgggcagtatatccaattaagtagtaaacagaaacgtttcgtttcgaatcacacacaaactcacaacgtttctgtgaagctcgccgtcaccgtcgccggaactcatg

SEQ ID NO: 28236 - DNA, 3003 bp, Unknown
  misc_feature (1)..( 3003): 2750-1469P.txt file - cDNA_ID_2994661; gDNA_ID_2213663; Annot_ID_181906
gttggacatcaatatagtaagatatcttcgaaaagtgttttctcctcaagatgatatcgttaatgattaagaaataagttgatggttatacaacagataaaatatatactaataaagggtaagaaatacagattaaaaatgaatgtgtgggaaataactacgaaagtgtgtgtaatatgtaaatgtaacagtttaatgaataaatatacacaaatcttgtatttaaaatttaggagaacaggacttggggcttataaatacgtttgtgatcctgtttaagaagagtttgaatcagaatcatgaaatgtgaaagattaaacatctcgttttcttgtcacagttcacaacgttttttattactctatcgacttacgatgaatattttaagaaaaataaatatgggccgaataaagacactaatgggcctaattaaatgggcagtatatccaattaagtagtaaacagaaacgtttcgtttcgaatcacacacaaactcacaacgtttctgtgaagctcgccgtcaccgtcgccggaactcatggatcgaccaccgtcgttgccacactatcaaaaccctaatccgaacctcttctaccactatcctcctccaaattctaatcctaatttcttcttccgacctcctccacctcctcttcaaaatcctaacaattactccatcgttccgtctccgccgccgattcgcgagctctccggtacactctcttctttaaaatccctgttgtcagaatgtcaaagaaccttagattctctctcgcaaaatctagctttagatcactcttctcttctccagaaggacgaaaatggctgttttgttcgttgcccttttgattcaaatcactttatgccacctgaagctctctttcttcattcacttcgttgcccaaatactcttgacctcattcatcttcttgaatcctttagtagttaccggaacacgctcgagttaccatgtgaactacagttgaacaacggtgatggtgatctctgtatctctttagatgacttggccgattttgggagcaatttcttctaccgagattgtccaggagctgttaaattctctgagctcgatggaaaaaaacgaactttaacacttcctcatgttctatctgtggaatgtagcgattttgtaggttctgatgagaaggtgaaaaagattgtcttggataaatgcttaggagtcttaccgtctgatctttgtgcaatgaagaatgagattgatcaatggagggatttcccaagttcgtattcctctagtgttctttcttcgattgtgggttcaaaagtggttgaaataagtgcattgaggaaatggattctggttaattcgacgagatatggtgttataattgatacattcatgagggatcatatattcttactctttcggttgtgtctcaaatctgctgtgaaagaagcttgtggatttaggatggagtctgatgctactgatgttggtgagcagaagattatgagctgcaagagtagtacatttgagtgtccagtcttcattcaagtcttgtcttggttagcttctcaacttgctgtcttgtatggagaaggaaatgggaagttttttgctttggacatgtttaaacagtgcatagtagaatctgcctctcaggtaatgttgttccggttagaaggaactagatctaaatgctctggagttgtcgaggatttggatgatgcaaggttgagaaataaggatgtgatcatggagaagccctttgagaatagttcaggtggggaatgtggcaaaactttggacagtccacaggtgatatctgtgtcccgtgtttcagcagctgttgcagctttgtatgaaagatccttgcttgaagaaaaaataagggcagttcgatatgcccaaccactaacgagatatcagcggtaggtttgaaatctttcaaaggcgattctgttttgccgacttgatttttagtttatgaaagcatcatttcatgtttgcatttgagtttgattcctcatgatgtctctgtctgtcaatctgtagggcggctgagcttggttttatgacagctaaagctgatgaggaacggaatagacgttgtagctaccgacctattattgatcatgatggtcgtccgagacaacgctcattaaatcaggttaatactcaactaactgttatctaacattaagtaaacaaatattactgtagggaacttttattgaaggtactgaaatacatatattttactgtctataatgtgtaggatatggataaaatgaagacaagggaagagcttttagctgaagagagagattataagcgtcgtcgaatgtcataccgtggaaagaaggtgaaacgaacgcctcgacaggtaagagctgtttccttttcatgaatgacaatcacaaattccagtgttttgaatgtgctacaaaatgctcaatgtttggacaatctcattgaaattttgttggaaaaagtgtagttatatgctgactctactattgtcttgtcgaggcattttgcagattttgtgaaaaaaattggtccttgctaaattcatacttttagttatgaccacccttcagttagcaataaacttatactatcctcttcttccagtgagttttctccttcttttgtcttgtaggtcttacatgatatgatagaagaatatacagaagaaattaagctagcaggaggtattggatgttttgagaaaggaatgccattacaatcccggtctcctataggcaacgaccagaaagaaagtgactttggatacagtataccatcaacagataagcaatggaaaggagagaaccgtgcagatattgaatatccaatcgataatagacaaaattcagataaagtaaagcgacatgatgagtatgattcaggtagctcgcagagacagcagagtcacagatcatataagcacagtgatcgaagagatgacaagctccgtgatcgaagaaaggacaagcacaatgatcgaagagatg

SEQ ID NO: 28237 - DNA, 3003 bp, Unknown
  misc_feature (1)..( 3003): 2750-1469P.txt file - cDNA_ID_2994667; gDNA_ID_2213671; Annot_ID_132800
attgtgttctagaaagagaagagagagcagtagtaccgtggtaggtagctagcgacctcttcgttcgtcagtcatcacaagctttgaaagattttcagctaccactctctcctttatatattcattacacatctcttctttctatatctctcttaatttagtcttttgtcttcgtaattacaatggctccaggaactttgactgagctagccggagagtctaagctcaactctaaatttgtcagggacgaagatgaacggcccaaagtcgcttacaatgtgtttagcgacgaaatcccggtgatctctctcgccggtatcgatgacgtcgatggaaaaagaggagagatctgccgtcagatcgttgaggcttgtgagaattggggcatcttccaagtggtcgatcacggcgtcgatactaacttagtggcggatatgactcgtctcgctcgtgacttctttgctttacctccggaagacaagctccgtttcgacatgtccggtggtaaaaaaggaggattcatcgtctctagtcacctccaggtaaaagccacaccacaatcttctaggttaaatacgtaattatgttttaatcttgccgttaaagacataataattatactataaatacagggagaggctgtgcaagattggagagagattgtaacgtatttctcgtacccggtgagaaacagagactactcacggtggccagataagccggaaggttgggtgaaagtgacggaggagtatagtgagaggcttatgagtttggcttgtaagcttcttgaggttttgtctgaagctatgggtcttgagaaagagtctcttaccaatgcatgcgtcgatatggaccaaaagattgttgttaattattacccaaaatgccctcagcctgatctcaccctcggactcaagcgtcacactgaccctggaaccattaccttgctgctacaagaccaagtcggtggattacaagccacacgtgacaatggcaagacatggattacggttcagcctgttgaaggagcgtttgtcgtcaatctcggcgaccacggccatgttagtactctatccatttattggcttttttgtttctctgtttttggttttgacttggtcaatcttgatttgtcttgatgaagtttttgagcaatgggaggttcaagaatgctgatcatcaggccgtggtgaactctaactcgagcagattatccatagccacgttccagaaccccgcgccggatgccacagtgtatccactgaaagtaagagaaggagagaaggcaatattggaggagccaatcacgtttgccgagatgtataagagaaagatgggaagagatttggagcttgctcgcctcaagaagctggctaaagaggagcgtgaccacaaagaagttgacaagcctgtcgaccaaatcttcgcttagaatctttgtgttcttgcttacttgttgttgcgttggttctgttttgtacgttggtactgaaaattatgctaggctcggtgtgttttgtgtttatttatgttctttcgaatcataaagaaataatgataattgatgcacttgtctatgacaaaaacatcatactccacctgtatttgacgcgttgggtttatgtcaaaaagcattaatacttcaactcctctctattcagtggcatacatacattgttggtaactgtcattgtctaaacactttgtactactaatcaattttttttgttcttcctacttctcctttatgatttcttcgattgttattcttttatgttgaagcgttaaaccgaaacacataccttggcagtttagtgacgaattttagcaccaagaaaatcgacacagagatcgggtagagatcacaaatggaaatcaaccaccgttcaagtgtcaatggtcacaaagttatacattatgtcttctcttcaatcattcttttatagacaaaggaaaagaaaccataaagaaaaacatgattttggtgtctattgagaaataacttcctcaaaactaaaccagtttggtatcctgccaaatcataagcgcaaaccaaccataaaccaacataatgtacatattaagtttgctcagagtacagggtttcttgatgagatacacttgtcaaaccaccgtatacaccatctggcaagagaggatcacataaggtgtcataatgaagctccgaaatctgcaggcattctaacataatggatcgacaagcaaatgcgaaacaagatcaccaccattgaaagacaaaagggtgggcgatatgaagctagctttcaaagctgactccaaagtcagatttaattctctaagttttcattataatctctgctcttgatttatttttctatagaacacacgatgtactagttgtaaaaacgttattttttttttttgaatctaatttagtattacttattaaaaaaaaaaaaaagattcacaccggttcatctatatgatgaattgtaatggacttgtattttttccaagcacttcactctatttcgtggaatcaaaacttttgcaacaacggcttatgctagtctcacatgatgcgttttacacactctagatagattgacctcgcattagatcggaattctagtgatgccctctactaacatataattgatatcaatcaccatccataatcttatttggttttagatctcttgcaacactagctctttcttcctatcacaataggcttttcatttgggcatttgcaacttttttttatatttttcatgattatgaaaaccttaatagagtagaaaaggtggtaaatagatatttatgcgtgtggattcaaattgcgtattgcattaacgatatcgacaattttattggttaaaccggcgggagtacacttttatttatagtctatttttacgccacgtcatctctaccttgaaaaattgaaattcatcatttttcttcctccttaagattttttttttttcttttctaattaacgacaacacgacgaagatg

SEQ ID NO: 28238 - DNA, 3003 bp, Unknown
  misc_feature (1)..( 3003): 2750-1469P.txt file - cDNA_ID_2994667; gDNA_ID_2213671; Annot_ID_182313
gttacttataaataactaattactctgcagatgctttaaggctaaagaaactacaagaacctaaaaaagaagatgggaaagacaaacatacttgatgatgaaaagggaactttgaagtcagaatcagagtcgttgattgcagagatagcctgtgatctagtgacccttttggctgatgatggagtctccatttgaatttcgagttcttgtaaacaacaacgaaaactgaactgaaagagaatttgggaaaaaacaaagtgtgaatgaagctcgtttaggtcgcagtcttataacgttttataactaaactagccgttgtggctcctctcttgcaaagtggaagatgagccgttgccgttaccgttccgttagtaaacccacgaattatttttcttccaaaactagccgttggatccgttctctcatggaaaaagtagacgtctttgttctgtatgggcctttgactaactaaatggcccagcccgttcataacattaatcatttaaaaaatcacattgatggtataacactaattttttttttcacaggtgtataaccaactaatataaatatgcacattcacttaaaattaactaatatcataaagagtattatggcgtctgttttattgtttatccataactacatcaatcaaatccaagttgatatactagttagaacctaatactttacaaatccgatcattaatttatcttgtctgcttaagattttttttttgtgaataaggtttaattatctcatcaatacgatttagtaaaaagtctgtgcaaaaattaatgacgattgggatttttgtaacgcaagcccgtaccagaacatgtctccgccacgtgatttctccacagaccacaagcatttttaagacgtggctttctatcaaccgttaaaaacgtaaatcatattaaccatgtgtctactacctacggtgtaaacgaaactgtataacgtccctatcatataatagtaatgtgatacgttggaatgtagccaaaaagcataaaaaataaatagataattaagtttataatgttttcctacaaaatattattataccgtatgtattttttattttattttctgaagttaaaaacagatgtagttagttgagtaaattgtgttctagaaagagaagagagagcagtagtaccgtggtaggtagctagcgacctcttcgttcgtcagtcatcacaagctttgaaagattttcagctaccactctctcctttatatattcattacacatctcttctttctatatctctcttaatttagtcttttgtcttcgtaattacaatggctccaggaactttgactgagctagccggagagtctaagctcaactctaaatttgtcagggacgaagatgaacggcccaaagtcgcttacaatgtgtttagcgacgaaatcccggtgatctctctcgccggtatcgatgacgtcgatggaaaaagaggagagatctgccgtcagatcgttgaggcttgtgagaattggggcatcttccaagtggtcgatcacggcgtcgatactaacttagtggcggatatgactcgtctcgctcgtgacttctttgctttacctccggaagacaagctccgtttcgacatgtccggtggtaaaaaaggaggattcatcgtctctagtcacctccaggtaaaagccacaccacaatcttctaggttaaatacgtaattatgttttaatcttgccgttaaagacataataattatactataaatacagggagaggctgtgcaagattggagagagattgtaacgtatttctcgtacccggtgagaaacagagactactcacggtggccagataagccggaaggttgggtgaaagtgacggaggagtatagtgagaggcttatgagtttggcttgtaagcttcttgaggttttgtctgaagctatgggtcttgagaaagagtctcttaccaatgcatgcgtcgatatggaccaaaagattgttgttaattattacccaaaatgccctcagcctgatctcaccctcggactcaagcgtcacactgaccctggaaccattaccttgctgctacaagaccaagtcggtggattacaagccacacgtgacaatggcaagacatggattacggttcagcctgttgaaggagcgtttgtcgtcaatctcggcgaccacggccatgttagtactctatccatttattggcttttttgtttctctgtttttggttttgacttggtcaatcttgatttgtcttgatgaagtttttgagcaatgggaggttcaagaatgctgatcatcaggccgtggtgaactctaactcgagcagattatccatagccacgttccagaaccccgcgccggatgccacagtgtatccactgaaagtaagagaaggagagaaggcaatattggaggagccaatcacgtttgccgagatgtataagagaaagatgggaagagatttggagcttgctcgcctcaagaagctggctaaagaggagcgtgaccacaaagaagttgacaagcctgtcgaccaaatcttcgcttagaatctttgtgttcttgcttacttgttgttgcgttggttctgttttgtacgttggtactgaaaattatgctaggctcggtgtgttttgtgtttatttatgttctttcgaatcataaagaaataatgataattgatgcacttgtctatgacaaaaacatcatactccacctgtatttgacgcgttgggtttatgtcaaaaagcattaatacttcaactcctctctattcagtggcatacatacattgttggtaactgtcattgtctaaacactttgtactactaatcaattttttttgttcttcctacttctcctttatgatttcttcgattgttattcttttatgttgaagcgttaaaccgaaacacataccttggcagtttagtgacgaattttagcaccaagaaaatcgacacagagatcgggtagagatcacaaatg

SEQ ID NO: 28239 - DNA, 3000 bp, Unknown; identical to SEQ ID NO: 10859
  misc_feature (1)..( 3000): 2750-1469P.txt file - cDNA_ID_2994671; gDNA_ID_2214456; Annot_ID_132942

SEQ ID NO: 28240 - DNA, 3000 bp, Unknown
  misc_feature (1)..( 3000): 2750-1469P.txt file - cDNA_ID_2994679; gDNA_ID_2214460; Annot_ID_132970
gattccatggaggcactaataatattgcaagcaggtaaaatctaatgaactggctcatatcttctaggtttcttggattgcaagttaggggcaaagtactaatcttggattataagttagggcaaaaactaaagtatatgttgttgttattacagcaatggagcaaatgaaagagaaattttcgaaattgcttcttggagaagatatgtcaggaggaggaaaaggtgtttcatcggctttggctttatctaacgccattaccaatctcgcaggtaagatcttttcccaaatctttcagttccatggaaattttcaattttatcaccaatttgatgttaagttctgtaatttttttgttgttgcagcgtctgcgtttggagaacaacggcgtttagagccaatggcggtggatagaaaaacgcgttggaggagagaaattggatggcttatctctgtggctgattatatagttgaattcgctccaacacaacaaacaaacaaagatggtacttcaatggaagtcatgtcaacaagacaaagaacagatcttctctgtaacatccctgcacttaagaaactcgatgctatgcttctcgtaagaagaacaaacaacaacagcacaaaatatactaatcaaaggctgttaaataattaatctcacatttataatcattctcttgcaggattgtcttgataaattcaaggatcaggatgagttttattatgttaaaaaagattctcctgattcttgcgagacaaggaacgatgagaaatggtggttaccggcagtaaaagtcccacctaacggcctctcagagatatcaagaaggtttctacagagccagaaggaatgtgtgaatcaagtccttaaagctgcaatggcgataaacgctcaagttctgtctgaaatggagattcctgaaagctaccttgagtcacttcctaaggttatttaataaacacataaaaacattcatcaagaatctgttattgatctagtccttatcgatgttttcgtgtgttgttgagaacagaatgggagagctagcttgggagatgtgatatacagaatgataacagtagagatgtttgatgcagatcaattcctaattgaaatggatttatcatctgagcacaagattcttgatctaaagaacagaatcgaagcatcgattgtgatatggaagaggaaaatggtgcagaaggacacaaagtctccttggggatcaacagtgagtattgagaaaagagaacagtttgaagaaagagctgaaaccatcttgctactattaaaacaagggtttcccggaatctcacagtcctcgctcgatatcagcaagattcaattcaacagagtaatttaaaactcttaacttccaaatacattttgattgtgttttctctatggtcatgagaaaatctcattattggataattgttgttgcaggatgtaggacttgcgatattggagagttattcaagagtgcttgagagtttagctcacaccgtgatgtcgagaatagaagacgtgctttacgctgatcagcttactcaagaacctacaaataatgcaccttctaagaacagatatagcttgaaggagaatgagaaactaagagaggaaagactaagtttcacagaggatatggcttcaggaacactttctgatgttatgcaatggggtaacaaaaacaatgaaatgaagaaagaaagctttttcggagatagagagaaaccgttgttgtcgaaagtcacaggtataatgactaacaacaagaagagttcttatcttgataatcttggagctatgaggagtccaaccgcaagatactcctgagagaaaccggtttcttttttccgttcttgttaaattagggcttcttactgcattttcaatctgcttaaagattccacaaaatgcaccattgtgtgttgtagcagacttgaaatgcaatttcattgattcatcataactgattttcagaatcactagcttacaaagcaattaacacaacacagtacaatatacataaatagggttcatagaattggggagaaagtttctgactttttgaaagattttagaaagctaatttaaagcttgccgcgaggaccgagcttaggtggctcttgaggacctctcttaatcggaagaacatcgccggtagagttcgcactaacatatgtaagcaaagagcctcctccaagaatcaaaaatttgagaagcaaacctctctttgtgaaaggagcagcaaatgtctcaaagaacttgctctgcaagcaacataatcacaaagtcttagaatttgaagaagcatatagatctaaagatttaagagtgtacaaaaacctgaagtgggttataaggagaaggagcatcagatccatacacatcccattgtcctgttgtgttacccaaatcttctaaatcaaagtatacacttttgtctccatacttagccaccacagcaccagctctacacaaacaatcaaaagtaacatcctttctttaataccaatcctcatcaatgtcaatccaagattccaaatttcaaagctttaaactttacctggtggatttggttttgaagctttggcgagaaggtttgatgaagagcttagctccggcaagagagctacctccaagtcctttcacggcggcagaaggttgtacggcggcgatggttgcaaaagacgccatgttaatttctctctttgttgttgtttgtttgttgccaaagtaagtgagtggattgatgtaatttgtatagtggagaatcttcttcactcatttgatagatcttgttctgccacgtggcgaattgggttgtcatctttgagatttgatatgccacttaggaaatgccacgtggattataaaaagataaggctatctctaatccataaccaaaaatttcttcgtctctgtctccaaaatcgaatcaaaatctctaaagtttcaatttttttgttctgttctttttatttttttaaagaatg

SEQ ID NO: 28241 - DNA, 3000 bp, Unknown; identical to SEQ ID NO: 10894
  misc_feature (1)..( 3000): 2750-1469P.txt file - cDNA_ID_2994682; gDNA_ID_2214461; Annot_ID_132978

SEQ ID NO: 28242 - DNA, 3000 bp, Unknown; identical to SEQ ID NO: 10896
  misc_feature (1)..( 3000): 2750-1469P.txt file - cDNA_ID_2994682; gDNA_ID_2214461; Annot_ID_182776

SEQ ID NO: 28243 - DNA, 3003 bp, Unknown
  misc_feature (1)..( 3003): 2750-1469P.txt file - cDNA_ID_2994689; gDNA_ID_2214477; Annot_ID_133145
catcggtagttgaggaaacggaaccatctctgaatcgctctccattttctttgcttgtgatgatcttcagaaatgatacaatgattgatgacgatgaagaacaagtgtatctagagccgggtcgggtacgggtcaaagatccatattagtgattccactaccacacgaataaatgttgcattttttgctttgggtttggtttggatttagttaaatagtagccaagttcctatctttgtggtgtttgtttctgcaaagttaagttttttgttctatactaatcagtcatctttggtcttcaaatgatttgataccttatctgtggtcggctatattagctcgagcagcaatctgaattgtagaaaccattgaaactctggcaaaacttgctgtttgctgcccgtataaccgtatttgtcgaacataatatcaatgccctcttggattaaggagtaacctgttttggtaaggaagctggagattatagaaaacattcatatgccataaagaagttcaattttgcaggagtttacaattgtaatcagctacttatcataagtggtaaaaccacacctaggcaccttgacaagcaaagaagctctcccaattagagtgatccaataccaacctagccacaacacctactgcttgaataaagccactgaggtacaagtttgttttagatttaactcaaagagagaatgttaaaagtagagaaaaacatatggatatttccttttcatagatgcataccgatgtcggacacaattctgagtcaagcaaatctaacaggaccaggaaaaaaactcatccttcggaataagatatacaaacctagataaagaaattaagaaacagcaagaatatggaaataggtacactgtaccacaatgttagttccagcagcaaagcaattattactattgtaacatagtggataatggaacctagctcatctgtctggctatctgcttaaacactaacaagcccactcatacgggcacaaccttctacttcttccctatgttctgaaaagtgaaaccccttaggtttgctactgggtgctgctttgccaaaagaccaagctaactataacaggagaagaaattctaaatgctagtatctccctaatccctacccaaaaacatttgtttattgtctctcatcaatcaccataaatcatgatagatactaacaccaataatcactcactcatgcatcctagcatctttaccctggccacctttcattctcttcatgccacaagatgtttacacattcaagcaaaaccacatgaaaaatccttaagaacagaagaaaacggaaagatatgttccggtgttgcccctgtatttcctacaaacatctatactaatcaaactaaacccatcattcacacataccgtgatctaaaaacctgaatttcaacatgtcacacagcaatcaacaaaagtttgaatagagcaagaaagcaccttgaggcttgaagtgatcagacaaactctctttccagaaaacacaatactttcttcattgaattaataatttacacaaaccaagcatcattccaacaattcccattgcatccatcataaacgcaagaacaaatcttttccttttgtgccctaaatttagaatccagattccaatttccaacctcatttcttagccttagagaatctaagacaccgatatttctcaccactcacagtaatttccagagcaccatcttgattatcctgattcgacgcagtccccataagaacactcttctccttctccagattctctctctccatcttcaacctcgcttcctgtctagcgatctccgtctgtcaaaatcagaacaaaatcagtatccccacacagatttctccggattctccaaaagccctaaaaatcaaaatttgaaaaaaaaacgaacctcacggcgagagagctcagctttccaggcagcttctcgctcagcgacttcacgctcacgctcttctatataactctgcatctctctctccttcatgatccgatcttgtatatcagcgtcaagtgcttgcttaagctcctccacaaacttatccaccactaatttaattctcagcgacatcgtcttcgaagcaaattctaactatatacaaaatctcctccttcctcacactaaacgctgctacacataaatacaatctcctccttcttctggttttccgtcttttacttacggcggcgctttaccgacggcgagattccgatcttttctcgttgaagcttgcgtgagaactgaggaagaaagggacagagacattcacgaccttttgtttttttttccgctttctaatcttcttcagagtgggaaaaataaataaaagcgggctcttattgggcctatattgggcctgtacttaacataagtcacacgtgtggcagcggatttttggattacacatgttaaaaacttaaaattagggctttgtgtttcgcttcttctcaaaccctagaagatataattgagactggcttgcttagccgcggagaactcagaactcattcgctgcaaacatggttcgtaatcttcgtctctttctctaagtctcgtattcacaagcgtattgcgtcatgtgtttgttttggttttggatagtttgtctccatctgtgaattcattttgtgcgggattataaaatctctctttgtaatctagatagcatttccatgtaattatgggtaattgttaatgtttataaagtgaattcctttgtgcgatctgtaaaatgggttagggattgatattgagatctcaaaagataggactcaattagtcagatatgaaacctccctggcgttattctcttgttctgtgacttgaggtcttgagtgatgagacttttagtgattgagctattataaacatttattgtgttttgatttttatttttgttcgatattcttttgcaggcaagaggtttgaagaagcatttgaagaggctcaatgctcctaagcattggatg

SEQ ID NO: 28244 - DNA, 3003 bp, Unknown
  misc_feature (1)..( 3003): 2750-1469P.txt file - cDNA_ID_2994689; gDNA_ID_2214477; Annot_ID_183169
tttaatgggattttctggttaaaaaacaggattgcaactgttgcctataagcttccagaaactactcttgatgtaaataagtcaaaaaccaagtaaacccaggaaagtcaacacaaacaacaaaccaacgacattagtcgaatttagctgaaagacgaaaagtttcctgagctttttgatatttgaggctaagagaagtagttttttggtaacaaaatcaaagcttggtctgacccatgaacatgaacagagtctgaatctggtcaaagtaaatagaaactaaataaggtcggaagagagaagtagtgagaagagaatgaacttgaaagaaggaatggaattggcgaagacgttgatccacgagatttcatttggagtggctttcttgggatcatcagaaggaaatctgtaaggaattgtgcaagctctgtagttgttttctattggcatcggtagttgaggaaacggaaccatctctgaatcgctctccattttctttgcttgtgatgatcttcagaaatgatacaatgattgatgacgatgaagaacaagtgtatctagagccgggtcgggtacgggtcaaagatccatattagtgattccactaccacacgaataaatgttgcattttttgctttgggtttggtttggatttagttaaatagtagccaagttcctatctttgtggtgtttgtttctgcaaagttaagttttttgttctatactaatcagtcatctttggtcttcaaatgatttgataccttatctgtggtcggctatattagctcgagcagcaatctgaattgtagaaaccattgaaactctggcaaaacttgctgtttgctgcccgtataaccgtatttgtcgaacataatatcaatgccctcttggattaaggagtaacctgttttggtaaggaagctggagattatagaaaacattcatatgccataaagaagttcaattttgcaggagtttacaattgtaatcagctacttatcataagtggtaaaaccacacctaggcaccttgacaagcaaagaagctctcccaattagagtgatccaataccaacctagccacaacacctactgcttgaataaagccactgaggtacaagtttgttttagatttaactcaaagagagaatgttaaaagtagagaaaaacatatggatatttccttttcatagatgcataccgatgtcggacacaattctgagtcaagcaaatctaacaggaccaggaaaaaaactcatccttcggaataagatatacaaacctagataaagaaattaagaaacagcaagaatatggaaataggtacactgtaccacaatgttagttccagcagcaaagcaattattactattgtaacatagtggataatggaacctagctcatctgtctggctatctgcttaaacactaacaagcccactcatacgggcacaaccttctacttcttccctatgttctgaaaagtgaaaccccttaggtttgctactgggtgctgctttgccaaaagaccaagctaactataacaggagaagaaattctaaatgctagtatctccctaatccctacccaaaaacatttgtttattgtctctcatcaatcaccataaatcatgatagatactaacaccaataatcactcactcatgcatcctagcatctttaccctggccacctttcattctcttcatgccacaagatgtttacacattcaagcaaaaccacatgaaaaatccttaagaacagaagaaaacggaaagatatgttccggtgttgcccctgtatttcctacaaacatctatactaatcaaactaaacccatcattcacacataccgtgatctaaaaacctgaatttcaacatgtcacacagcaatcaacaaaagtttgaatagagcaagaaagcaccttgaggcttgaagtgatcagacaaactctctttccagaaaacacaatactttcttcattgaattaataatttacacaaaccaagcatcattccaacaattcccattgcatccatcataaacgcaagaacaaatcttttccttttgtgccctaaatttagaatccagattccaatttccaacctcatttcttagccttagagaatctaagacaccgatatttctcaccactcacagtaatttccagagcaccatcttgattatcctgattcgacgcagtccccataagaacactcttctccttctccagattctctctctccatcttcaacctcgcttcctgtctagcgatctccgtctgtcaaaatcagaacaaaatcagtatccccacacagatttctccggattctccaaaagccctaaaaatcaaaatttgaaaaaaaaacgaacctcacggcgagagagctcagctttccaggcagcttctcgctcagcgacttcacgctcacgctcttctatataactctgcatctctctctccttcatgatccgatcttgtatatcagcgtcaagtgcttgcttaagctcctccacaaacttatccaccactaatttaattctcagcgacatcgtcttcgaagcaaattctaactatatacaaaatctcctccttcctcacactaaacgctgctacacataaatacaatctcctccttcttctggttttccgtcttttacttacggcggcgctttaccgacggcgagattccgatcttttctcgttgaagcttgcgtgagaactgaggaagaaagggacagagacattcacgaccttttgtttttttttccgctttctaatcttcttcagagtgggaaaaataaataaaagcgggctcttattgggcctatattgggcctgtacttaacataagtcacacgtgtggcagcggatttttggattacacatgttaaaaacttaaaattagggctttgtgtttcgcttcttctcaaaccctagaagatataattgagactggcttgcttagccgcggagaactcagaactcattcgctgcaaacatg

SEQ ID NO: 28245 - DNA, 3003 bp, Unknown
  misc_feature (1)..( 3003): 2750-1469P.txt file - cDNA_ID_2994697; gDNA_ID_2214475; Annot_ID_133131
catagatatcagtatatcaaaaaactgaaaactcttccgtcttttgagaataaaagagtccaacttttgcattcgacatttgactataacagtatcttttcgagaagacgcaaagtcgttacgtgcgtttatatttcgtttattcatgtcccaatactacctcttaggaaataagagactattaagactttcttgcttcccaatacacccccactaatatcaaataacctagtttaatttcttccgtttctcaacacttttaagaaaatacttaacaattgacataaaagaaaaaacgtacagaggaatttgaatggacaaacaaaggtgaaacaactagaatggacaaacaaaggtgaaacaactagaatttaacaatagacaaaaaaaaaagaaaaggatttggttaagcaatattaaggtatgaactaacctaaaccataaaatagtaaaaaaggaggattaaggttactttgtttaggagcagcacgttgataaccaaaaagccataattatcgcttccttcagcgcaggatccttctctctcctatctctctgtatatatatgtggaccttcacgtaatagcttcgtacttcaaacctcaaaagcaatttagctctctgtcttcaagatgacttctcttttcttctttgttctccttttctcgtctcttctcataagcaatggcgatgccaacccaaattacaaagaagctctctccaagtcattgctcttcttccaaggtcagcgatctggtcctcttcctagaggccaacaaatttcctggagggctagctctggcctttccgatggctctgctgctcatgtacacaccttaaaccatatttaactttgatacagaatatatctttgttagtaacattgatatatgaattgcaggtggacttaaccggcgggtactatgacgcaggagacaacgtcaagttcaatttaccaatggcgtttaccaccacaatgctctcatggagcgcactggaatacggtaaacggatgggtcctgagctggaaaatgcacgtgtgaacatccgttgggccacagattatctgctgaaatgtgccagagccacgccggggaagctttatgtcggtgtaggagatcctaatgttgatcacaaatgctgggaacggcctgaagacatggacacaccacgtacagtttactctgtatccgcttccaatcctggttctgatgtcgcagctgaaacagcagcagctctagctgcagcttctatggttttcagaaaagttgattccaagtattcacgtttgctgctcgcaacagctaaggatgtgatgcagtttgccattcagtaccagggagcttacagtgattccctttcctcatctgtctgtcctttctactgctcctactctggttacaaggtctgctttcacatgaaactaaaccactcttaccactacatcagatcctcatttttaaaaatgtgaatttatgaacacaggacgagctaatgtggggtgcgtcatggctgctaagagcaacgaataacccgtattacgcaaacttcataaaatctttaggaggtggagatcagcctgacatcttcagctgggacaataaatatgctggtgcctatgttcttctctcacgggtttgtctctctgctaataaaaactcattgagaacatagcttttagcatcacactatctaacttttacattttggcagagagcattacttaacaaagacagcaactttgaacaatataagcaagcagctgagaatttcatctgcaaaatccttccagattctccttcttcctctacccaatacactcaaggtaacctacttcacgatatagaacacaaattgctaaacaacaacctcttctaatcatatgtttaccaattacaggaggattaatgtacaagctacctcaaagcaatcttcagtacgtaacctccataacattcttgctcacaacttacgccaaatacatgaaagccacaaaacacacattcaattgcggaagctccgttatcgtccccaacgccttgataagcctatcgaagcgacaagttgattacatactcggagataacccaatcaaaatgtcatacatggttggattctcttccaatttccctaagagaatccaccacagagcatcttctcttccttcacacgcacttcgttctcaatcgttaggctgcaatggtggattccaatcgttctacactcaaaaccctaaccctaacattctcaccggagcaatcgtaggaggtccgaatcaaaacgatgggtatccagatcagagagacgattatagtcacgcggaaccggcgacttatataaacgccgccttcgtcggacctttggcgtacttcgccgccggccgttcgacttgaaattgaattcgccaccgccacattctccgatttgtagttccattgttagttaaagatccgttggtccaagcctaacgtgaaaatcagaagggacaaagttatttaaatgtaaaactcttaatgggctaagacccaatactaaaggacccgacggaaatatttctcgtggtcttatttaactctaaccatcatcattacgcgtttcaaatattcaaccaaggccgttaattaagcaccacggaaatatttcatgtttggttatagcaccatgaaagaacactagaatatttacttgtcaattatgtcatgaaagaacactagaatatttacttgtcaattatgtcatcagtacaaagattaaacagctgaaagatatgcattaagtaggaaatgtaaagacaaaatatcgttttctgctaaaaggaattacacatatgccaaacaatgggccgagagagaattgaaactaatgggccgagagatattttttctcttagtgggcttttaggagaaactgtagcaaaaacaacagatttcgaacaaaattttgatgtagatcatagctaaaaaataatctggagtgagcgacaagcaagcggcggccgtcatg

SEQ ID NO: 28246 - DNA, 3003 bp, Unknown
  misc_feature (1)..( 3003): 2750-1469P.txt file - cDNA_ID_2994697; gDNA_ID_2213625; Annot_ID_195822
cgcatgcattaaccttgactaaagtaagaaaaaaactaaaaataatgattttaattctaaactgcatctattaattagtcctgatgtgcaacaagccaagatgtattaaacaccaccatatacgtttattacaactcatacaatagaaaagtacaacacaaacgagtcttttggaggacacacctgaaaaattcaatacaaatatgaacaagacgttacacaatgcttcacaaaggcatagagactacaagaaatgggtttagcgaacacttggggtgactatgactttttttttttttgggaccaaacttttcagcgaaccattcttgcttgtgtgaagaaaagatgtatccgatcaccaaaccacagaaaacaccaggtccataagctattgcagctgctacacagttaaacattttttcctcctcctctaactactagatccttgggttgttgtgatgtaggattcaggacaagggttaattctccacagtctttttcgagaccatagagtttagggtatatctattaaagcttagccaatttctattcctaaacgaattatatcatcgttctcaacagatggctagattatgtccatctgaaaatttgatttgacaaatcaaaagacttggaaattaaaactaccttttaactccggcaacatacacagatttcttcataacaagctgtgggataagataattgtcgttatatatcgtaattgactcaaacactagaccttggggcctgtgtggttggtttccaaattgattgcctgtgaaggcccattaatacgaatagcctacatatatgtgctaatttaaatccctaatacagtacatagtcgtgcatctatatataaatatataataaatctacatttattttggtgtagtttttattataaagaaagagtcaaatggttactagaggatccaagtccaactttagcaatcaaatcttcggctaaaaaaatttcctccaaaattttcctcgcatagtcgtggatggtatccactgtttgtcctcctcaacaaaatgtaaaagccattcagaagtacaaacatgaaagaataaaaagaaaacacctttttgacaaaaaggatacaaaaaaatcatttgccaacaaaacaaccgaaaattcttcgagtagtatcagtgggtagggccaccaggagtaaaaaaatcattaagcatgtgagtaaaaaacaagagataaactgttgcttaattctgaaatctctcttgatctatttattattctcatgcaaaccattaatctttacgggagaaaaatattagtatgatattttgagtcctgattgcgactagtgatatcgaatgattacaattactaataagtattacctgaagctttcatcacgcgtctgcttaaacattgataaatacattatacccaagttaatcattctcttaactcatataatgtcagaagatcaatgacatcgagcagacacgttgtcgcctttttactcgcttttgttattacacaagctaaacaaaaagaatgtcccatgaaagaaaaagcaaataaagagagtaatactataataaacacatgggataagaaagtggattaaggcatcaatttcgtctccattacactaaacacacacttttgattacgttccaagactcggcgccgttatcttggcgccattcacgcttcccttttatcttttgtctcctctttttaaattcaaaatcacttaatccccctaacctaattcaactatgcactccctaactatacccatatatgaacatattcttactacggtagatccattttaaccccgaaactgcccatttcaaaattttaaacagtctatgtatatcgtaactaggaaatatattaaaaacaaacttaggtttgcataaaaggaaaacgttacttgtttagcaagtattagatatcttagaaataaaatcgtttagttaggaatcatttccaattcagtaggtgtgattgaatgtcgattttatatggttcagttgatttatgagacaaatattaatggggtcataatttgtagcatttttataggaaacagtttaaatatcaaatattggtttgttaagttaatatacgttggatatttgctttgcattaaaatatgaaaccatttactttacaagtatattgtatatacacgataaattgaaaaaatcaatgattaaatgtcgtttggattttatgtaggaaaaatctcaaaaagggaacgatctgattcgattgcaaaaaaaaatcggatcaaaatctcatataaggaaaaatacgaatcaaagacttccgcttcaaatttttttttttgaaatccatccgattaatttttttaaaatacatagatatcagtatatcaaaaaactgaaaactcttccgtcttttgagaataaaagagtccaacttttgcattcgacatttgactataacagtatcttttcgagaagacgcaaagtcgttacgtgcgtttatatttcgtttattcatgtcccaatactacctcttaggaaataagagactattaagactttcttgcttcccaatacacccccactaatatcaaataacctagtttaatttcttccgtttctcaacacttttaagaaaatacttaacaattgacataaaagaaaaaacgtacagaggaatttgaatggacaaacaaaggtgaaacaactagaatggacaaacaaaggtgaaacaactagaatttaacaatagacaaaaaaaaaagaaaaggatttggttaagcaatattaaggtatgaactaacctaaaccataaaatagtaaaaaaggaggattaaggttactttgtttaggagcagcacgttgataaccaaaaagccataattatcgcttccttcagcgcaggatccttctctctcctatctctctgtatatatatgtggaccttcacgtaatagcttcgtacttcaaacctcaaaagcaatttagctctctgtcttcaagatg

SEQ ID NO: 28247 - DNA, 3003 bp, Unknown; identical to SEQ ID NO: 28245
  misc_feature (1)..( 3003): 2750-1469P.txt file - cDNA_ID_2994697; gDNA_ID_2214475; Annot_ID_183092

SEQ ID NO: 28248 - DNA, 3003 bp, Unknown; identical to SEQ ID NO: 28246
  misc_feature (1)..( 3003): 2750-1469P.txt file - cDNA_ID_2994701; gDNA_ID_2214475; Annot_ID_133130

SEQ ID NO: 28249 - DNA, 3003 bp, Unknown; identical to SEQ ID NO: 28246
  misc_feature (1)..( 3003): 2750-1469P.txt file - cDNA_ID_2994701; gDNA_ID_2214475; Annot_ID_183091

SEQ ID NO: 28250 - DNA, 3000 bp, Unknown
  misc_feature (1)..( 3000): 2750-1469P.txt file - cDNA_ID_2994712; gDNA_ID_2214475; Annot_ID_133111
cgtaacttaatatcttttacaaaaaaaaaacttaatatacatacatatttaatatcttatacaaataagttagtgcgtttctatcacattttgataagagagaattcacaaaagaattttttttagtgttttagtgccaccgaaaaattacagcctcagtttcatgtaggtgggttttgagacttcgtgtttttagaagatctcatcccttaatatgatatcatagagacattttttgtatgctcattcttagtctgttccacattttacagttaaaacatgaaaacatattattgagaaatcaataggcaaatactaattggagctcgtctgatgatgaggaccaacattctaagcgaccacgatcaatatgcaaacactaattcaagggatatctgtataacccttttaagaaaaggcttttaagctagagtccagttcacttgattgggctcaagtggtgcctggcccgggatggagttcgtaattagttttctttctggtgtttactattttttttttttttaggagttcttatattttctttttccctcacaactctcttaaatgagtttacacataatctttctttctttttttttttttttttcacatagtctttctatatccttttctacttcatctttatctttatttttatttttttctctttatcaatagtcttttgacttttgttatcaacaccttttatcaacttttaattggtctttagttcttaagtcgtatgactctaatttataaaaacttggctcgtgggctgctaatttttacaatttgcatttttttaggaaaaaaatgatgatcggtctttttttgcatatatatttatagaatttgctttcggctctttttcgttggttgatagagtaagggaatcaatgtctcatacgtttctaatttttttatgacagctttacaatatagtttaatgtgcatgttatatataacgtaatcaaagttgctgttaaaaaagaaaagaatttatagatgtaatcaaagaccatgatagttcgatcattgtacattttgcatgcctggagccattatccttgatcattacgtaccaaaacattcggagacatcccatagatttaaaacgatacaaaaaatggtaatttcttttccactttccacgaaactcttagcttaactccttgtttttataaatcgttcaaaatacgttcatcataaacatagagaaaaaaggacgtgatgcgagttttatgaaactagtcccattaaatgtctgcccacacccctaatttctgcaaacctaaataagtttatagtgttacttagtcatctgttcctagagtaatcatgtggaggtaaatgatttataaccatatattaattgttttaacccaaaaaaatagagagttacatatactatttttccagcgtgtatccacatcatatgcatcaatataatttttttaatcaaattattaatgttgtccgaagtattagaaattatgcacaaacattaaatgaattgaaagaaaataacttaagtttttttttgtttaaaaatgagataacacaaaatgtttctaaaatcggatagaatgcgaacaataactgtttcggaagtccatggtaatctatacatgttttgactacaatatatgttataaatatacgtatttttaatatatatatatatatatatatatacgtatttttagtatgtatatgtatatatatatatatatatatataatttgtgaaatgtcttgttatatagaaaacaaacttattttcgtccaaaattattttttcacagcagttcatacacatttatgggcatgtactagtttttccgactataagcaaaatttatgtcgatttttctggatgtaacgtatatcttaggaaagagtaagcatatgaacgtggctgaaacaaactaaaagtgtctatctacacatacagatgctagcctctatgaaacacacttgtttggtcattggtggtggctactctcacgtgctcgctttgcattagtttagtttttttcaaacttcaaaagtcttttatcctttttggttatttcaaatgtccccaccatttctgcaaagtcacaatcttcataaaccatttacgatcctctactgactcagcgaatatgccaacacaagggcgcgtgattgtcttgagattcttccactgctatgcgagtttcttcaaaaattcctcatcgatcgacgcacttacctttttttttaaatggatcaaattgtttttgcatcttagaccaataaaaccatattgtatatattacgtaaacataatcactagtccatgatactatttatgaaaggtcataaagaatcctctctaagcatggaacatatgcaattcgaattcgggttcagaagcactaaaacaatactctttttaaccggttaagtatttgaaatagtgcacacaaaaataactaaaaagtttcgtgttactctaattagtagtagtactatatatataaccattgtcaatatagtctaactgatataataggtggaccactgtcacgaacttgaatgccagcgggaaaaaaaaatatactcgatcgcacgtatttatttgctttaatgtttgatccgaaaaagaatctctttggtaagaaaaaaagaagcctttttctattgacaatagtaattggtacgttgaacacagggtcacaggaacgaccgaacgagaccagacgcaaagcttccacttggatattttttttcctttttgaaaagcaaagaaatatactctcctttaatcacaataaatatatagaaggaaaagacttcagtattcctttgccttttaacataagaaaaatatatatacttaaaagatagaaataagacacacaaggactgaaggaccaaaattgcctataaaagcaaagtccatctattccacaagaacaagaaaaggcagagaagagagaggctctgataaaaaaaaaaacaaaaaaaaatg

SEQ ID NO: 28251 - DNA, 3003 bp, Unknown
  misc_feature (1)..( 3003): 2750-1469P.txt file - cDNA_ID_2994712; gDNA_ID_2684228; Annot_ID_192126
gtacgtaacttaatatcttttacaaaaaaaaaacttaatatacatacatatttaatatcttatacaaataagttagtgcgtttctatcacattttgataagagagaattcacaaaagaattttttttagtgttttagtgccaccgaaaaattacagcctcagtttcatgtaggtgggttttgagacttcgtgtttttagaagatctcatcccttaatatgatatcatagagacattttttgtatgctcattcttagtctgttccacattttacagttaaaacatgaaaacatattattgagaaatcaataggcaaatactaattggagctcgtctgatgatgaggaccaacattctaagcgaccacgatcaatatgcaaacactaattcaagggatatctgtataacccttttaagaaaaggcttttaagctagagtccagttcacttgattgggctcaagtggtgcctggcccgggatggagttcgtaattagttttctttctggtgtttactattttttttttttttaggagttcttatattttctttttccctcacaactctcttaaatgagtttacacataatctttctttctttttttttttttttttcacatagtctttctatatccttttctacttcatctttatctttatttttatttttttctctttatcaatagtcttttgacttttgttatcaacaccttttatcaacttttaattggtctttagttcttaagtcgtatgactctaatttataaaaacttggctcgtgggctgctaatttttacaatttgcatttttttaggaaaaaaatgatgatcggtctttttttgcatatatatttatagaatttgctttcggctctttttcgttggttgatagagtaagggaatcaatgtctcatacgtttctaatttttttatgacagctttacaatatagtttaatgtgcatgttatatataacgtaatcaaagttgctgttaaaaaagaaaagaatttatagatgtaatcaaagaccatgatagttcgatcattgtacattttgcatgcctggagccattatccttgatcattacgtaccaaaacattcggagacatcccatagatttaaaacgatacaaaaaatggtaatttcttttccactttccacgaaactcttagcttaactccttgtttttataaatcgttcaaaatacgttcatcataaacatagagaaaaaaggacgtgatgcgagttttatgaaactagtcccattaaatgtctgcccacacccctaatttctgcaaacctaaataagtttatagtgttacttagtcatctgttcctagagtaatcatgtggaggtaaatgatttataaccatatattaattgttttaacccaaaaaaatagagagttacatatactatttttccagcgtgtatccacatcatatgcatcaatataatttttttaatcaaattattaatgttgtccgaagtattagaaattatgcacaaacattaaatgaattgaaagaaaataacttaagtttttttttgtttaaaaatgagataacacaaaatgtttctaaaatcggatagaatgcgaacaataactgtttcggaagtccatggtaatctatacatgttttgactacaatatatgttataaatatacgtatttttaatatatatatatatatatatatatacgtatttttagtatgtatatgtatatatatatatatatatatataatttgtgaaatgtcttgttatatagaaaacaaacttattttcgtccaaaattattttttcacagcagttcatacacatttatgggcatgtactagtttttccgactataagcaaaatttatgtcgatttttctggatgtaacgtatatcttaggaaagagtaagcatatgaacgtggctgaaacaaactaaaagtgtctatctacacatacagatgctagcctctatgaaacacacttgtttggtcattggtggtggctactctcacgtgctcgctttgcattagtttagtttttttcaaacttcaaaagtcttttatcctttttggttatttcaaatgtccccaccatttctgcaaagtcacaatcttcataaaccatttacgatcctctactgactcagcgaatatgccaacacaagggcgcgtgattgtcttgagattcttccactgctatgcgagtttcttcaaaaattcctcatcgatcgacgcacttacctttttttttaaatggatcaaattgtttttgcatcttagaccaataaaaccatattgtatatattacgtaaacataatcactagtccatgatactatttatgaaaggtcataaagaatcctctctaagcatggaacatatgcaattcgaattcgggttcagaagcactaaaacaatactctttttaaccggttaagtatttgaaatagtgcacacaaaaataactaaaaagtttcgtgttactctaattagtagtagtactatatatataaccattgtcaatatagtctaactgatataataggtggaccactgtcacgaacttgaatgccagcgggaaaaaaaaatatactcgatcgcacgtatttatttgctttaatgtttgatccgaaaaagaatctctttggtaagaaaaaaagaagcctttttctattgacaatagtaattggtacgttgaacacagggtcacaggaacgaccgaacgagaccagacgcaaagcttccacttggatattttttttcctttttgaaaagcaaagaaatatactctcctttaatcacaataaatatatagaaggaaaagacttcagtattcctttgccttttaacataagaaaaatatatatacttaaaagatagaaataagacacacaaggactgaaggaccaaaattgcctataaaagcaaagtccatctattccacaagaacaagaaaaggcagagaagagagaggctctgataaaaaaaaaaacaaaaaaaaatg

SEQ ID NO: 28252 - DNA, 3000 bp, Unknown; identical to SEQ ID NO: 28250
  misc_feature (1)..( 3000): 2750-1469P.txt file - cDNA_ID_2994712; gDNA_ID_2214475; Annot_ID_183068

SEQ ID NO: 28253 - DNA, 3000 bp, Unknown; identical to SEQ ID NO: 11243
  misc_feature (1)..( 3000): 2750-1469P.txt file - cDNA_ID_2994722; gDNA_ID_2214485; Annot_ID_133355

SEQ ID NO: 28254 - DNA, 3000 bp, Unknown; identical to SEQ ID NO: 11243
  misc_feature (1)..( 3000): 2750-1469P.txt file - cDNA_ID_2994722; gDNA_ID_2214485; Annot_ID_183493

SEQ ID NO: 28255 - DNA, 3000 bp, Unknown
  misc_feature (1)..( 3000): 2750-1469P.txt file - cDNA_ID_2994737; gDNA_ID_2214494; Annot_ID_133526
cggaatatcaatgttctcgtcatacacaccttcctttacatatatcagcaccctgtcgttactcatattaggagcaaagcttatggcctcgttaatagtcgaaaaattccctgttccatcggcagcgaccacgaggctctcactcgggtcatactcatcatacccgtcgctagaatcttctaaaaaccggtgatctttcttatagacccagtcaggaaataacccaagtaaccggcggttcttagtgtttccgccggtttttggatttgtggttcttctctgttttggaagagcagagagggagttgcttatgtgtttgtaagtggtcgtgaaggaggtcacgagctttggcttgagtggacctgaggctgattcaagaccttccaagcatgtgatcttgttggtgagagcggcgcttaggtacgctctagcgtcggctagtttccgtgaatcgttaacaccgtcttggatcttggagattgatcgtttcaagaaagaagaagtgatgtggtgaagatctttgcagtcttgaagagagccacgttgtccctcaactaggttgttggagaccccagcgccagaaaggagatcggtgagtttcccagcctcggaaagagctgtttggagggtttggaggaggaaagagagaatgttggggcttatgttgatggagatggatagttttaaggaggtaaaacatgcatctggatatggtgtgtttttgcagaaacttgtagcagaagtttcatgagggtttagagaaggttgatacgaatacgagaaaacggaaggagtgaagaagaggaggaataatagagaagagagattgaaagaggagagcgccatttgagaagaaaatgttgaaggcttggagcaagtagagaagagactgctatgtttttaaaagtacaaaggaatgggtttacttaatgttttgtttagtcttcgttagacgacaaaacaaatatcttttttggttgaatattcgatcgatcgtgtttaagtaaatatagtatatagagaaaacgatgtctctgattgttgtttaatttggattttgattttgttagtaataagatcacattcacatcggttactattttaataagatctgtaagattgaaacaatctctcttttaacgataactacgaggaaccataacgtttcaggcaatggttttagacttttagacccaacccagtcacaattgtatattttgatcatacgacacttggtcctatccagtcccggctcaattcattatgggacctattgcaaaactcaaaataaaataaaatttcttagtaaaatttttttttggaaaaattggggctttttagtcttaacaatttttttgaaattgattagtaacggcatttgcctacgatgtgaaatataagtttgatacataaataaagtaatgattgattcttgaattgctttttgtacttctagatcagtattgattactttatttacgagaaaatagttcatttaagcacatttatagaaaaatgttaagtaatgttaaataggatagtccgattaaacctattaattatgcaaattttctttcaaataaataggtacccataaaaggccattttaatttctaacttaactacaaatgacatcgtttatgtgtagagtttgagatttcacattaaaattctgatttcaaacaaactctttcttcttcactatagtgtctcgatttcgatcttatcttctttcgaacttcgacgaatctcgaaatttgatatgaattttgagtacctttactgtaattttgtgttttatttctggatttggtagttcgaatctaagagcatacaaaaattatgggctgcatttgtaacttttgatttgaatatattttgcgggtctagcaatcaaatattttattttccaaattgaaaattataaatttgtcgtgttgtctccctgaatgttggcaacacattttaaaatttagatgcatgatccatcagaactttttatcgaaatttttaattttagattatttaacatctatggaaggagcagagacatcaccacagttcaaacaatcgatctcttaattagttaattacatgtatcatcgaatcctaaaaacatttttcttccttcctaagcccaataagggcctagttagagtaggcccaattattttattttcttcctttttgctaatttctcttcttttttttccctcacttctccaacaaactcgatttcccgatttcgtcgcctcttctcgtctctccgctctcctcgccgcgagtctgtttcgccgccgtctatctcccaattccggtacatcctaaaccatttccccttttaatccaacctgtgttgatttctaatcgcgattaatctcagttaggtttaattgcttgatctcagttgaaattagggcgtaatctcattactaaatgtagcaaaaatcgacaatatagtctcgtctctctgttatagcaatcaatttgtgagattctgaattttggcagaatcctaattctgaagtttggctaatatagaacctgtaattgtgttttttcatttatgagatgttttattaactttgttagtcacaaattgatttcatgtgtataatgttcattatttcgattttgttctcgtatgcgatattacgttcttggctgtgatatctgaagtaaagctgttgtaatctaagtttttcttctcttgattttaaacagtgaccgttgttgtttagtgaatcgatgatttacactgctatcgacaatttttacctatccgacgagcagctgaaggcttcaccttcgaggaaagatgggatagatgaaacaactgaaatctctcttagaatctatggatgtgatctcatccaagagggtggaatattgctcaaactgtatcctttttcttggtctaattattaagcaagactcaaatgttacgtagctgtgattttcttaacttagattgtttattttagaccacaggcagttatg

SEQ ID NO: 28256 - DNA, 3000 bp, Unknown
  misc_feature (1)..( 3000): 2750-1469P.txt file - cDNA_ID_2994737; gDNA_ID_2214494; Annot_ID_183761
taaaattaaattatatggtcctagttgacaaaaaaaaggcaaaaattctacggtcctaaagtctacactatgccccaaactataccacttgagtcttgttttatataaacaagatttttaaaagagtcaaagatgtttaccaagagtagcagatcggaaagtggtccatccatctccgacacttcggtttccggtaataaatgtaacatcggatccatctcctatcaaaacaatattagtcttgtagatcggaatatcaatgttctcgtcatacacaccttcctttacatatatcagcaccctgtcgttactcatattaggagcaaagcttatggcctcgttaatagtcgaaaaattccctgttccatcggcagcgaccacgaggctctcactcgggtcatactcatcatacccgtcgctagaatcttctaaaaaccggtgatctttcttatagacccagtcaggaaataacccaagtaaccggcggttcttagtgtttccgccggtttttggatttgtggttcttctctgttttggaagagcagagagggagttgcttatgtgtttgtaagtggtcgtgaaggaggtcacgagctttggcttgagtggacctgaggctgattcaagaccttccaagcatgtgatcttgttggtgagagcggcgcttaggtacgctctagcgtcggctagtttccgtgaatcgttaacaccgtcttggatcttggagattgatcgtttcaagaaagaagaagtgatgtggtgaagatctttgcagtcttgaagagagccacgttgtccctcaactaggttgttggagaccccagcgccagaaaggagatcggtgagtttcccagcctcggaaagagctgtttggagggtttggaggaggaaagagagaatgttggggcttatgttgatggagatggatagttttaaggaggtaaaacatgcatctggatatggtgtgtttttgcagaaacttgtagcagaagtttcatgagggtttagagaaggttgatacgaatacgagaaaacggaaggagtgaagaagaggaggaataatagagaagagagattgaaagaggagagcgccatttgagaagaaaatgttgaaggcttggagcaagtagagaagagactgctatgtttttaaaagtacaaaggaatgggtttacttaatgttttgtttagtcttcgttagacgacaaaacaaatatcttttttggttgaatattcgatcgatcgtgtttaagtaaatatagtatatagagaaaacgatgtctctgattgttgtttaatttggattttgattttgttagtaataagatcacattcacatcggttactattttaataagatctgtaagattgaaacaatctctcttttaacgataactacgaggaaccataacgtttcaggcaatggttttagacttttagacccaacccagtcacaattgtatattttgatcatacgacacttggtcctatccagtcccggctcaattcattatgggacctattgcaaaactcaaaataaaataaaatttcttagtaaaatttttttttggaaaaattggggctttttagtcttaacaatttttttgaaattgattagtaacggcatttgcctacgatgtgaaatataagtttgatacataaataaagtaatgattgattcttgaattgctttttgtacttctagatcagtattgattactttatttacgagaaaatagttcatttaagcacatttatagaaaaatgttaagtaatgttaaataggatagtccgattaaacctattaattatgcaaattttctttcaaataaataggtacccataaaaggccattttaatttctaacttaactacaaatgacatcgtttatgtgtagagtttgagatttcacattaaaattctgatttcaaacaaactctttcttcttcactatagtgtctcgatttcgatcttatcttctttcgaacttcgacgaatctcgaaatttgatatgaattttgagtacctttactgtaattttgtgttttatttctggatttggtagttcgaatctaagagcatacaaaaattatgggctgcatttgtaacttttgatttgaatatattttgcgggtctagcaatcaaatattttattttccaaattgaaaattataaatttgtcgtgttgtctccctgaatgttggcaacacattttaaaatttagatgcatgatccatcagaactttttatcgaaatttttaattttagattatttaacatctatggaaggagcagagacatcaccacagttcaaacaatcgatctcttaattagttaattacatgtatcatcgaatcctaaaaacatttttcttccttcctaagcccaataagggcctagttagagtaggcccaattattttattttcttcctttttgctaatttctcttcttttttttccctcacttctccaacaaactcgatttcccgatttcgtcgcctcttctcgtctctccgctctcctcgccgcgagtctgtttcgccgccgtctatctcccaattccggtacatcctaaaccatttccccttttaatccaacctgtgttgatttctaatcgcgattaatctcagttaggtttaattgcttgatctcagttgaaattagggcgtaatctcattactaaatgtagcaaaaatcgacaatatagtctcgtctctctgttatagcaatcaatttgtgagattctgaattttggcagaatcctaattctgaagtttggctaatatagaacctgtaattgtgttttttcatttatgagatgttttattaactttgttagtcacaaattgatttcatgtgtataatgttcattatttcgattttgttctcgtatgcgatattacgttcttggctgtgatatctgaagtaaagctgttgtaatctaagtttttcttctcttgattttaaacagtgaccgttgttgtttagtgaatcgatg

SEQ ID NO: 28257 - DNA, 3003 bp, Unknown
  misc_feature (1)..( 3003): 2750-1469P.txt file - cDNA_ID_2994744; gDNA_ID_2214497; Annot_ID_133590
ctcaagacgtctccgccgtaatcatgacgaacgcttcttcagcgccaccgccgccgcaggcaaaacgcagacttgggagaacgagtaggtccgctatgaaaccaaaaatccacagaacaaaaactcgtaaaacgaagaaaacgtctgcaccaccggagcctaacgccgatgtagctggggctgataaagaagcattaatggtggagtcaagtggagccgaggctgagctaggacgaccatgtgactactatggagatgattgtaacaaaaatctcatgagcattaatggcgataatggagttttaacgtttgatgatgatatcatcgatcttttgttggacgagtcagatcctggccacttgtacacaaacacaacgtgcggtggtgatggggagttgcataacataagagactctgaaggagccagagggttctcggatacttggaaccaagggaatctcgactgtcttcttcagtcttgtccatcggtggagtcgtttctcaactacgaccaccaagttaacgatgcgtcgacggatgagtttatcgattgggattgtgtttggcaagaaggtagtgataataatctttggcatgagaaagagaatcccgactcaatggtctcgtggcttttagacggtgatgatgaggccacgatcgggaatagtaattgtgagaactttggagaaccgttagatcatgacgacgaaagcgctttggtcgcttggcttctgtcatgatgatattgattgatccgttatgtaatcttttttgtgcattcacagtttgaatctattccacgtcgtatcatatcataaagtttaggatctaaatattagtccattagttaaaattatctaatgcaataaaacccatgggatgtttggattgtacgtaaggttaaaatattgcagtctttgctttagtggaagaattaaactaatatgatgtttttctttgtaacgtatttactattttcatgtaatttaataaagagggtacgaaatgtaggtgtacatttgtttgggctgtatatatttctattgacattaaatacgccaaattagaaaagaaaatctttagttggaagcatctattatatgtacctctttcggaatgtaaaatcacgtttaatatttctgaactggtaatcaatctcatctcctaaaatttaatacatatcatcattgtcaaacaatcggagtagcgacgagaactatcattgtttttctcttgtgatattgccggccaaatattattacctcaatcattttgaagcgagtaaacatagtttttttcccccttttttttgttcttgtacaccaacagaaagctgcatcacatctgcgaatcatcacgtgccattcaagtgattactggaacgtgacatgaacgaatcttcacattgagtgttccaactctcctttgtacgaaactccaaacaagtagatatatattcaattattatggatgttggaacaatcaaattaactcttgtccttcttatcgtagagacatgaaattaacccaattctgtaaatgagtagtaagtaatctatatatatatagttgacaacagataacactataatatatgcgtccttataatgttaatgtaattatcatggtttgagttaacgtatagaagcattgaaacttagttgcagaccgaaaatgatatacgatcttaagagttaagaatcttgaactcggcaaattttatgaaaaaaaaacaatttcaaccatttctaactagtgattagatgaccaatagcaagcatgcaccaacgacttcatttttataaacatcatagggacctagacatatgcattttgtgggcaacggcctacgcattaaatttgtgtttcgaagattaaatttatgaacagaaggcaacttgcaaatttgctatgtacaaaaaacacaaaggaaaagtttgtaaatagagacaataagggagaaataaaaagatcgctttctcataagtccgacttggttccacggtatctagaatgcccacgtgatgtcatgtacttttccttcttctctattctaatatgttgtttaacaaaaagaaaattgattgataaaaaaaattgaaaaatttcatagtgatatctaaagtttaaacaaattatctctaagaaaattgttagtatgccttggaatataatttctcaacacacaaactgaagaaattgcttttaaaactgaaatttatatggtaatggcatactaataaacagctaaacttttgtagttttatgtgtgtgtattaagagatttttcaaagtgaatgcaccttaaggtcatgttttgtgaggtttgatgttggagagagtctttgatccgctgaagaattggccaggtatcaaaatcatttcttaatttatatataaaatttcaactttaaaaaagaaacgttcaatctgagtctcttaaaataacaatgtgaatgttaacactttgtagatatcagactatcatagataagattgctacttaaaacattgaaatgttttgatgattcgttaagcctagcaatatatcatgtcgttattgggcttgtttacttacccagttacccgtattccagttataagcccattaatcagcctcgtacagttctattgttggtcagattattaatttttaaaataagggcgtattttccgaaactaaagaaagtatagggtcttcttcttttctctaattaggaaaaagactttttcaattgtcttgtccgtgaaattatgtggagagctaaaccattcatagcccgacatgtaacccagccacgtaattagaccactcgatcaccgttcgtattaatgtgattaaatcaacgattgatatcacgccacgtcattgtttttcttttttcctttgtatcttctgttctaagggaagaaataataacgagagaagaacgttttaataaacagagagcagagcacttgttctaaagatcaaagcttaagtgagaagcagaaaaaaaaatg

SEQ ID NO: 28258 - DNA, 3003 bp, Unknown; identical to SEQ ID NO: 28257
  misc_feature (1)..( 3003): 2750-1469P.txt file - cDNA_ID_2994744; gDNA_ID_2214497; Annot_ID_183859

SEQ ID NO: 28259 - DNA, 3000 bp, Unknown
  misc_feature (1)..( 3000): 2750-1469P.txt file - cDNA_ID_2994757; gDNA_ID_2214502; Annot_ID_133700
ttcctacatttctattacagattaacaggtgtcctataacctttttattttccttttcatgtgttgtttctagaaaacaaaatccagattattataattcttgatatcacaaaaatgtagaggaaagggaccatttctaaggaaaagtaattttaaaatccctttatctatgtgttgtgtcgtgtgtcggtgaagagtaagaagtcgagagacaaagttaaaagtagagaagaaaatgagtgaggaggagaggaagcaacacgtcgttctagtacatggtgcttgccatggcgcctggtgctggtacaaggttaagccgcagctcgaggcttctggccaccgcgtaaccgccgtagatctagctgcctccggtatagacatgaccaggtcaatcacagatatatccacatgcgaacaatactcagagccattgatgcagctaatgacctcactaccagatgatgagaaggttgtgcttgttggtcatagcttaggaggtttgagtttagctatggccatggatatgtttccgaccaaaatctctgtttctgtctttgtgactgctatgatgccagacaccaaacactcaccatccttcgtatgggataaggtattttgatcttatcttaaatcaatgtctataccatatatatatacatatatgaacatataaggtatattgtatatctgaacagtgaacaacactagtccatgactataaatatgaaaagagttgtagaatataatttagataattcttagttatgtttagaatatacttttgattactacttcatttcttatgagcatatagatgaaaaaaaaaaatagtctcaagcatatgatacattaaagatttccatctttggactctttattatttgtattatatatgctccaagattaattgtaagttggtcaaatgaatttgctagatttaagcaaattagttgggtcatctttgtttttcagatggcacttgaatcactaacgctaggataccaatttttagaagctatggcttcttattcccaacataatgaggggttcattttgatgattttaggtaaatttaggatttttaatggtttattatgaaatcttttcaaatcccattttaaagcaagggatttagatttgtctttttttttttaagagattggtatgcaagtttaaacaaaaaaagctactaaaatccctttagaataattaagaatccaatacttgaagtgttttcaataataacggattttaaaaaataatatttcaaatgcttgattgaatacacttccgcaagacaacatccccttttagtggttaccttagaccaactccagcagtagtttcttagtagaaactcatacaattaacaaaaaaaagaattgaaaagttaatgagagagaatctctaaaattcataatattaggatcgtttctattactcgtataccttggttttttggttttttagatgtaaaagtaaaatattaatactttttgttttttagaaactacaaaaattctatacgctggagttgctcttacttacataactgttaaaaactttcagaaaatgaaaataaaactacctaatcttatccaacaagtcatagttctaactgttattgactttacatgaaaacttatagcttacataatatttttgaatctaacaccaagtaattcggatatttgactgaaatctaacagctaagaaaagaaacttcacgagaggaatggttagacaccgtgtttacgagcgagaaacctgattttcctagcgagttttggatttttggaccagaattcatggccaagaacttgtatcagttgtctccagtccaagtaagactcttagcttcataagaacctctttttttcaagcacaaataagattgtactagtaatctatgtcaatcttttgttgatttttgttacggtgaactaggatcttgaattggcgaaaatgttggtgagggcaaacccattgattaagaaagatatggcagagagaagaagcttcagtgaggaaggatacggatccgttacacgtatatttattgtatgcggaaaggatcttgtgtcacccgaagattaccagcgatcgatgatcagcaactttcccccaaaagaagtaatggagatcaaagacgcagatcatatgccaatgttctccaagcctcaacaactatgtgctcttctcttggagattgcaaataaatatgcctaaataaatctgaaatatcatcatcactgcatatcaattacaaattcagtgtccaccacaataataagccatatgagaatacataatgtatgagaactaagcaaatgataatattcacaagaatggttttatgaataatgattcgtgagctagataactatattattacctgaaaattatgttttatggtttctccattgatttaaacttataggatacagatttatacaccatatttcatgataatctctatcaaaataatgaatttataagcaatcgagtaaatacaaatataggcgccgaatggagatgtacggtacaactgcgaatttttttaagtcataagtaatttttaaaaaatgttatctctatttttagttacgagtaattgttttaatattatatcaaaaattaatattattgtccaactagtgtgatttgacctggtacatgacacggaacaaacatctaacacaacttgtcaagttgtatatcactgtaacatcagctttaattagaaagatacttttattttgcattttaataagtgtaaagtttcttatccgcagagccaaaatgtcgcttttaaaaagaaaaattccaaagttatttctttatgcaagaaaaaattcgaaattttaattatcacgtaaaatcataaaagaatctcaaaggaaagcgacaattttggaaaattcaacgataagctttataatttttctacttatgagtggatgtgtgaagagtagggaaaaagtacgaaaggaaaatatg

SEQ ID NO: 28260 - DNA, 3000 bp, Unknown; identical to SEQ ID NO: 28259
  misc_feature (1)..( 3000): 2750-1469P.txt file - cDNA_ID_2994757; gDNA_ID_2214502; Annot_ID_184035

SEQ ID NO: 28261 - DNA, 282 bp, Unknown; identical to SEQ ID NO: 420
  misc_feature (1)..( 282): 2750-1469P.txt file - cDNA_ID_2994796; gDNA_ID_1590883; Annot_ID_150199
  misc_feature (52)..(52): n is a, c, g, or t

SEQ ID NO: 28262 - DNA, 3003 bp, Unknown
  misc_feature (1)..( 3003): 2750-1469P.txt file - cDNA_ID_2994800; gDNA_ID_1620761; Annot_ID_50015
atgaaaaacaaaaaacaagtctcattttgattgcatattagaaacgatctaaaacattttcgactaatatattgacatacctggaagtacctgctttcaacagtttgcttatatgataatgtgaatgaagaagacgaaggaaaataagttttagcctttctatccacggcttgagagtttttgcattcttttgaaacgaaagcaataacaactaattatgttctctcttgttttgccctttttctctccttgagaatagtagatttgatcgttatacgaccataagggccaaattctttatttaaacttttttttttggtaattaaaacccaatttcataggaaataaaaactagtacattttaggaccccagctaaatatgatgataattaatgtaaaaatacgacttgggaattcatatgtttttaatgctcgacttttgagctgactttgcaataggcttaccacttccgttaaaggataagtttatgaaattattaaaacataaccaaacaatgacatgacgagttgtatctaagaagagatgcaattaaaaaaacacttaatctaaactaatactacttagttagcctggccatactattattaaagatgttttaatcttatgcaatagtttttttttttgtcaaacaatcttatgtaatagtttaagtttgtcaatttgtcttattaaaacaggaggaactgcacaactctaccaaaaaaaaaaaaagtctcaaagactgtgccaaatcttgcctttatgactccaaagtgcacgtttattcagataaagtattcaaaaaacaaccaaatggaaatgagattagagagcgaggttcagagatgatgggcgactagttgcaaatacaaagtgttgtttaaatgaaaagtgattaattatttatatagatctttattggacccaatgctatcacctcatctcaattatcaagcccatgggttggtctcatcaaagcccaatcaaagcttcccaaacaaaaaggaattaagatgaacaaacaaaaaaaaacacttcggagcaaaagatctggccaccacaacacaacgatcgacgaatacaataggaaaatttgaaatctcgtcgatgaagatgactgctaagatgcgccgtgaattcccgacggcgttccttctcttgtttctggttccggtgatgattccggtcggtgaggctgtatggctagatgtgcctcccaccggaacaaagtgtgtatctgaagaaatccagagcaatgtcgtcgttttggctgattacctcatcatctccgaggatcacgaggtcatgcccactatatccgtcaaggtaagtgtcttcgattttctgttcctatcatcttgcttgttcagtgatttgaatctgcattttgtgttactcgatccataatttcaactgattcatgagtcacgtttaggaattagaaaggcatgtattaattctcgatccaagtttccttatttggaaaattatgatcatgcatgtctttctttgattgtttgttatgatgattttcggatttgtataaatgctcagatgcttgtgtatagcttaatccctgtgaatacccttttttttttgccgtaatatcagtaattagctgtgagattgagataagaaaaattgaaactttatgtggtcttttaatgaagtctgtgtttttgatgtgtatgtttgggaacaatgataattattacgaacaagggagtttcttttattgagcaagtatcatttggtatttagtaatcattgctatgtgctagttccagatagtttgatggattgtttaagatagtgtcctttggattgagagcagtctttgaagtcgacttgaaaaaaggaatacaatgtttctgaatggtaacctctgttcctttttattcttggctctgagttttgagaatcattatggtgcaggtgacatccccatatggcaacaatctgcacaatatggaaaacgtaacgcatggccaatttgcatttacaacccaagaatcagggaactacttggcgtgcttttgggcagatgaaaagagtcacggaaacaaaaatgttagcatcaacattgactggagaactggaatcgctgctaaggattgggcctctattgctaagaaagagaagatcgaggttagctttcaagagattttacagttcagagagtggtattgcttataattttgcttcaaaatatttctaaaatttgttactctatgacaattgcttaagggtgtggagctggagatcaggaaactcgaaggcgcagtcgaagccatccatgaaaatatactctacctaagaaacaggtaaagtcatcttcagctgcatgaactgctcttgccttctttgctgactctcattatcaaaatggtaattgcagagaagcagacatgaggacaatgagtgagaaaacgaactcgcgggtggcttggtacagtataatgtcactaggtgtttgcattgctgtctctggtttccaggtactctacttgaagcagtactttgagaagaagaagcttatatagagattccctgatattcaggtcctttaatgagagtttcttcttaaagaataatattcaattcatctcctttctttcctctttacacgcctcctttttactgacgctgtaaaatttttgttcatggattgtttatgtagcttctctctgataagaagtcattatttctgattctgaaataataatattaacttcttgtcatctccaaagtccaaacgaaagagattctagaaccattgatattgggttgtaactgatactttatgttagtttggggctataacacgtaagtttgacagtacaagggttaagattacaagaaaaaactaatcaaatgggtattacatacaaatcagcccaaatttctgacccaacaggcccgttaagagcaaaccctaatttcaaagagaatatatataaaccctaatcacatttcgcaaccaccaaagcggaggaaaaatg

SEQ ID NO: 28263 - DNA, 3003 bp, Unknown; identical to SEQ ID NO: 28262
  misc_feature (1)..( 3003): 2750-1469P.txt file - cDNA_ID_2994800; gDNA_ID_1620761; Annot_ID_167165

SEQ ID NO: 28264 - DNA, 3000 bp, Unknown; identical to SEQ ID NO: 12724
  misc_feature (1)..( 3000): 2750-1469P.txt file - cDNA_ID_2994808; gDNA_ID_2214568; Annot_ID_186095

SEQ ID NO: 28265 - DNA, 3003 bp, Unknown
  misc_feature (1)..( 3003): 2750-1469P.txt file - cDNA_ID_2994821; gDNA_ID_2926262; Annot_ID_143249
tggaaggtttatataaacttttggatgtctttatcttgtcaataaatatttttctttttagtagtaaacaaaattattttgtaaattgattcatatttttcttcttcataaaagctatgttgactaaaaatgatccaattccaacaaaacgttccaatccaatccgtaggaaccaagcagaagaaacacgtttcaattaggccataaaagctattcacattttaaccacaatgcaggggaattttttttctttcattgttgttgtaagtaatatattggtttatccatttgaatactttttttagatatggatataaatttgtcctgtcatcaaagaaaaaagaaatgcaagatacaataattaacaaacctttgattttgtttttcccttttttgaggataaataaataaaatttagtctttggtgtaaatctatatggattgaataacattaaattttcggtgtaaaggtaagtctttttttttttttggtcatctgtaaaggtaagtctatatggattgaataacaatatttgttttggtgtaaatccatatgcattgaataacaatagtttttttacttttttctccttttaaaaggcttatttttggattaaaaaaaaaacatatttggtgtggtgtaaataaaagaaagaataacaatattcaaaatcatagattaaaaaatatgtttttataaaaatttctaaatcacaaatagagcaagacactatttatgacattattttcaatattagtgatcaaataacttatcagtagtttttttgcaagaccttcctcttgatattactaatgtttgggtttggctttcaagttgtgaagtgattgctcattgctccacggtcttaacaagctaatactactaatcaatttttatttttccaatacttgaataaatagtagagatttagtatcacaaaaacaaattatgaagtgtgttcatataaaacatttctgaataccaatctttaatcataaccgagacaaataaacgcacaaaagaaagtaacatcttcacaagttttgtcttccaaagtaaagataagagcatagaagaaaacagagggaaaaagaaagagaattacttctgaataatctcaggccaaaactgagcgtttttaactttggaaatactcgccaacacagttaacggtgtcacgtctcccgtcacggtaaccttctttgctgcgaagtctatgttatacgacgtcactcctgcgttcaacaatcatcaaaggaccaaaaacagagtatttttacaaatcaagtatatattttcatgaatagaagaaatactttacttgttagttacctttcaatttcgatagatgtttcttaactttccctgcacagcctttgcaatgaagtgacactctcaaaacaaccacctttaagcaacgaaagaaagattgtcaagtttaatctcaaaacattaactcatgattaaatattatggttttgttcgattacttacttgatcggaagatgagtttttctccggtggtgatggcggcgacgactgaggaggagaaggaggtgggggaggaggaggagagaatttgaaatccggggacgaaacatctttatcttcaagagagctcagagaagctgtaggagaagcttttgtgggttcagagaaaggattatcgggagatagaaccggttcataatccaagaacccctcgaagaaatcgggttgcttcttctccaagaaagaagcagaagttgatagatactttgaggcgtttattatgagtcgatcttcatgaaaattatttaaatcatcagctttggttatctccggttcatcaataggtattggaatcgggtcggaatccacaaacccgtcaaagaaaaccgggttactcaataagtaccttgaagaaccctgaggtgtgtcactgctaaaacaactaaccggtgacttaccaacatcactgtcacctttcttgctcttcctcttcgctaaccgtttttgttcactactctcgagacctagtctagtcataagaggagtatgataagtagaagaagacgaagaagagggattaaggtttggggaaggtggaggagtgagtctccgaccgtcacgtatgattgggttatgacggtcaatggctcgaccaccgagccggatcgtggctgaagaagaagaagaaggttgtgaggtttgatccatggttgagcaaagggttgttgttgatgcttgagaagcacacaacatgttttgtatggtttacaagaaatttaagaaaaagtctttagtgtttgcaatgaaaatgtggagagatttctatagtcacatataaaatcaattaaaaatgtacatatttttaggttcgagttaaagatatttttttgggtgatggaatcgactttagaaaaaagtaagtttattcgtattcttatcaaaccaatgtgtgagagattgattgctagtagacctagaaaccgtgtgaaattattttgattcgattgaactgacgatttttggaccatctactacaaataaatacagtgtagtttactctcttttagatagaagaagaagaaaaaaaaaatcattttgttagaaaatcatatttttttaaaacaccaaaaagaaaatagaaaggccaattctttttgccaacccttaatgatagttccgaatctcattctcacaaacaaaaaataatcagaatctgatgcttatgggttttattgacgaatttattcgtattagctttcactattcacaccttttctcttttcggcatacgacgacccaattaaatgttctttaataaaaagcccatgttttgtggaaataactattgggctattacacggcccattatatttgccaagagaatcacgagggttttctaactcaaatcgatttcacaaaggcatcgtataaattttcttcttcaacaaaattagggtttggagccagaaaagagcaaataggcggcacatcagttctcaacactcacgatg

SEQ ID NO: 28266 - DNA, 3003 bp, Unknown
  misc_feature (1)..( 3003): 2750-1469P.txt file - cDNA_ID_2994823; gDNA_ID_2926139; Annot_ID_197347
catgacacaagcttttccatgaatgtatttatgtccgccttcttatctttcttgaggaagatgaattcaccgaagatccaacttgagcttgacaatcaatcaaatccgaaacagaaacagagctttttgacatctttgatttagcagtctttgatcttgaggaatatcaatgaacactagatacactcacacttgcaggctttaaactggattttaaacatgaatagaagcattgattccatggaatgtggtaagtgacatagctggacttcttaaacaaatgtatgaacgggtagggttcattacaatgtagttatacagcactgagatttatggaagaaaaaaaggacacagctttaactatctacagagagacaagaacactaaagacaagagaatcataagttcaggagttcgttaaaatggctctattcaaatcacacattggcacaagaccactaataagataccaagtgggacaatcgaaagataataagagatagcatatcagagagagagagagattttttgaggagggagaagttcgccggaggcttctgtttctagtcggcgttgtgattggaattgtttgagcggtctttccagtcccggaattggaaacaagagggctaattttggtccttttggaaagatttgaaacgacatcgttattaagccctaattctactataacgatgtcgtttacgagaaacatacatatacatacttgagaataaagcccattaccaagagaccaattttggtctttttcgtatagtattaactctacggcgattgatctaagcccaataattgtggaacttgctcgacttaggtctcaatctctattttctaccaatgccaaaaaacaatttccttacaaattttttatttttcccatcaaaacaattcccaccaatttacatttaaaaatcattgtaatctatcacatttccttacttttaaaaccatttacaaatctatttatcgccaaaacaaaaacgggaaaaatgtttttggaaaaaaaaaattgacagaaaaattattttcggaatatttttggcgaaaaaaatcgatattctattttgttaacctaaaatattttcaaaatatgagtaaaatagtcattaaaaattaaattaacgtataaatgaaaatgactaacaggaaaggttataattaaaaaatgataattttggaagaacattttttacaatttctctttaatcattaaccctcgttgtatggaactccggtggcgttgagccacgaatctctatttatgaactctctaaccgtaaacatgactgcttccatcgggtctgtgatgatcttgttcccattcggatggactctctggcttgcgtttgctctggggcctttgttttgatattcgcggtagaacaatgtggacaaatccccactagtgctgctatttcatggagtccatcccactggatctatcaaaacatccatttaagattccataatcaccaccgttgataaatcaccccacggtcttactagaaacatcttcaccattctgtgaatgtcgacgtgtcggtcgagagactgtaaaaagcctacgtattcatagaatttttatttttatttgtgatgtttatgatagttttttgttcactttattttttttgttcaatctattttaattttcttaacactgatataaaaaatttcatagtttatgttgtgtatttattttttaattttttataatatttaatttaattttgtcaattattgttttatttaatgtgtgaattaattttagctgtaatgttttgatttcaataaataaaatttaggcaggccacaatatgatgacttggatgttgatgtagacatcgtagatcgaaagtgaacttttctattatatagacgtattttacttattttttgcttaatttatgcttacttttggtcaaattattttctctttattattcaaattatttcaataatcataacatattggtagatatgtagtcgctataaaaaatttggatgtaaatgttaactgatgaaataaactaggcctaatttgtgtgaaagtagaaacctattaattgtgaaagtttgaaattccataatctcggtcgcatattgaatactcaacatataattttggtagtgtttgaagaatcatatttgagacataatcaggtataatgaataaaagcagatgacacagcaaacgaggaagatgtcatcacttgtcacaaatccagtgcatagatggatcaagtgcaattctgatgaagtataaaaacattagagaaatactctgaaattggatggatactctatgacgaccaggtggtgtttgtaacatcttgcatagcgttaatcttgagctaaaaacagctttagaagctgaaagatagatttttggggtcagactgaaaactttaattaagttagggtaaatatgtaaggaaaaggaagtaatgtgtaattttataaatttcagaaagaaagaaatgaaaacttaaaactccgttttaattaccacaaggctcaagcccaagcccaataccgctaacgaaatccgacgaaatcacaaacattataatattacatagagataatcatctttctgtctctctgtctctctgtctcacgcgagaactctggcttcgtctctatattattgacccttttgatctctctctgtctcgctttcttcctcgcgtggacctttttcgaaaaatatcaatcccagaatttcgcttcattttggattataaactcccagatctgctactctctatctccgattttgtgatttttcaaaccctagatttctccggaagagtttatttttttctctgtaactaaaccgagatttttttttcaaaattccgacattaccctaggttgtgtattaccgtagaaaaccctagttcctttttggtattcttggtgtacagatcccttccttagtcagagtttttggttattagtgtttagaggtttgtgatg

SEQ ID NO: 28267 - DNA, 3003 bp, Unknown; identical to SEQ ID NO: 28266
  misc_feature (1)..( 3003): 2750-1469P.txt file - cDNA_ID_2994823; gDNA_ID_1972140; Annot_ID_179266

SEQ ID NO: 28268 - DNA, 3003 bp, Unknown
  misc_feature (1)..( 3003): 2750-1469P.txt file - cDNA_ID_2994827; gDNA_ID_1620746; Annot_ID_49719
taataataataataataataataataataattggatatttggattagagaaattattgaaagtaatgtataaactattgaaccatgaaaatatatttgcgaataaatcatcaaactgaaactatcaaaatgtataagattttgaaaaacataatttcacgaaatatttttttttttttaaatctatgttttgactttttatcaaattaacaaaagcactatctgattatctcaagctgatttagtagaccgaccaacaattttatcttttaagccaaacaagtaatatactttatcataccaaaaattaatatatttatgatactaaagaaaaaactttatatatctcctctagtatatagtaaaagcaacaaaaaaaattaaaaataaatgttaagagagcgttttatggtcggcttttcacgcgtttcactttccaattttcatttcactttataagaatagaagaactccaaaacattaaaaataaggaatcagaaaaaaaatctataataaagttgtgattaaatcattagttttttttatataataaaacgcaggtgatcctaaaagttttcaaagcccaaagactaattgtaagatccgataaattactcgaattttggtgactaatgttacttaaacccaaatagtggaattaacactctttaccagtagaccaaagcaacttggtttaatttattttcttcaatttaccagatcatgatgccgtttaggaccattggactagtccatgctgagtgaaaataattcactcaaaagaataccgtaaatcagaattttccacgtttatcaaataactgactaaaaagcacacataacaaaattttcatgcatcaacttgtactaaaatttatagaaaactggcgtatattggtaaataaatagcagaaacaaaagtggaaaagttttgtggcgccacttgcgaagtgaactttggagctggagcacagctggacacgagcagtggggctgcagctgctaagtgctgacccaaattggggtcacaacctttcctcttataacggtccaatatatattaccgttatgttacatacaatatagtaatttatatatatatatatattttttatatagtaatttatattattttttgcacactatcgatttgatttacaacaagtccttttgttttttgttttttgttttttttgcacaatatcgattgtttgaaccttcaaaattcatgatagaactcccggggtttttcctttttatttttatttttttactctcaaaataagaaaatcatagtccgacgactccatttaaaagacttaaaaaaaattatggtcaaaatatgaatattttatatagatacttaatgcagaagctatagttgcactttttcctcgacaagactcttgtctcttcaataaaaaatgcgttggtttagttttatactgtatttagtaagtatatatgcttttccccacggcccacactcatgcattgatacataccactttattggtctccagactaatctggttatatgtgcccatcattaattcaaattcattaacttacgtaagaataccacccttacaaaacaacttaaaaaaaaaaacttgaatcaacatttaattaaaatttgacaaacatcgttataaattttatataactattacttagttaatttgaaaaatccgttgcttaatagttaataattaatcaaaaacacattgatttactacatattctttttatgccctcggtttggtatcttgatatatcaagcggcttgtaacttgaattcagaatctacgttttcaatgttgtttcctatgatggtcaagtggccgctacttgatttcagaatctacgttctatgatggtgaagatattgaaatgaatgttggaatttcttttattaaatttttagttggtatgactgattagccatacaaaataattaggttgcagccacttattttaacttgtataaaaaataagtgatactactaatttaaatcacctattattactttttttttatgggcacaaaatcacctattattactaattgatacttttattgatttatttaatattattcaatcaatttggtgtaaatctatattaatttccgctaacatcatcctagtactggagaaacttgatttcgtatctacagcctttctagaacaatttttatccaaaacttaaatttgtttacgttcattttccttgttccaaataaataattttctttttttgacattatgcctttgttgaagtaatgcatgtcacatacagtacaagaaaacacgagtttcagacttcagtgtaaaacaggattacatgtattgtaagcgaaaataattaacatcaagtagtcaaaatattttacactatgtaatgttaatgatgtgtaagattagcaagacttacacgttcgcggaaagtaatctaaattatatatttccattaacaaaaggtaatctagctagaattcttaattgactttgatagctagttcttgtataaacaataattcttttctcgttgatatttatatcaaagtggttatcatctatctaaaaatctatacataagaattagaatatccttaaaaattctaccagtaactttcaatagagagttatcaaatatgaatcatgattacatcagtgtttattacacacatatttacacgtaacacataattagtttcatggtcatcgttaattactctgacgataatgtaaactaaaaccgggtggatttaaccggacccatttgccatcactctccataaatcctaaccgtccatctaatcaagcgtagatctaacggtggatatcaaatcaaaggttaattccctccctatatatattagaaaattgatcctgaagcgtgtaccgtacacacatccccatacgaacactcacaatcgttaaaaagaaagaagagaagagagagaaagcttaaatcggaaaaaatggtttcgtggatgatg

SEQ ID NO: 28269 - DNA, 3003 bp, Unknown
  misc_feature (1)..( 3003): 2750-1469P.txt file - cDNA_ID_2994827; gDNA_ID_1620767; Annot_ID_167379
tagatgaaataataataataataataataataataataataataattggatatttggattagagaaattattgaaagtaatgtataaactattgaaccatgaaaatatatttgcgaataaatcatcaaactgaaactatcaaaatgtataagattttgaaaaacataatttcacgaaatatttttttttttttaaatctatgttttgactttttatcaaattaacaaaagcactatctgattatctcaagctgatttagtagaccgaccaacaattttatcttttaagccaaacaagtaatatactttatcataccaaaaattaatatatttatgatactaaagaaaaaactttatatatctcctctagtatatagtaaaagcaacaaaaaaaattaaaaataaatgttaagagagcgttttatggtcggcttttcacgcgtttcactttccaattttcatttcactttataagaatagaagaactccaaaacattaaaaataaggaatcagaaaaaaaatctataataaagttgtgattaaatcattagttttttttatataataaaacgcaggtgatcctaaaagttttcaaagcccaaagactaattgtaagatccgataaattactcgaattttggtgactaatgttacttaaacccaaatagtggaattaacactctttaccagtagaccaaagcaacttggtttaatttattttcttcaatttaccagatcatgatgccgtttaggaccattggactagtccatgctgagtgaaaataattcactcaaaagaataccgtaaatcagaattttccacgtttatcaaataactgactaaaaagcacacataacaaaattttcatgcatcaacttgtactaaaatttatagaaaactggcgtatattggtaaataaatagcagaaacaaaagtggaaaagttttgtggcgccacttgcgaagtgaactttggagctggagcacagctggacacgagcagtggggctgcagctgctaagtgctgacccaaattggggtcacaacctttcctcttataacggtccaatatatattaccgttatgttacatacaatatagtaatttatatatatatatatattttttatatagtaatttatattattttttgcacactatcgatttgatttacaacaagtccttttgttttttgttttttgttttttttgcacaatatcgattgtttgaaccttcaaaattcatgatagaactcccggggtttttcctttttatttttatttttttactctcaaaataagaaaatcatagtccgacgactccatttaaaagacttaaaaaaaattatggtcaaaatatgaatattttatatagatacttaatgcagaagctatagttgcactttttcctcgacaagactcttgtctcttcaataaaaaatgcgttggtttagttttatactgtatttagtaagtatatatgcttttccccacggcccacactcatgcattgatacataccactttattggtctccagactaatctggttatatgtgcccatcattaattcaaattcattaacttacgtaagaataccacccttacaaaacaacttaaaaaaaaaaacttgaatcaacatttaattaaaatttgacaaacatcgttataaattttatataactattacttagttaatttgaaaaatccgttgcttaatagttaataattaatcaaaaacacattgatttactacatattctttttatgccctcggtttggtatcttgatatatcaagcggcttgtaacttgaattcagaatctacgttttcaatgttgtttcctatgatggtcaagtggccgctacttgatttcagaatctacgttctatgatggtgaagatattgaaatgaatgttggaatttcttttattaaatttttagttggtatgactgattagccatacaaaataattaggttgcagccacttattttaacttgtataaaaaataagtgatactactaatttaaatcacctattattactttttttttatgggcacaaaatcacctattattactaattgatacttttattgatttatttaatattattcaatcaatttggtgtaaatctatattaatttccgctaacatcatcctagtactggagaaacttgatttcgtatctacagcctttctagaacaatttttatccaaaacttaaatttgtttacgttcattttccttgttccaaataaataattttctttttttgacattatgcctttgttgaagtaatgcatgtcacatacagtacaagaaaacacgagtttcagacttcagtgtaaaacaggattacatgtattgtaagcgaaaataattaacatcaagtagtcaaaatattttacactatgtaatgttaatgatgtgtaagattagcaagacttacacgttcgcggaaagtaatctaaattatatatttccattaacaaaaggtaatctagctagaattcttaattgactttgatagctagttcttgtataaacaataattcttttctcgttgatatttatatcaaagtggttatcatctatctaaaaatctatacataagaattagaatatccttaaaaattctaccagtaactttcaatagagagttatcaaatatgaatcatgattacatcagtgtttattacacacatatttacacgtaacacataattagtttcatggtcatcgttaattactctgacgataatgtaaactaaaaccgggtggatttaaccggacccatttgccatcactctccataaatcctaaccgtccatctaatcaagcgtagatctaacggtggatatcaaatcaaaggttaattccctccctatatatattagaaaattgatcctgaagcgtgtaccgtacacacatccccatacgaacactcacaatcgttaaaaagaaagaagagaagagagagaaagcttaaatcggaaaaaatg

SEQ ID NO: 28270 - DNA, 3003 bp, Unknown; identical to SEQ ID NO: 28269
  misc_feature (1)..( 3003): 2750-1469P.txt file - cDNA_ID_2994827; gDNA_ID_1620746; Annot_ID_166663

SEQ ID NO: 28271 - DNA, 3000 bp, Unknown
  misc_feature (1)..( 3000): 2750-1469P.txt file - cDNA_ID_2994835; gDNA_ID_2926230; Annot_ID_203623
agtcattagagtaaatattgagaggaagaagtcttatcgtcgccccatttcacttatcattgggtgagatcggtcttgaagaaagagagttagagaggaaaaagaagaatcttattagctctataatatctgatattgcttctcatttagtttttcactttttacattaagattggttgtttgtaacattatggagtggttaatagtataaagataatctgaatattataatatataatgtagagtcttgtccacctaataaccatctcttcaaaagcattgttctatgatctgatttttcggaaagactctgcacttctgttgcacttctgttgttggacactttctctttgctaataaaccactaacacaagtccaagcgaccagagaatccatttcttcttgttttattagagcattcataataaggccaagattataaatcatccgaaaagcccaagtgtcctatgtaatttattttccaaagctcatttaattagatctaagcaactaggttcatatatatatagtctcttgtaatgaacatcaaatagttaactttgaaagcaatctcaaaacattgagatttatgttgttaaagagcttattaagatagcaacacgagattgaaattagatagcttattaaagctttaattagctcacacgaaccaatgtgaaatggggtttgttgttgggtccaagtccaacgaaacgattatatttcttggatggtagttttaataatgggcctgaatcatatgggctttttgatgagactgtgacggtaagaaaataaaaaagggcaaaaccgagaaaacagatctctctgtctcaactcaaacaatcaaaagccctagtaaaaccctagcccccaaagcccttgtgccattgagccgttatataaatccttcactcgctccttgagaagacgaatttgagattgcctctgcaaaggtacttcatttcggtgaacccaattcatgttttcgatgatttttgcttctctatttcttcgattttgcgttttatcgcgttaaaagcacatatcgaaggcttgcagataacgtataataaaaaacgcctgcgagctcaatatttgtgcaatatcctaaaaccatccatttgaggtttcgataaatctctgtgttataagaatttatcttttcttatcgacaatttcgatggatgggacatttattaatcggttttatgatttttaacattgtatgagaaaatctgagtcagatctgaataattgaatccttattcgtctgcattgatcggaaaatagtaccacttgggttttatctagtttactttaaggtgctcatagagtggtaatctcacaattgttgttgtttgaacaatttgggacctttgtttgcatgatttagtctcttatataccaattagaatttgggaccatctgctgattcatatctttgtaattgacagagtaaaatggcgaatcctaaagtcttcttcgacatcttgattggtaagatgaaggcagggcgtgttgtaatggagttatttgcagatgtgactccgagaacagctaataatttccgtgctttgtgcactggggagaatggtattgggaaagcagggaaggctttacactacaaaggctcagcctttcaccgtataatcccagggttcatgtgtcaaggtggagatttcactcgtgggaatggaactggaggagaatctatttacgggtctaaatttgaagatgagaacttcaagttgaagcacactggtccagggattttgtctatggctaactctggtcccaacactaatggttctcagttcttcatctgcacagagaagacttcgtggcttgatgggaaacatgttgttttcgggaaagttgttgatggatacaatgtggtcaaggcaatggaggatgttggctctgacatgggaaatccttctgaacgagttgtgattgaagattgtggtgagctcaagaacccaagttcataagttcttaaaacattgggtgggttgatcttgacaggttattctatcatatgctgtgaagcagagacagcatcttagcgttaaggtcaatctagtctgtgatgcactactttggttttgactatatcatatgaaccttaggaagtggtccatccttgtaagttgttttcttaaaactcttgtgtgagaataggatggatgataataatggttagtttctttatgaagacatttggttttgtagctttcttattttggtgtagttaatatgaatgaaccaaactcttcttaggactcatttgcgaatatgtatccaaaattgctgacttttcgaattgggcagatttcacttcatatgcagaacaagataaactttctgatcatgtgatgataaatattgtttagccaacgcatcacacatttctttgagtagtttctacttatggttaagtttcagcatcaatagtcaatagccaacaatatttggacagtcttctttaaatactccaacaactagtttgccttggcaattaatgtaacttaaagtctagccaactctttggtattagcttcgttattttatacatttcttaaaaccattttattcacatttcttgaccacttggattccaacatagtggccagccatgctgcaccacctcgtcaaaattaccacaataatttgatttggtcaaatcatcatttttttggaaaacaacaacaaaaaaacttaaactttgtataataaggaccctggggttaaaagtataattattactatgtaacaaatcaaagtctaagatggaaaatactataatccgttgacttaaatgtgctagaaaaaataaagaggtcgaagccaggttatcatcgaataagacttttgccgcaaccgtgagagatgttcctgtttgttttttcttttctaaatgttggtttataaatagcatattttttttccttggccccaatagataaagaaccaaacctataatcttcctctataatg

SEQ ID NO: 28272 - DNA, 3000 bp, Unknown; identical to SEQ ID NO: 12817
  misc_feature (1)..( 3000): 2750-1469P.txt file - cDNA_ID_2994839; gDNA_ID_2214573; Annot_ID_186257

SEQ ID NO: 28273 - DNA, 3003 bp, Unknown
  misc_feature (1)..( 3003): 2750-1469P.txt file - cDNA_ID_2994843; gDNA_ID_1971909; Annot_ID_177033
cacgctaaactttttacaattggaattttttttagttacatattgataaatattaggattcatcccgcggtacacggcaagcgtaggtttttattcggtttccatattatattagaatgtattatttgttatttaacaaaaaatataaatttttattgttgttgattaaatattaattagtagaagtaattattaatggggttttctaaaaaatgttaaatatgagtattatttgttttaaatttgttaatttgcaaaaaatcctaggatatattaacttgaatatcttcttgattaaatttgtgaaacattcattttgattaattaatttcttttcttttgattaattagttttttaaaaggaaaaatgttattgaaagaaatcttaaagttaaatgactttctcaaatcaattactattggtagcagagggggagaaccaatcaagccctaattcctttagaaaacccttttaacaatcaaaatagtattggtcaaacaatatttctgcattaattagttttttcatatttagcaaaaaagaattaattaaaaaattcatccctattcgacttcactttctctctctgcctgaaaattttgatcggtttctggtttctcggcgaaagaagtaaagtggccgacaaatagtgatctcgtgaaggaatcagtgtgtacagtggaagaagatgatacatttggctggatttacatgttgcttaggcggcgtcgctctttatcttcttaccaggagcacaggcaggttaggttttttttcttgtctttactatttacgaattacgataactagggtttactgttattcggtggtaatgttcttctttcgtgggacagagatatcaaatcaatcactagggtttaccaactcaaggatttgggtaatgttcctgcattgttctgcatttcaattttaggtggatgggttttggttatgtgtttgatatcattcgtttttattcagaacaattagtagaagtagagagcaaggtggtacctttgatcatcgcagtatcaggagatgttggctctgagactcctattaagtgtgagcatagttatgttctcggtgtatttctcaagagaacggtatgtatgaattggattagataatctagtttttcgtttctgtgattttggatatgttaaaaagaaacgatttttttcaggcagaacaacaggttttgagacgtaattggagattttcatgggttcgaaatagtacattgatgcagccgatgactaaggaagtcccctggtatctggtatgtctgttggactttgattggagtgtattactttctaaagtcatttacaaaatatgatattggttgcctataggacgacgggacaggtcgtgtgaatgtagatgtatctcaaggtgaattaggcttggcgttgacggttggtagtgatgtatttgaaaaggcagagccggtatcgcttgttcaaggagcgttgggttatcttaaaggctttaaggtcttttcttttcctttcctaccacttttcattgatttgcttttgttttgacaatgcttatacattgtggcaccattgttgtctatagatacttggagtaagacacgttgagcgtgttgtcccaattggtacaccgcttacagttgttggtgaggtatgtcttttatctgttagcggtccaaaatacgttttatatctctctttgttatgttgcttaccatgttaacaggctgttagggatggcatggggaatgtcaggattcaaaaacctgagcaaggacctttctacgtcacttatataccgctagatcagctcatctctaaattgggagatttgtcaaggttgtttcttttctctgtttttgcctattcttttcttcgaaaactatgattgaaaaaaattctaaaagatctctttcttttggcaggaggttcaagtatgcctccatgggtttaactgttcttggtgtgattcttatttcaaagcctgtgattgaatatattctaaagagaattgaagatactctagaaagaaggcggcgacaattcgcactgaaaaggtatgacgcaccctaaccacagccacgtatgaagtattcattgcgagttgcgagttgcgagttaagtgttgggtaacttgttgcagagttgttgatgcagctgctaggagagccaaaccagtaactggaggtagtaatagtatctatccattagagtttgtactttgtagtagtaacatgtgaatcctttttctgcatacacttggaattgctctgcttacaaaaacgtcttaccaggtggtacaagcagagatggtgatacacctgatctctgtgtggtttgccttgaccagaagtataacaccgcttttgttgagtaagtataagaccgcttttcttctaaaagctcttgaaaaccctctcactgatcaaacatggcatcttttgattcctctttttgtttggtttggacttgtaggtgtggtcatatgtgctgctgcacaccatgctccttgcaactaaggacctgtcctctttgccgggaacgaatacaacaagttttgaaaatttaccgccattgaaggacaaaactcagaacgatttttacaagcgaacaattactagtcttgtacatatagtaaagcctttgtatcatgagtttttgactagaaatttttttgcattgatagattgtgattgaacaaatgctaatataaatttcaagcttagatttacatttactaatgaagttatataatcacgtttcgatgttaaaataagaagtgaaaaaacgtgaacggcaggattcgaacctgcgcgggcaaagcccacatgatttctagtcatgcccgataaccactccggcacgtccactttttgttaattcctcactatcttaaatatctaattaccgttaattattacaaatcaggttgggcttaattaagcccaaagttaaagacagattagtgaaggagacagagaaagaaacagctctaaaatg

SEQ ID NO: 28274 - DNA, 3003 bp, Unknown
  misc_feature (1)..( 3003): 2750-1469P.txt file - cDNA_ID_2994862; gDNA_ID_2926235; Annot_ID_142748
atacgagataactaaaccaacgaattgttatcggcaaaacaacaaattaataaaatcgaacgaagtgttagaacgaaatgttgtgatcataactccgacacctacaaatggaccgccatactttttatactttcactttaaaacctaccaaaacccctaaattaaatttatacgtgtctatatatacgatctctcgtcgagacaccaattaattttgtataaagattacaattctcacaaaacatgaaaactcccatgagttcttctatcacgtttgcactcgtcttctttctcctttctctcaacccaacttcatcattaccgtccaaacgcgaaagctacgttcaaaacgcgtgtagtgttacacgctaccaagacctctgcgctaaaacgctattgccgtttgcatcagtcgccaagaacagtcccagcaaatgggcacgtgccggcgtttccgttgccataaccgacaacaaagacgtccttagacaccttctcaaaacgaggctttcaacgattgggaaacgagaccgaatcgctttgtcggattgtcgcgaacttctccaagactctcttgatagtctccacaagtccttggccgtcctccggacactcagagccagcgagtttcagcagcagatgagtgatcttgctacgtggcttagctcttccctcactgacaaggacacgtgtcttgatgggtttgaaaagacatcgacgaggtcatcatcaacggtcaggatgattcggaagagagtcacgacgtctatgtacttgtccagcaattctctcgcactcctcaacaagctagcggctaatggtttgtaatctcttaaatcataaacttttacaaaagctttaattttccatgaaagtgtaagatcatattattaataaggtggttcatggctgatcactacgataactgtatctctctcattataatggaattatttacaggcgaaataataatgggcctaatgtcctatattgggccaatgttattagtcaagtattgtcatttttattcgaccgtcacaagcccatgccacctaacgagtaacgaacctctctctcatcaagtcaaaacgtgagaagaagtcggtgataaaaacctaataaaaatcactcgaaagatatttttttcttggttaaacactcaaaaagattttgtctaactactataactcgttttagtcctttccataaaccattttaattccttttacgataataacttgaaattttcttactcttaacgccacaacattgctaaacgaatttcatacaaatatagcgcaattattactttgatagcatattattgttgcttcatatcatatgtttaggtagttgcaacttttgttttgtctacatgtatatatcaccgtgttaattatatattttgtttcatattgttaagatcagtatataactttttaaaacaagatgctttgattttgtcacttacatatacatagtttcatataagagatccttcctaacattgtagttagctagtcttattccattagttttaaatgggtataaaatttaattgttatttataagaaaacaaagaagttgattagagaaagaaaaaaacaattatttataagaaattcaattattagccatcgcgaatctaaaaagttaggcaagaaagtgaaggagatgtggggtgacataactagctaaccgccaggttagcatcacaagtcaacgtaaacataaaacaccaatgctcttccatttttcaaaaaaattgtattcacatccgagtctgaagtttttttgtgatttgtttagatcacaagttaggaattttgtagttttgcgcagggagggagacgccgagggaggtgtttagggagggagggaggtagacgccgtcgctacttagtgtaaattatcttttcagatcgtaaagctagtaaaatattgatagtataattcatatgtagctattaaaggtagatccaaaccatcatggtttaaccatgtgttattgtgtcgtaataagcaaaggctttatcttatataatcagaaacacttaaggacgtaactcaaaatatacaagtttcattaactataatcaaataattgtgtttgagcaaatgtttcaaatatatggttagtttcaatcaaaacgggttttcttttattctagaccattccatttttttctaaactacttagacaatcgtaatcactcggtaaaaaacactgttacaaaatggggtcgtagagatctaccactaattaaattggatttaccttttactctttggctcctttttgaaaaaatttgaagttaacaaaataaccaaataaaataagaataagtcgtcacatttaatctcataggcaatttttgaatctaatacaaatcacgtttttccaaccctgatggtcaaaagcgttatgaatgtgctttgtaaaaaactgtttagtttgttaggacatgcttttatattattacaaattttaaatatcatgtttatgctataattgaaaaatacgaacgtcgaaatcactcaaagctcacaccaatctggctttgagtgctaagttagggtttggcattgactttgtttacgtgagattaccatacctaacgaacctatcatttcattaattacaaattgagtattaaaaaaacatataatatgtgttttcgtgttgttgcaaataatggactaagtaacaatattcattggtccgattttgaaggaaagttcaatgaaataaataaaagggtaatctcgtaataagagtgaaaaacaagccttaacctgtaaacgcttacgctagttaaatacacaacaaagaccgattcgcttttcactctctcgttcaaggtccgactcagttcccggcgagttcgactcggtgattgattttttcctagaaaaataaaatttcttcttaacgattgatcgattttggttttctatctttcgattctagatctagaattcaatttgtgaggtttggagatg

SEQ ID NO: 28275 - DNA, 3003 bp, Unknown; identical to SEQ ID NO: 28274
  misc_feature (1)..( 3003): 2750-1469P.txt file - cDNA_ID_2994862; gDNA_ID_2926235; Annot_ID_203844

SEQ ID NO: 28276 - DNA, 3000 bp, Unknown; identical to SEQ ID NO: 2979
  misc_feature (1)..( 3000): 2750-1469P.txt file - cDNA_ID_2994866; gDNA_ID_2926238; Annot_ID_142811

SEQ ID NO: 28277 - DNA, 3000 bp, Unknown; identical to SEQ ID NO: 2979
  misc_feature (1)..( 3000): 2750-1469P.txt file - cDNA_ID_2994866; gDNA_ID_2926207; Annot_ID_141771

SEQ ID NO: 28278 - DNA, 3003 bp, Unknown
  misc_feature (1)..( 3003): 2750-1469P.txt file - cDNA_ID_2994869; gDNA_ID_1620433; Annot_ID_156918
ggtttaagagcaggaaatcaagaaagatcctacaagctcttccttcttatctaagcctctgacctcatatctctgaacttggtattcctcaaatgtggcaatatactgcgaatacgaattggttagcccggctattaccacgctgaattctcttccattgctgccttctttaagcactgttttcacggcatcacgtagtcgcctccctgccattgttgtgaattcttgcaagcagaacaatagagaaaggaaattactaatgttctacatcagtttagaaatgattttttttgttctgggggagaccggaatacctccggggacgcagagaatcactagctggccaatgcggaggatctgaactggtaatatcgacggctgaaaatggattaagaaacagtttttccatcacaaatagctaagtgggattcaatttttatccatcacagtacaagattatgctctcaccgcccagtcgtatggttgtttcatttcaccggtatcaagcaatatgggtttaggtcgttggcatcgtacttgttcctcagttggattcttgagaaggttccttacaagcctccagaaaggatttcccttacacaaagtcacaacataaagtatagtactaaacatctttcattaccaagttagaaggagaatttgggttttacctgatcatctccttgtttaaagtcaaatgctccaggtccatcagttgttcctgcagcgaaaccaaaacccattgcagctggacatgttttcaccacttcggaacctccattttgtccattaatcgtcacttcaagctgagagaaatcaacatatgcatgacgatagtcaacttttccttgtatctcctcagaggctttagtgaaaagatccgcagccttcttgaactgcctctctccaataatgcgggtactctcaaattcatcagggtagctgaaacatttagtcatgccaagttatacatctaacaagcttgactctctaaataccatattgtactaagagagaacataattttctgtgattggtttccgcattgctgaaagtaaaagtgtgcagttaggaataagacgtaccctggtccacggccgtagcattgctcattctttccaccacaagtactttggttgaattcacaaggaaggcctgtgtctatacagaaggctcccaacacattcggactaacatcaccgcagttagtttgacagaaggcagagacaaatctaggtttgtcagcgtgtctaaatctacttctgacccgtctagcaacgcttgacatccttgtaacggttttaccgccggtagacagtaacgaggatgccatttccatcaaatcttgatctgcaataaaagcaacaaaaagttagttttacaataacaagccattactaaaactcttggagctatggttatttacgctcaccataaggatcactgattatgcttgagactcttctaggagattcaacatcaactgatctacaaccgttttctcgttcaaaccagtcttccatgatacgtgctgcagtgcctttattgtccccgctgattcaaggcatttgtacggctcatcgaagtgccatgagttgcaaaccaattgaaactacccactggaccccattgatcatcaacgaatttgacaagtgtcatctctttatctacatcatattcatatttactacgttcatgtgccggattgttaaggtaagcactgggactacggttcacaccagcatccaagagctcccctgcaagctcagctccaaaagaaatgtctttagagaaagcaacatataaaatgaatcataaaaaaagtgtcccacaagctaaatcactcacctttgttgattaaaatggacccgggacgaagattttcatgagcttgtataatactttgctctataccgtccacaagagcattgaaagattgatgaacaaacccgagagatgtaactaagtacaaaatgtattggagataaccccctggaccagcatgagtatgagttccactaattgcaacattttcctccgtataaagctcaccgtacctctgtttcaatctttcaatcactttgatggtcacaagctgtgaggccataccagcatcaagattaacaaaagcaatccttttcttgtatggctcagccacgatgaacgcacgagctctgagcctgaagtgaacaccagatgctacttgttccatgttagcataacccatcatgttaacatcagctgcaggtcctgtgatgtcatagcttccaagacccatcaaataatcggaatctgagaatatacaagtgagcctcaacagaaatagcaagaacaatgtgcagtgcatagacatagaccacctcgtcatcttcacactcaatatggagtaatcaactctttctcatttctagtccttcctagagaataatacaaacgtaagcaacataaacaaacacacatatttcatgaatctaaaattattaaacccaaaatattatccaacctgaagaagaagtaacgcaatccttaatgattttagctgatgaacacactaaccatttgctggagctgatagaaactaattgatgtgaacgatgtgaagcaaaacaaaagaagatgagagaaactcaaatagacaaatactcaataaagtttcgtttttttttctggtaacaacgataatagtatgtaagtaagagtaaagtgtgaggaaagttcttatttttaaggttgcggagaaagaaagctacccaatttcagctgttttagcgtatctgtccttctcaattcggttttcacttcttattcgatttctaattttcaaagtttggatttttggggtaaagttagttaaaatgcatacataacgggggtagaatgtaatttataaaattgtattgggtctgtttgtgaataaaccaaaacttgtggttcttctctgtctcaacctcagtcgccgatcttcaacagtggctgaaacaatagagagagagcgatacaatg

SEQ ID NO: 28279 - DNA, 30 bp, Unknown; identical to SEQ ID NO: 1142
  misc_feature (1)..( 30): 2750-1469P.txt file - cDNA_ID_2994873; gDNA_ID_1620363; Annot_ID_154744

SEQ ID NO: 28280 - DNA, 3003 bp, Unknown
  misc_feature (1)..( 3003): 2750-1469P.txt file - cDNA_ID_2994876; gDNA_ID_1972176; Annot_ID_180023
tgtagcatatcatcgttttaccaaaaaccgttttttcatccatgactaaaattagttttgtctatatttttgttaaaagaaaacatgtatgtttctacatatatattagttatatatttttctattacattataaacaatatgtagtcaaagttcgttaatttatttaatactctctagtctctattatcaatgcgcatgcatgccagcatagagtagatattttaacaacataacttcgatattagatatatataagtctaacgatacatatcgttacatatgccatatagtttttaattttttttatatagtttttaatttatgtctagttttttttccaccatttatgtctaggttaaatagaggaaatgtatagtgtattccgatccagtgaataacattagttttcagattgtcttgtgtcttattacgtgcatgtgcccagatcatagaccagttagctgtctgaaatataaatgtctgttgttccattaaatgccatgatccataaaatatcacgcatcaaattcatacaaaccgtgtattctatattttcgaataattttaaaggtatgaagcaatcatatggttgtcccaataaagacaaataaaagtgatttattgagaactcgcatcgcatctaatactgaattgtaagatcttccgtatcaaaaattgacccaaatagttcgcatctaacagagaagtttccgaagcagtttcttctttaactattgcttttagtccatttttctttttcctataaagaaaagcctcgacaaagggctgcttttttcactccattattttaataaacaagtaaacagacttttttttttcatctatcacattccttttactgctttacataattagatgccaaattttactggacgaacttaactatcacaaatgttgaatcagtgatccaattgttgtgtatctgtatatccaagactgtaggctaggccatataatctggcaatctattatatatacgatttaaatcaaagcttttatattataaacataaaacttctcactcactaggccagccattagatcaaaattatataatttacagatgtacatgttagaacaaaatgaattttcaggaaacctactattgtgtataaattcgaagttaatgagttcgaagtagattttgtcacgggtttcttggcaaagtttttaatcaagaaacaattatttaaaactttgaaaagtatctggtcgtcaagagtaaattcgtgatcagtgtataaactgctgtttggaggcacgtttattttcttctaaaattatattttgccggcttactttatttttgacttgtatagatgcttgaaaacaaaggtatatgtgtttgaaggcgatgaagaacctaacggtaagcgaaacgtcgtcgtttcttgttctacagcatgtaagggaagcgatgtgtactctaattaaggcttagcgtaaacggtaaacactaattgacatattcccatgagaaccttagccacttttttattttcacgttgttgtaagaatataacaaattgaaaactatatgctgtaatttgtatgttgcatatttcgtattatactaatccctataacaaacatctttgcatacaatcctagttttttcttcagctatgacaatttatattagtccctagaaatcgatatataatcttgcaaaggtataacttcgattcttttcgtataaaaatttgaacaatttgcgtttacgctatatattaattaataaaaaattgttttacaaattctaaacgcaatgttttttgttgttgttgtttgcgtatgaaatagaaacaacttttgactaaaacagtaaagttacacgattagatctagattgtatgatttgccaaactgaacatctggctatctgagttattacatattagaaggatcaccggcgaggattctatgattcaacaaacacaacgttaaaccaatgatttcttataaagaaaataattctctctttagaatatttctgagaaggggttgttgttttttaagtgtcgcttactcgcttcaaactaaagggaataaggatagtaaatagctcatccaggcggctatcacaatcatattaaactataggttacttaaataaatatatcattgaaatttttaattagattttcatgctaattccttagaagttttctttttctttttttttgttaaaactaatttcttcgaagttttgacggtcacgccgacactttgttttgacatgcccgtctaactctttttttgtttgtctttctttaatactactaatatacaatttgtatgacacttaataatgttagtgtttaaaaataattatagttctacataccccaatacaggacaataataagtacatctcttttatttcttatgcgatttcatttatgtctactacgaaccaactagaatttgcatccatcacgatgaccaattgacaaaaacaattgcttaacatttaggttttacggaaattatcattccttaagaattttgtttattttattacagatagaaaaagacgaaaacggaaagattttgacttgaaggcaacgtgaaatttgtgcatttgagtaaccgacacacatgaagctcaaacacaaagacagagctgagctgttgttaattccctgaaaagctcaactcttggcttcatgttttatcgacgtcaccatacatttatttcccttatagacccacttctcctccccaaaataaatactataattagagaaagcattaaacccacccacccaaaaccattaaatcattaagaagaaaatgtttattaataataagaaaaatgaaattatacacaactaaaaaaaaacaaaaggaagaagaaacatcacaatcaccaatcacctcactatatcaaattctttccttattcactaaccaaaaaataaataaactcaaaaccattcttcatttcgccgacactttcttctccaccaccaccatg

SEQ ID NO: 28281 - DNA, 3000 bp, Unknown
  misc_feature (1)..( 3000): 2750-1469P.txt file - cDNA_ID_2994890; gDNA_ID_2936585; Annot_ID_195052
tttatactaaatatttgagtaaatttgatatcctaaacttataaatataaattttttaatcaaacataactaaaaaataatttggattttttttgttgttatttagtgataagaagaatgtgttaaaatgtgattaaattttttttgcttgttatttatttatttttgttgaacggtttagattgaagggaattaattttattgaacggtttagatttaatcgaatcatataaagtttagaagattgttaagaccaaattacccttaatgattttgaataacaaagaacaaaatccaaatttgaaataaaaattaagatcaaattagacaaaattcaatttgtacttcccttataataataagaggatacataacagaatccactaaactcaaatcaaatgtgctacaaaatgggtctcacaatattgtaatgtaatctggtacaaagttaaatttaagtggattacgtaagaaagaatatcaaagctgagttttggttgtctggattaaactataaggtggggaaaataagaattaatctaaaggtgattaaagataaaatttattaagtaaaagatgatttaagattacgttttttacgaaagcgtcggctaacagagagagtcacaaagatccgcccacagggagagaagaagaaaagatcaaaaaccggaaaccataaaaccagaaaccagtcaatagttttggacatagttgaaagcagtattgttaaaacagattcttttccagaaaaccaggagctaagtgtgggccccagttcttccaaatgctcctcaaatgactcaaatcccatctggatgacttacgtggcgattcgaccaaatttcttactcgcgagcgtggaggccacgtgtcttatcacagtctcttcaaacacatttaagacaatttaaccaaaatcctactccatagatactctgaattggtcagatactttaatcaacaaccatattaaatcgttttagaacgaattagattgtataatccagaatttatagactattcactagtaattaaaaaatggtaacttgatatgtcacgtgtatgacacgcgcattggatagagtggggacaaaaacataacttggggaagaaacacaagaagcaaaaccttgaatcagggtgaagaaaaacagcggcggttctgggaaaataaaggaaggattttgtaattaaaagacaaaacaacccttgtctttagagaaaaacagctcttcttatcttgttttctttgtcttctgccttcttcccttggttttataatctctctccgcttcccccaaaaatccaggggcttcttacacgcacacaatcctttaaagctatcgtctttcttatataatcagtgaatcttcattaacacctcccacaaaatctcagaaataactttcacaacagagtcaaagagttccaaatcgtttgtttgtattttgtacgatcaaagttgttggtacttgtaagataatcgaaaccaaagatgcggatgagctgtaatggatgcagagttcttcggaaagggtgtagtgaggattgtagtataaggccgtgtttggcttggatcaaatcgcctgaagcgcaagctaacgcaactgtctttctcgccaagttctatggccgtgctggactcatgaacctcatcaacgccggtcccaatcaccttcgtcctggttagtggtttttcttttaaccttttgatggcagttttgaattatactttccaacgatgccgtttcgtcttaggtcattttttgaacctaattagatcaaatatttttgcagggattttccgatcgttgttgcacgaagcttgtgggaggattgtgaatccgatctatggttcggtgggtttgttgtggtcggggaattggcagctttgtcaagacgccgtggaggctgtgatgaaaggagaaccggtcaaagagatcgccacagacgctgcgacgatcggccaaggtccgcctcttaagatctacgacatccgacatatctccaaggatgataactctgccgccgcggctactggctcaaccgatttgaaacttgcgaaaactcgccgtgctaagcgggtctccaccgtcgcgatacaggcggaatcggagggaaagtctgacgaggctagtcacgattcgtcgttgagtcatcagtctgaaatagtggctgctcatgaaggagagagcaaggaatccgagagcaatgtctctgaggttttggcattctcgcctccggctgtgaagggctccggcgagataaagcttgacctaactttaaggctcgaaccggtgtcacgtgcgtatcatgtggtacctgttaagaagagaaggatcggcgtgtttggcacgtgtcagaaggagagcacgtgtaagactgagcttatgctctaagctccgttttagctatactcagaagttttgcccccatcagctctattcggctcggctctgatgatcttcaagtcgagccggtaacttttttttaatatatagttctctatttccccctttaatgttcactttccatttgtgacaaaagaatagagtatatgtacaaaattatttacagagattaattcaagaattggctgagatattatctattttttaacgaataaaagcaaaaaatttataaaaagaaagttgatttatttctaaatattatgggcctatctgctatcatttaataagtgatattttgggcctatcctttcacgactgtattaaggaaattgtcaataccacgtggcatattttaataggataatggcggctgacctggcagagttgaaagcacaagccatgtgcttcgggtgtgatccagtggagatatcgagggaacgcaaaggtaggggccagattctgtagtaccttcttcgcctacctactctctttcccgaatttatttgccggcggtgatcaatcagaacgggattttagcctgagtaatcggtcactgggaagagaatttcgacggtgagagaagatg

SEQ ID NO: 28282 - DNA, 3000 bp, Unknown; identical to SEQ ID NO: 28281
  misc_feature (1)..( 3000): 2750-1469P.txt file - cDNA_ID_2994890; gDNA_ID_2936585; Annot_ID_143838

SEQ ID NO: 28283 - DNA, 3000 bp, Unknown; identical to SEQ ID NO: 2281
  misc_feature (1)..( 3000): 2750-1469P.txt file - cDNA_ID_2994894; gDNA_ID_1620515; Annot_ID_159238

SEQ ID NO: 28284 - DNA, 3003 bp, Unknown
  misc_feature (1)..( 3003): 2750-1469P.txt file - cDNA_ID_2994902; gDNA_ID_1971923; Annot_ID_177196
tagtgcttttgttagaattggaggatttgatttgattctagatatatataaatgtaggcgattgaattggtggagcattttgagttctcctatggagtatggtcttagctttgaacaaacaaagaatatagtgatcactcaaataatgtacagttcgtttcaatttcctttgttgggattagtttttctatcttataattaaaagaatgaaattgaagtggttgaatctttgctcggttacttttgttgccgatatgtattcaaactgagtttggaatggttcaagagatttgtttaatatttggtatttgatttgaaattgaatggttaaaggaacttataactttaacactgtcgtgccagaaaaaaagcttggtaactgaaaattattactatatacaaaatgaattcacaactgattggctttaccttagagaaggaactagcttcccagagtaggtctattttgaaacaagaagaagatcgttttaagtgaagtatcaatgatttcaagtgtaatcagagtcgagagttccggttatgttgatgctacagcgatgctagtaccgagccttgttcactcttgtattggttaagatatagatttgaaagaaaaatcttacagcctatgtcaccgcaccataaactatttctctttttgtattttttgggtcaaaaccccaccacagactatcttcgataatacgtgcatgagccaatgggcttctttttttaaaatataaataaacaaaaaagaaatctttcaaatttgtgggtatgtgtagttgaagatgttacttgtgcatggcgacaattaaacttgagaaagatttattatttggtatttggaagagagttacagttttataacaagaattgggttagagaaactttggaaaaattcttaaaccctaaacccatggagctaataaaaatctttgtgacttgctttctcctcaagaaatataattgatgttattgtatgaaatgaatacaattaattattaataagattatcaactcccgtttttctcttattcttcttctagtgtcttctaaatacatttgaaatcgtaaataaaacaagtaaacaactcgttcccctagatatatacatacgcttaaaagtaaacgttgtatgcaacggtaactttcgtaatagtaatggggaatatgtaattattgtaatgtaacggtaatattttgttttatcaaaaaaaaggaaaataattaacccacacgactctttaaatacggcctttgcttcttcattaacagatcaaaattctcgtactcaagagagaaaaaaaaaccctagaatcgaatcctctctacaaaagtcctctttgtagaaaaacctatttctcaatcgatcagtggttcagagaatctcttacggttatggttctgttctaatttaatcgtcgtagctagtgcgaagatccggcgatgaagacttgcatgaaagcgatggcgttgaagaaactcgctacagaagactcatcgatctgccgccgagtcaccaccgagattcgctctgttttgcggttctaatgattaattcaagacaacgttgggcttcgtgaatcgtgacaatcgacgacatagagagagcttcccgatcacggtggtggaggaatgctttaccgcgatacagatttgtcgtggattagggtgcaatttttcaaagcccaacaacatcaattctagcccatcaaaacaggtcaattctcagcccattcatcttttaattttttctcatcccaataacaaattcacattacaaatagggttttatacacggattttttatatataaataatacaactttttattcaggtcttcttttttttggaaattttagatagaaaaactttaaagtctttttcttattattttaaataaaatattagataaacagttttttaggtataaataatatttttattttttattttttgaagtgttaaattttatatatgtgtaaactaatcggacacaacatcccgtccataatatgaggtccttcagcggtgtcataggttcaacatgtttacacatcatttgaatttaacactttttttttttttttttttttactaaaaatactttttttgatttttaaaataaaatattattttcttattaagtatacataatatttttattttttatttttaagtgttaaattttagatgtgtgtaaactaatcggacacaacatcccgtccataatatgaggtccttcagcggtgtcctaagttcaacatgtttacacatcatttgaatttaacactttctttattttcatacttttattaaacttaattttaaggtttgcaaataatgttataaatatattgatgtatgttaaaaaatttatcacttaattttagacataatttaaaatcttaacacttatttcttttatttaaaaacatttatatatcaatatctaaactgtaaagtttttttttgtttttaacttaaatttagataaacagttttattttcttacataatatttttgtttttaaaaaaaagttgtaagtatttttgtttaaatgtgtaaaaagaattgaatgataacagattctttactcacagaacaagagatattaaattttctttatgtttatagtatttaataaagtttatagtatttatttccatatatacatttgtttctgtaagaactatccatttgatactagaataaatttcttcatttggattagattgttcagtacaaaactctatttctggcatgtcaataaataacaaatgctaattttggctcttaatcttgttgatagaatactaaacttgcaatgctttttacactaatctttatctctttatatatttatttttaaaaactcttctttcctttttttctgatttaaagtacaaaaaaaaaacaatacatctttccattgaactagaagaaaacattttcactgtccttttgaatcagaagaagaaagagaaaaaaaagagatg

SEQ ID NO: 28285 - DNA, 3003 bp, Unknown; identical to SEQ ID NO: 28284
  misc_feature (1)..( 3003): 2750-1469P.txt file - cDNA_ID_2994902; gDNA_ID_2926219; Annot_ID_203206

SEQ ID NO: 28286 - DNA, 3000 bp, Unknown; identical to SEQ ID NO: 7046
  misc_feature (1)..( 3000): 2750-1469P.txt file - cDNA_ID_2994916; gDNA_ID_1621124; Annot_ID_172206

SEQ ID NO: 28287 - DNA, 3000 bp, Unknown
  misc_feature (1)..( 3000): 2750-1469P.txt file - cDNA_ID_2994957; gDNA_ID_2214559; Annot_ID_134853
gaagatatattgtgtgtttttctttgaatcttgcttcttatcatattttgttcttgtattatagctcatgtgttccatagagatctgaagcctaagaacatcctcgctaatgctgattgcaaaatcaagatctgtgatttaggacttgctcgtgtctcctttactgattccccttctgctgtgttttggactgtatgtatcttcctctatctttctcaattcatatgttctttaataatgcatagtatgttagttcaaatgattcaatgctttcattaagtaaccaatcttgtcatgtgcttttgcaaggactacgttgctacaagatggtaccgtgcgccagagctctgtggttccttctattctaacgtaaagccttgttctttgtcctgtttccatatacttatgcatattgtgatgatgtgtgagcttatggaattgatgtgtgtgtgcagtacacgccggcgattgacatgtggagtgttgggtgcatatttgcagagatgctaactggaaaacctttgtttcctggcaaaaacgttgtgcaccagctagaactcgtgactgatctgcttggaactccgtcgccgataactctatccagggtttgttttgtttttatttttcccggaagctaaactaactctcccaatacagaggcttctctctctctatctccgagagatagacttgctttgaacgcaagtgtgtttttattagctttgtgtgtcatgaagttgtttataatgaatctgtgtagattcggaatgagaaggctagaaagtatttgggaaacatgaggcgaaaggatcctgtacctttcacccataaattccccaatatcgatcctgtggcgctgaagttacttcagcgtttgatcgcttttgacccaaaggaccgtccctctgcagaagaggtaactaagaggaaaaaagagacactgaaatcttggtttgtccagtgttacttgcattcattttaatgatgctttcttctttctgcaggcattggctgatccgtattttcaaggattggcaaatgtggactatgaaccatcgaggcaacctatctcgaaacttgagtttgagtttgagaggaggaaattgactcgcgatgacgtgagggaactcatgtacagagaggtaaataaagacatcatgttcttatgagactgaaaagtatggtttgagttttaggaatctcttaaaacttttttttttgttctctttctggatatgaaacagattttggagtatcatccacagatgttgcaagagtatctacaaggagaagagaacataaactctcattttctatacccaaggtttgactcatttttccaataaacttggttctttataaagagaaagtgtgtcttactttggtgaatcaatcttgatatccagcggagttgatcagttcaaacaagagtttgcccgactcgaagaacacaacgacgatgaagaggaacacaactccccaccacatcagagaaagtacacttcactccctaggtgagttactacttcttgaaactgaaccatcatgagttttaagcgaatcaggctataagtacatgtttgggtttggttgcagagaacgggtgtgctcatcagaagacgaaggttctgattcagttcatgctcaatcgtcttcagcttcagtggtgtttacacctccacagactccaaacacagcaactggcttatcatcacagaaggcgtcacaagtagacaaagcagcaactccggtaaaacggtctgcatgtctaatgaggagtgatagtatctgtgcttcaagatgtgttggtgtctcctctgcagtgtcatagtcagaaaaaaattgatttctcaagttgtttagcagcaaaccattgattgttgtgttctgcctattgtatcatgatgtctctcctgagtgttttcattgttgtaactctcttcttcttcttcttactctctgctcatattggaatctcgtgtgtaatggtttctcttggaacttgaaattcatatatatattcttattaccacaatctacctaaatcatcatttacttaaattagatgttgatatctacaataaacaatagcaagcaaaactaaaatcttttgcataatcttttgctattatcttcataagaaatgattttgagttcataaacaaattcaaacttggactatgaatcgatcaaataaacatacatgaaaaaactcaaaatgagtaatttttaattgtccaagactccaactttaactcttgtagaaataagacaaattaaacccttgtagtccctctctctctcactctcacaaagttgtcaaagactccaactttaactcgaatcgtgctcaggaacttggaatttgaggttcccttctcagggagttcctcttattaacctaaaacccaattcgaatcctttgtttgatcaatcaattaccgctcgattgacgtgtctgtagacttgaagcaagctatgttttgatctcttccaatggcggcagtgactctatcaccctgtagcatggtactcgtccccttgtattttatctatcatggtgcttcttcgtagtcgtagaacgtttccctgatgtaattttttggttttgaaatgttgttattagtgttgtggtagtagaagattgcgtagtgtcattgtaatccaagctcagagaggaaactggaacagaatcaggtacttgtaggagttcttgtgtttgttgtttgttgaaattaggttgcttttgttgatcaatcaagctggttctgtaggttgagtaatttcttcttctccaaagtctggaacatatcttatcgttcaaagcataaatattctgacaatcttcttgagcaagttgagaagtatgcctctgctcggctcgagaatcagtccaagttgattactaaggtaactccaggtttcattgtctcatctgaaacattctatatagattttgagattcatgttttccctatgcatcaggttgcagctttgatg

SEQ ID NO: 28288 - DNA, 3003 bp, Unknown
  misc_feature (1)..( 3003): 2750-1469P.txt file - cDNA_ID_2994961; gDNA_ID_2684256; Annot_ID_193144
acgacgaccttggttttctttcttcgctatctcagtttttagtcaggatcgtactgtagagttaatttcatcattgtattataaaaattaacctaaaagacaaaagtgtaattaggtctgcttttatatatttttaaacggactaacaaatatgaaattacgaataaagagagagatagaaagatgagagactattgaaaggactctatgtttctcaccaaccgtgccctactcgtgtagtttagagtcatataaaccccttaaaaattgacttattatttgttgatttatatacatattagtcaaaatgttgtctttccaacataaattggtgatcaatatcagagtgagactagtaaattgtttataatctcatgtttgattgtagatacacagatatttatctaaactagcagcaatgaaaaatcagaagattaaacgtgaaagggcacacaatgattattaaacaattgactagaattaattaaaacactaactaatatatgggaaactaaacatcaaatctacttttttcagtgtccctctgtctgtcacttgtggaaataaaaatgaaaaatcgcaaaattaaccaaacattaaacctttttaatttgattatgttactctttgtctatgtttccatatgtccccttttcaccgtttgggtgatatggatatcttaaaaggtattgggctttactgtcctctctttcagttctttcggccttcttcctcagaattattatatcaataaaattcattggatcacacttcggcttgggcctttgttcattcatgaacatcttatcgagtggtatatttttggtaaagggtttatcaagtaagatttcttaaaactacataaatcttctatccttaaccaatagtaaacaaatattcggaaataactctaaaaatcataacgataaacaatcatatttgttggaacccatttaaatttcatgacaacaaggaataagaaaaaataattagtataagcttaaaagttatgaaatttcgccgtgaagtaaataacacaatgaacaaaactaacgtggttaaaccatctccatcaatggtttctcattgagaaactgtttaatataaaaataaaatataattaaaatgtatgagagagagtagaattagtctctcaaatgagaaactctgagaaacccataagaacacttgtatatttggtcaaatattattttattattaaaatttaattatataactaatatttattaaaatactaatatttcttttttttgagaaaccaagaaagtatctcactgatggagatgcacttagtataaaattcaacgttggaataatacaaaacgaaataaattaatacttatagatttcagcttcctttttaaaatgcttagattgataaattttctacttttttttcggtgtgccagtctttgtttcagtttcagtgaaagagaaaaaggttatctcttgagcggtgtaggaaggtgaagtaataaatgaagaggatacatcaatcgagtggacacgtacttgaagttgtctgatccacttcaactttgaattgtgagtgtcgtaacaagatgccgtatctattaaaacgttaaacacaaacaatttttaatcacaaatgctattttattggacgaccaaaataactaatgaaagaaaaaactagtatcctgttactagtttgacaaaagttattcagagatgaattgtctgcatgttggtttatactacgtcttaaaatttatataaagatattaaactttgtcatggatatagtaattgtgtatccacaaaatgcaaagatagaaaaaagtcgttatgtttgttgaaagcattagatagatatatgtctcccatgtgagtgcacatggagttatgcatgcacgaaaactgcctctacccttttgtctctctctcgattcttcaatcaattccccaccttaagtttgcatgatctctatatccacctctgagatctagacacgttgctcctcctcttcatcgaacggttctctttgatcatcttgctaagagataagaggaaaagtggcataaatccatgccgagattgctcttatcggtccctttatttgttggttggtcccaatcacttgcactggatatgtaactgtttctccatgttactccttctcttttaccaatatacccttcattttcttcaatttgggtgtagtcccaaatgtgactcttttggcctaattgtatcaacttgtttactttttcttatatatgttcatcaatgttacgacgaatgtaaaaaaaaaaatattatttggaatttgataccgaatctcgacactattagtatattattggacccgtcatatgtatttatcaccagagagatgtgagttttacgatacatagtttttttctttcatctgaaaagaaaattaaacacatgtaaaataatttctgcctgtagtcttttaatcactgaagtaactcgaatttgatgttagataattttttcacaaaaatattcaaattcaacagattaagttgttgatgacagatagctctctgggaggaaaaaaagaagaaaagataatggtccgtattaatatagttgaaaacttgaaactactttttagtttgtatataatacagtagactagggatccagttgagtttctttctttattttgagtttgtgtttatgtttgattttacgtttttatatgtaaataagatattttacgaattatggttttatttgggtagaagttgtagaatgacttaaacaatcaagtggcagaatgagatatataaagtaatataatatatgtaccgttattaacttattgtacatgtgaatgaggaagcttacacacacacaccttctataaatagctgacaaaactggttgttacacacaacacattcataaatctctcaaagtaagaactaagagctttactacagtcctactctctacacatcttctctctctctcaagagctagtcatg

SEQ ID NO: 28289 - DNA, 3003 bp, Unknown
  misc_feature (1)..( 3003): 2750-1469P.txt file - cDNA_ID_2994961; gDNA_ID_2684256; Annot_ID_138117
aatttcatcattgtattataaaaattaacctaaaagacaaaagtgtaattaggtctgcttttatatatttttaaacggactaacaaatatgaaattacgaataaagagagagatagaaagatgagagactattgaaaggactctatgtttctcaccaaccgtgccctactcgtgtagtttagagtcatataaaccccttaaaaattgacttattatttgttgatttatatacatattagtcaaaatgttgtctttccaacataaattggtgatcaatatcagagtgagactagtaaattgtttataatctcatgtttgattgtagatacacagatatttatctaaactagcagcaatgaaaaatcagaagattaaacgtgaaagggcacacaatgattattaaacaattgactagaattaattaaaacactaactaatatatgggaaactaaacatcaaatctacttttttcagtgtccctctgtctgtcacttgtggaaataaaaatgaaaaatcgcaaaattaaccaaacattaaacctttttaatttgattatgttactctttgtctatgtttccatatgtccccttttcaccgtttgggtgatatggatatcttaaaaggtattgggctttactgtcctctctttcagttctttcggccttcttcctcagaattattatatcaataaaattcattggatcacacttcggcttgggcctttgttcattcatgaacatcttatcgagtggtatatttttggtaaagggtttatcaagtaagatttcttaaaactacataaatcttctatccttaaccaatagtaaacaaatattcggaaataactctaaaaatcataacgataaacaatcatatttgttggaacccatttaaatttcatgacaacaaggaataagaaaaaataattagtataagcttaaaagttatgaaatttcgccgtgaagtaaataacacaatgaacaaaactaacgtggttaaaccatctccatcaatggtttctcattgagaaactgtttaatataaaaataaaatataattaaaatgtatgagagagagtagaattagtctctcaaatgagaaactctgagaaacccataagaacacttgtatatttggtcaaatattattttattattaaaatttaattatataactaatatttattaaaatactaatatttcttttttttgagaaaccaagaaagtatctcactgatggagatgcacttagtataaaattcaacgttggaataatacaaaacgaaataaattaatacttatagatttcagcttcctttttaaaatgcttagattgataaattttctacttttttttcggtgtgccagtctttgtttcagtttcagtgaaagagaaaaaggttatctcttgagcggtgtaggaaggtgaagtaataaatgaagaggatacatcaatcgagtggacacgtacttgaagttgtctgatccacttcaactttgaattgtgagtgtcgtaacaagatgccgtatctattaaaacgttaaacacaaacaatttttaatcacaaatgctattttattggacgaccaaaataactaatgaaagaaaaaactagtatcctgttactagtttgacaaaagttattcagagatgaattgtctgcatgttggtttatactacgtcttaaaatttatataaagatattaaactttgtcatggatatagtaattgtgtatccacaaaatgcaaagatagaaaaaagtcgttatgtttgttgaaagcattagatagatatatgtctcccatgtgagtgcacatggagttatgcatgcacgaaaactgcctctacccttttgtctctctctcgattcttcaatcaattccccaccttaagtttgcatgatctctatatccacctctgagatctagacacgttgctcctcctcttcatcgaacggttctctttgatcatcttgctaagagataagaggaaaagtggcataaatccatgccgagattgctcttatcggtccctttatttgttggttggtcccaatcacttgcactggatatgtaactgtttctccatgttactccttctcttttaccaatatacccttcattttcttcaatttgggtgtagtcccaaatgtgactcttttggcctaattgtatcaacttgtttactttttcttatatatgttcatcaatgttacgacgaatgtaaaaaaaaaaatattatttggaatttgataccgaatctcgacactattagtatattattggacccgtcatatgtatttatcaccagagagatgtgagttttacgatacatagtttttttctttcatctgaaaagaaaattaaacacatgtaaaataatttctgcctgtagtcttttaatcactgaagtaactcgaatttgatgttagataattttttcacaaaaatattcaaattcaacagattaagttgttgatgacagatagctctctgggaggaaaaaaagaagaaaagataatggtccgtattaatatagttgaaaacttgaaactactttttagtttgtatataatacagtagactagggatccagttgagtttctttctttattttgagtttgtgtttatgtttgattttacgtttttatatgtaaataagatattttacgaattatggttttatttgggtagaagttgtagaatgacttaaacaatcaagtggcagaatgagatatataaagtaatataatatatgtaccgttattaacttattgtacatgtgaatgaggaagcttacacacacacaccttctataaatagctgacaaaactggttgttacacacaacacattcataaatctctcaaagtaagaactaagagctttactacagtcctactctctacacatcttctctctctctcaagagctagtcatggccaaactcataacttcttttctcttactcacaattttattcactttcgtttgtctcactatg

SEQ ID NO: 28290 - DNA, 3003 bp, Unknown
  misc_feature (1)..( 3003): 2750-1469P.txt file - cDNA_ID_2994973; gDNA_ID_2684256; Annot_ID_193118
atacaatatatcatctcgtccgaccaaatgattttctaatcgagaaaacaaatcgaaacatgtattcaatcaaaaaatttaaaagaatacaaaataaaataaaaacaacaatgccatgaaatagtcgaaaaattacactagctaatgaataaataaaaggatagatgatatttatgtttgattattgattttgattttcatcggatgccataattgagagaatatggttacaatatattgattagtttttttaataaaaataagatatataaaagattagattaatttaattatagtgattatggtttgggtggaagccataattattttaattaattaaaaaagattattttttttaacctaactgctaccgcccgcgaccgcaaacgcttgcgggaaagagctttcaaaaattggcgatttcgaacggtccaaagcgatatctagcggtttctatgattggtgtcaatcgctaacaaccgttaccaactgcaaacgctgggtttgcgggtggtagagggagaaccaatcaaaccctaaatgtgtgtgaccactgaccacaccagccaaagaggtccccgtgaagtgaaaccgtagcacggccatcatgataagatatcaatataaaatagtaagaacatcgattttttatatcattttgtttaaagaccccatgaaatatatagatagcttttacgaaaataatacttaacacgtcttttggacaaactatcttttcatttatttactaataaatacctaaatcaatttaaaatgtgcattgtggtccgacacaacaacaatccaggatacaatgaaagaaagtctacacataaaaacaaaaacgcgcgagccatgtatatacacacatggtcttgactcttataacctaataataaatttatatatatataaaaaataaatacattgttatataaaaaaatcaaaataaattccgaacataacaaaattgatattgcgtccgatcaacattagctccacaggccacaacatatggatgtcatacaaatatacacataagtactctgagtaattgggtagcaacaattacttcttggatgattcagttctctctctaacaattgtatttttgggtctaattacaatctcacaattgataacattttcattttacctatgtgcaaacaaatttgtgaactattccatgatatattttggtataatcatttctttcaaagtgggattacaaaataaataaataaataagttctccgaaaagacatattcacattaaattagtcaaaagatactgcatactaggcataaagacattatgctaactcaaataaaatcagctgcttaagtaatgtattgaggaggacatatatagcaaaacagttagaatccatcaaaacgaacgtacttgcggataacaattctgaaggttccaattttcttatgtctaaaatggattagggggggtttgggatcgagatgggaaatcaaatacggtatcaccaaaccaccacggccataatatgttttgtagctttcgtaaaagagcaattcatcactttcagtaacattattaatttttgtcttaatagaaatagaggaacaatgttgatcacacaataaaaataatagatgatcatgtaaaaaatctaaacgagtgtaaactactaaccacgtcaatatcaaaaccaaagcaaaaagatgttcacaaatgaagactcaaccgagcgacagtgtcttttgaatgagccattttcccttcttttttttaataaacatattatgaattataaataacagaaagaaaatatcaattcttgagaaaaattcgtaaatgtgtaatcaataaatgttggaaataagttattaaaattatagactggggcatatatagtcccagtgccgcgtaaccccacaaagaaactgtagtatactaatgctgtctttcaatcatttattacaattaagggtcctactatttttgcgtatacagataattgcatatttcacacttaccaaagtacatactttcttcgctattcaccaacgtgtatcatatatcaccttttgaaccggcgttgcctctacaatattgtgcttaagcaatgctacaaaaagaaaagggactattgaaatcgaaatgtaataaagattatttgtttagggctgtttctaaattttcaggaactctcgaggtgaaaatttcatacaacaaaacaaacaaacaaaagtagtacgtagaatttaaaaaccacatgtgttcttgttcgagtaattctgtaaattaaatggtgtgaaacgatttctgtaaattaaattaaatggtttatccaagcataaaataacaattttagctaaacagtatttgtactagtctttgtgctattcctaaacaagtcagaaagttgaagaagcaggaaacaaacatagctttactcaaataaattaaacaataaaattatatattgctctacataacaataaaatttgttaatatgtttaattcttgttcaaatactaagcttgaaaatgagcatttgtatcatgtgatgtgaaattgtgaatacgctattatatgtgtgacttaaccccttggaataagcatgtttgcatattctgaatatatataaaaaaaacgtacaaaataagaatcaagatatgaaaaggaaatatcagcatcaagaatccaacggttgaaataaatcaccaaaaaaaaaaagaaaaaaaaggaagggactatatatacacataaacatcccccattccccactttataaaagaccattctacttctatatatatatatagtgtgagtgagacagagcctcacataaataaaaagtctcctaatctgaatacaactattactaacaataattcacttatctaaagaccatcatctgactgactctacgctgaatcatcacgaggaagacttgaatcgaccggagaagagatacgtgtagagatctgattggctcaccggagagaacaaaacaagaaatg

SEQ ID NO: 28291 - DNA, 3003 bp, Unknown; identical to SEQ ID NO: 28290
  misc_feature (1)..( 3003): 2750-1469P.txt file - cDNA_ID_2994973; gDNA_ID_2684256; Annot_ID_138095

SEQ ID NO: 28292 - DNA, 3003 bp, Unknown
  misc_feature (1)..( 3003): 2750-1469P.txt file - cDNA_ID_2994977; gDNA_ID_2684256; Annot_ID_193116
attagccactaacttcccattacttcgtgttctgggactttttcgtggggaaaaccagctcatgtctgtaagaatgtcaggaacactggactcctgtaaacaccaagtacttaagctcagtgattttctgttatcatgtcatatgacaaagtatactgcagtcttgcagatcatgttcagggcttggaaaagttctggtctgcgaagaaacatggacacaatttttgcaaactataatcctaaaagttacagtttatcacttattcaagaaatgagaagacatcattaccagaaacaagacggttgcacagtacttgacaacttcaagattcatccggacatcatctaagctcctggtgaatcatatccattgtttagtcccatattgaaacaactgttgaatcgctaaaaggctcagggcatcgtttagatttacctgtgagcttgatctcctagcccgaagtatgtagcaagtgatgccatctacattagttaaaaggagtaaactttagcaactctgatgtgaatctaacaagaaagctacaggcattgaggtttatcattgagaatcgggaaaaagagagaccttcatgtcaccagctctcttcccaaacttctgagacaacaatgaaagcgaatcaattgtagctttcggctctggcggagagagaccaatttctgcaaatgcttctcttattcttacacaatcgaatcgaattatgttatgtcccgcccaaattcgtcctacaaaaacaccaaaatcaacacttttagcttcgtgagaaagaaagcgaggaagagagagaatcccttaccgtgaagaatgtcatagaccttatcggcgatttcagagaatgtatgtgcagagagaactccgtcgcgcgtaatgccgctacgtcgctttgtgagcgtagagattaaggaaagatcagtaggtcgaaccaaagtggagtaactatagagctcctctagcctccttgggcaaactaagatggccccaaactccaaaatcgcgaaaggctcccctgatttggtcggaaccgccgtctcaaggtcgaaaaacgctatctcgcttctctcatcgccgcccagactcgaagccattgttgaaaagtgaaaactgatagaaagaaggagaagctaataggtgggttttaaagcgaatgagcttcacgcgccacgtcctctttttacggaaaaaatctaaactttgagagacgcaactgtagaatgaggtttatcttgcgtcatctgcattcacttggagtgatcaacaaatttgattcctttcttctacattttcacaccaaatcgcttaaatctaaccacactttgaagcaatatcttgaatctggggaaccaatcaaagctcttttagatttccggcaccgattcagacaaagtcctagttttgttgacagtttttctgttttgtttgccattaaagtttcgtcagctcagaaagcttcctcacttgatggtagacagatccacgctcttgtaagaaaactaggtttcaatgccgttattcaaattcaaacatctttagtgggattctactcttccgtgggtgatgtcgattatgcacgccaagtgttcgacgaaacgcctgagaaacagaacattgtcttgtggacagcgatgatttcagcttacactgagaatgagaactctgtggaagctattgagctgtttaaacgaatggaagcggaaaagatcgaacttgatggagtgattgtgactgtggctttatcagcttgtgctgatctcggggcggtgcagatgggagaagagatttattcgcgtagtatcaagagaaaacgaagattggctatggatttaactctgagaaattcacttcttaacatgtacgtgaaatctggggaaactgagaaagctaggaaactctttgatgaaagtatgagaaaagatgtgactacttacacatctatgatcttcgggtatgctttaaacggtcaagctcaagaatctttagaactcttcaagaaaatgaagacgattgatcagagccaagatactgtcattactccaaatgatgtgactttcatcggcgtcttgatggcttgtagtcacagtggcttagtagaagaaggaaaacgacatttcaagagcatgattatggattacaatctgaaacctagagaagctcatttcggatgtatggtggatttgttttgtcggtcaggtcatttgaaagatgctcacgagttcatcaatcagatgccgataaagccaaacacagtgatatggagaacactgctaggcgcttgcagtcttcacgggaatgttgagctcggagaagaagttcagagacggatctttgagttagatcgtgatcatgtcggagattatgttgcgttgtcaaatatctacgcttcaaaaggaatgtgggatgagaaatcaaagatgagggatcgtgtgaggaagagaagaatgcctggtaaaagctggattgaactcggaagcattatcaatgagtttgtctcaggacctgataataacgatgagcagctgatgatgggagagattagtgaggttttgagatgtttagtttcttgtatgacaagttttgattgtgtaatagggaaaaaaatgtagaccaaaagagtctagtggaagttaatcaaagcccacttgtaggagcctgtggcccaacaaattaaatcaaaattgataacttaaataattttaagttttcacttttatcaaaaaggggcctgggaaaaaaacaaatatcaaagaaagcccaaaaaagacggagaaatcagatttttttgaatttaagaaattaaaaaaaaaaaaggagagctccgtcttcgttgctttttcgagcggtgcctagtctcaacttccatggctgacatcttaccttcaaattttctcaaaccaaccaaaaagcttcttctccttttctaaaatttcatcaaaccctatagggttttctcaatacaattgattttttttttcttcttcttctctatg

SEQ ID NO: 28293 - DNA, 3003 bp, Unknown
  misc_feature (1)..( 3003): 2750-1469P.txt file - cDNA_ID_2994977; gDNA_ID_2684256; Annot_ID_138093
tatcttgcgtcatctgcattcacttggagtgatcaacaaatttgattcctttcttctacattttcacaccaaatcgcttaaatctaaccacactttgaagcaatatcttgaatctggggaaccaatcaaagctcttttagatttccggcaccgattcagacaaagtcctagttttgttgacagtttttctgttttgtttgccattaaagtttcgtcagctcagaaagcttcctcacttgatggtagacagatccacgctcttgtaagaaaactaggtttcaatgccgttattcaaattcaaacatctttagtgggattctactcttccgtgggtgatgtcgattatgcacgccaagtgttcgacgaaacgcctgagaaacagaacattgtcttgtggacagcgatgatttcagcttacactgagaatgagaactctgtggaagctattgagctgtttaaacgaatggaagcggaaaagatcgaacttgatggagtgattgtgactgtggctttatcagcttgtgctgatctcggggcggtgcagatgggagaagagatttattcgcgtagtatcaagagaaaacgaagattggctatggatttaactctgagaaattcacttcttaacatgtacgtgaaatctggggaaactgagaaagctaggaaactctttgatgaaagtatgagaaaagatgtgactacttacacatctatgatcttcgggtatgctttaaacggtcaagctcaagaatctttagaactcttcaagaaaatgaagacgattgatcagagccaagatactgtcattactccaaatgatgtgactttcatcggcgtcttgatggcttgtagtcacagtggcttagtagaagaaggaaaacgacatttcaagagcatgattatggattacaatctgaaacctagagaagctcatttcggatgtatggtggatttgttttgtcggtcaggtcatttgaaagatgctcacgagttcatcaatcagatgccgataaagccaaacacagtgatatggagaacactgctaggcgcttgcagtcttcacgggaatgttgagctcggagaagaagttcagagacggatctttgagttagatcgtgatcatgtcggagattatgttgcgttgtcaaatatctacgcttcaaaaggaatgtgggatgagaaatcaaagatgagggatcgtgtgaggaagagaagaatgcctggtaaaagctggattgaactcggaagcattatcaatgagtttgtctcaggacctgataataacgatgagcagctgatgatgggagagattagtgaggttttgagatgtttagtttcttgtatgacaagttttgattgtgtaatagggaaaaaaatgtagaccaaaagagtctagtggaagttaatcaaagcccacttgtaggagcctgtggcccaacaaattaaatcaaaattgataacttaaataattttaagttttcacttttatcaaaaaggggcctgggaaaaaaacaaatatcaaagaaagcccaaaaaagacggagaaatcagatttttttgaatttaagaaattaaaaaaaaaaaaggagagctccgtcttcgttgctttttcgagcggtgcctagtctcaacttccatggctgacatcttaccttcaaattttctcaaaccaaccaaaaagcttcttctccttttctaaaatttcatcaaaccctatagggttttctcaatacaattgattttttttttcttcttcttctctatggatacgaccctttctcccgccgtggaggcggaacaaatcgccgactcaacgatcgacactgtttctcgtttgatcgccggcgttttctccggcgcacttactggaatcttcgctatgggtattaatatgttttgccgttttgatcatcttttgtttgtgcatttgagtagaggaaagttttcccttttgtgagaattgtgacgattttgttccctctaagttgttcgtttctatccttttggtcaactcttgatctcttgcaacaaatatttcttgtgggcctgcaaattttgtgaaaaaggttacatttttctgtcttgagagatttggttgaacatcgttcagatcattagtcagattatcatacgtgttcaacatcttacagctaatgattttgaacttaattctcactttttagaccaatcctgggtttaagattaggaaagtgtgatgttgttgtctctaggttatttgaataaatcatcgtctctgcatgatccctataaaccattttgttttttaatgttattgtagctggagcttttactggagctgtaactggtgcggtggcaggaagagctgcacagtatggagttctccgtggggctgcacttggcgctgttgctggagctatcctctctgttgaagtgttggaggcttctcgtgcgtattggtatttagagctgtcaggatcaaggggtccatcatctatggttagtctttaattctaacttctgtgcaatcttacacgtttgtcaattttggagatggtttttggagtttttcgactgactttatgatcgagatggtgaaatgattctgagagaaatgtagtttggtggaagaaataatgagatagttttgacatgttactggtgggccaactaaattatgggatgacaggatggcttggtttagtcccttggtaatggtaataggaatgattttgtgttgctaatgccacgaggcagtctaacaaaggatttttagctcgacaaagtctgagtctgttttttttaattgttttttttctgtgggaaggacttgaaccaattgcacggtgtttttgcaatgctggacaagtggacagctctgtctttttttccacctactgccaaatttggtagtgatgactgtttaagtatgagtaagctgagcccttggtatttttgttttggatacaggcagattttgtagagcaactgtttcgtgggagactggtagatgaacaacttatg

SEQ ID NO: 28294 - DNA, 3000 bp, Unknown
  misc_feature (1)..( 3000): 2750-1469P.txt file - cDNA_ID_2994985; gDNA_ID_2684097; Annot_ID_190168
aacaaggaaacagtgattcaagatttgggcttgaaatacttcacactacacaagttgttacactacattgcacacatcccccaccataaaagagtcaacaacataacagaactcttttagtgactaaaactgtaacttgaatctttctggattgtgacattgaatatcctcttactcgttcggttttcggatcatcgaagcttctataaacctcggagcttgcgatttctgagaaaaaatgagtccataagaccaagtaaataagatgaatatggctcaattggggaacatgattcaaagagtaattaccattggggaacaggattctgagaactgatacttttgtagaatttggcgattcgaccacgagattcaggttttggtataaaggttttcttcctcaagccaaagatctcttgtactagaggaacatggcttaatacaagcttccatgctagaaaccaccctgcaaaaccccaaagcaaaaacaaagtcaaattttcaaattaagatcaaagagccctaaagatctaaacttcaggtttgaggagagaaagtacaaagagcgatgaagcagatgacgaatgagatcgccagaagcggacgtatgaggaagaagaagaagagattgtcaaggaacgaaggagatgattccatggattagaatttcttgctttcaaagatctctctctctctctctttgtaatttttgattacgtggaagaagaagatacgaaaagaccaaactgaaattaaaaagagtttttgagatcaggttttggttttgtctttaaacaaatcgagtgatgatgttaaaaaaatgatatatcatgtatgggcttataatagcccactgggcttttggatgtttctagctctcacgtctacatttctacatcaccgctgtaaacagttaaatatgttttttacgagtgtgagagaactcattctcaacaaattttttgttttcttgattgtgtttatatattaaaatattgatatatttccttcgtttttattcatcattttagtttattcatcgttttagaactcaaaatttgttttataataatcatcgttttagagttttaattcagatgtttggaaaacattttagttttgtccctattgttttagtgctttgactaataaaaaaattataaatatatgaataaagggcaaaaacgaaaatttaattattttttgaatttatgtgcaaaattattttattttaaaacggagggagtattacataaattttatcaaatatttatgttatttcatgaatatttctataaatctttttcaaagattgttaaaacaatattatgattaaaaatgtacagaaagaaatataatttaaaacacgatctttgtaaacatttttttatgaacttataaatatttttagtgaaaaatacataacaaagagttataataaagagctgagactgtacaaaacaatttttcagaaaatgataaaatttattttcaaaaatattttgttaaatcggtaattgtaataaaaaaatcaaccttaagagaatatatgttaactaagtttttaaatacttataaaccattaatatgtataagtgagataatgttttgttttaccaattaaacaataaataagattggaaatacatgagtagtaaaaagcgcacataatgaaaactacatgaagaatatttataattaaaatctttcgaatttataaaggggcattttctatatgaaaaatactttatttagttgtacattttcgaaacttcccttcattaaaagcgttaaattgtttttgggactttgagagcgttaaattgtcaaaagattatacagtccaaaagatcatacatgttttggtttgatttttaaaattgaagggaaaaaatggtcaaattcatattatcccagttgttgttatgcttatagagaaacatattcgtagtcatctgtacatcttcctttaaaaataagaaaattgacgttactgttgttggaaatcgtaagttttaatattaaatataaattaagtcttatggctattaatttttctcttttttgccttgcttttcagctgctaagtaactagcggaccaacacgcaatgcaaagtgattcaggtagtcgtctatacattctggcggtcattgttattttgtttatatacaaattttgttaagatttttcagaaatacgtacataaaacgaaacaaattaaccaaatgcatatatcaaaccaaaagaatagacatatattacgtagcaaacatttgcgaaaactatcgccgatatatttgcaagaatcaaaataacaaattttagtttgtaactgtaataaatttattaaaatcaatatattttaggcaaatactagtccgggtttcaatattcaaagacaaatctactctaatacatacaatataccatagtccaactccatcccatttcgtccacttctcacttttcatgcggtttagcattaccaaaatcttgatgctattggtatggtctatttttattggtaaaactttttttttctatttttttttgttatcatccattcataccctaattacttaaagtaagacaaaactatttaaggagatcaaaagctgatcttgcatagttgcataataagatatttatttgaacttatctttgcactttgaaatctaaaatttttctaacaaaaaacgttttatatcggtcaaaatgaatctaactaactttttgggctagattagctttagaaacccacttttttcatcaaattgacacgatcctactactaccggctattaccagtcgacaaggtccaccgcataagctaatcaaacctgaaaagcgtccagatacataactctctattaccggtacccggtaatctcctttctcatttatttgttccttctcttcttctcaaatccacagaaccaaaaaagcgaattaggtcaaaaaaacaaatcccaaatcttcatcatcttcaacgtttatg

SEQ ID NO: 28295 - DNA, 3000 bp, Unknown
  misc_feature (1)..( 3000): 2750-1469P.txt file - cDNA_ID_2994985; gDNA_ID_2684097; Annot_ID_137063
cactacattgcacacatcccccaccataaaagagtcaacaacataacagaactcttttagtgactaaaactgtaacttgaatctttctggattgtgacattgaatatcctcttactcgttcggttttcggatcatcgaagcttctataaacctcggagcttgcgatttctgagaaaaaatgagtccataagaccaagtaaataagatgaatatggctcaattggggaacatgattcaaagagtaattaccattggggaacaggattctgagaactgatacttttgtagaatttggcgattcgaccacgagattcaggttttggtataaaggttttcttcctcaagccaaagatctcttgtactagaggaacatggcttaatacaagcttccatgctagaaaccaccctgcaaaaccccaaagcaaaaacaaagtcaaattttcaaattaagatcaaagagccctaaagatctaaacttcaggtttgaggagagaaagtacaaagagcgatgaagcagatgacgaatgagatcgccagaagcggacgtatgaggaagaagaagaagagattgtcaaggaacgaaggagatgattccatggattagaatttcttgctttcaaagatctctctctctctctctttgtaatttttgattacgtggaagaagaagatacgaaaagaccaaactgaaattaaaaagagtttttgagatcaggttttggttttgtctttaaacaaatcgagtgatgatgttaaaaaaatgatatatcatgtatgggcttataatagcccactgggcttttggatgtttctagctctcacgtctacatttctacatcaccgctgtaaacagttaaatatgttttttacgagtgtgagagaactcattctcaacaaattttttgttttcttgattgtgtttatatattaaaatattgatatatttccttcgtttttattcatcattttagtttattcatcgttttagaactcaaaatttgttttataataatcatcgttttagagttttaattcagatgtttggaaaacattttagttttgtccctattgttttagtgctttgactaataaaaaaattataaatatatgaataaagggcaaaaacgaaaatttaattattttttgaatttatgtgcaaaattattttattttaaaacggagggagtattacataaattttatcaaatatttatgttatttcatgaatatttctataaatctttttcaaagattgttaaaacaatattatgattaaaaatgtacagaaagaaatataatttaaaacacgatctttgtaaacatttttttatgaacttataaatatttttagtgaaaaatacataacaaagagttataataaagagctgagactgtacaaaacaatttttcagaaaatgataaaatttattttcaaaaatattttgttaaatcggtaattgtaataaaaaaatcaaccttaagagaatatatgttaactaagtttttaaatacttataaaccattaatatgtataagtgagataatgttttgttttaccaattaaacaataaataagattggaaatacatgagtagtaaaaagcgcacataatgaaaactacatgaagaatatttataattaaaatctttcgaatttataaaggggcattttctatatgaaaaatactttatttagttgtacattttcgaaacttcccttcattaaaagcgttaaattgtttttgggactttgagagcgttaaattgtcaaaagattatacagtccaaaagatcatacatgttttggtttgatttttaaaattgaagggaaaaaatggtcaaattcatattatcccagttgttgttatgcttatagagaaacatattcgtagtcatctgtacatcttcctttaaaaataagaaaattgacgttactgttgttggaaatcgtaagttttaatattaaatataaattaagtcttatggctattaatttttctcttttttgccttgcttttcagctgctaagtaactagcggaccaacacgcaatgcaaagtgattcaggtagtcgtctatacattctggcggtcattgttattttgtttatatacaaattttgttaagatttttcagaaatacgtacataaaacgaaacaaattaaccaaatgcatatatcaaaccaaaagaatagacatatattacgtagcaaacatttgcgaaaactatcgccgatatatttgcaagaatcaaaataacaaattttagtttgtaactgtaataaatttattaaaatcaatatattttaggcaaatactagtccgggtttcaatattcaaagacaaatctactctaatacatacaatataccatagtccaactccatcccatttcgtccacttctcacttttcatgcggtttagcattaccaaaatcttgatgctattggtatggtctatttttattggtaaaactttttttttctatttttttttgttatcatccattcataccctaattacttaaagtaagacaaaactatttaaggagatcaaaagctgatcttgcatagttgcataataagatatttatttgaacttatctttgcactttgaaatctaaaatttttctaacaaaaaacgttttatatcggtcaaaatgaatctaactaactttttgggctagattagctttagaaacccacttttttcatcaaattgacacgatcctactactaccggctattaccagtcgacaaggtccaccgcataagctaatcaaacctgaaaagcgtccagatacataactctctattaccggtacccggtaatctcctttctcatttatttgttccttctcttcttctcaaatccacagaaccaaaaaagcgaattaggtcaaaaaaacaaatcccaaatcttcatcatcttcaacgtttatggatttgagtcgttctcaaacaaattttcaattagggtttggttgttcacacgcatcaatg

SEQ ID NO: 28296 - DNA, 3003 bp, Unknown
  misc_feature (1)..( 3003): 2750-1469P.txt file - cDNA_ID_2994992; gDNA_ID_2684098; Annot_ID_190204
attattatggttttggatagcaatattatttaagcagataattattattttttgatataacggaagggaccatcatgttccgttgtctccaagagtttacgaacagatacaagttatctagaagattagttccaaatcataatatatatatttttttaatacaagtatacaagtttccacatcttttgttgactgtttattcgagaagaaacaaagataacaccttttgtccgtgtaatcatatatcaactcgtgggtcatgactcatgtatgatcaaacctaaacatcttcaaaaccggtaaaaaaatcagtaagtaaaacaaatattgagctgtaaaaaaaattcttagaattgttttaggcagatttatctttagaatttagagataaaacaaaaattgttaaaccaacaaatggatccacaaaacaaaaccatgagctctgaagtcaatctcaccagtcaccatgactcacttactacgtgtatctgtcttttttacatatattttgaaagtttcatcctttatcccgatggatgcgaataatacaaataacctaacaaaactcgaatcagagaattccagatattacttacataagacaattttagcaattagctttcaaatctcatctctttattctctctctctatctcttctcctcaagaaccctaaaaatctccagaaaaaagatcccaaatttcgtatttcaacgatctgaatctctctctctttcgggtttattttgtttcccgatatggtttagaatttgtgatttaaatggaagctgacgtgtcaatttcctgaaaaaacccttatcgcgaaattttccagattaccaaaaaaaaaaagattgaaacttttttcgatttgtttgaagaagaagcacggtaggaacgacgacgatgaatcgtgctttggtcctacttttatatgtttgtactgtttcttgtttagcttcaagcaaagttattttgatgaggaataacatcactctctcttttgatgacatcgaagctaacttcggtgagtctcttccttatcactctgttttcatttcagatttttgatgaattgaatctgtaattggggtcaacgcataaaaaagaagagatttttaatctgtttcttgcaacagctccgtcagtgaagggtacaggtgaaattggagtggtttatgtggctgagcctcttgacgcttgtcaaaatcttatgaataaaccagaacagagctccaatgaaacttctccttttgtgttgattgttagaggaggctgtagttttgaagagaaagttagaaaagctcagagagctggtttcaaagctgctattatctatgacaatgaagaccgtggaacattgatagcaagtatgaaaatttatgtcttgatcttgtgattctgttgtttctacattttgctgaaagttttgagatttgcagtggcaggtaactctggaggtataaggattcatgcggtctttgttacgaaagaaacgggagaagttttaaaggagtatgcgggtttccccgatacgaaagtttggttgatcccaagttttgagaactcggcgtggtctattatggcggtttcgtttatctcgctgcttgcaatgtcggctgttctcgctacttgtttctttgtgcgtaggcatcgaataagaaggcggacatctcggtcctctcgagtgcgtgagtttcacggtatgagccgccgcttggtgaaagcaatgccgagtcttatattcagttcgtttcatgaagataacactactgcattcacttgtgctatttgccttgaagactacactgttggagacaagctcaggctcttaccttgctgtcacagtgagtacattgtatacaaaatcctgtaactcagggcacatttgttagaacttagaactaactaacaatttctgattctgtttttgtgtgtatgttttcagagtttcatgctgcgtgtgttgactcatggttaacctcttggagaactttctgtccggtgtgcaaacgagatgcaagaacgagcacgggagagcctccagcttcagagagcacgccattgctctcatctgctgcatcgtctttcacttcttcctctctgcactcttcagtcagatcatctgcactattgattggtccttccttgggctcattaccaacttcaatctctttctctcccgcatacgcaagctcatcctatattagacaatcattccagtcttcctctaaccgtcgatcacctccaataagcgtaagtcgaagctcagtggatctcagacaacaagcagcttctccatctccatcaccatcacagagatcatacatttcccatatggcttctccacagtcactaggttacccaactatctcccctttcaacacgaggtacatgtcaccgtatagacctagcccgagcaatgcatcacctgcaatggctggatcatcgaattatccgttgaatccactgcgttacagtgaatcagctggaactttctctccatacgcctctgcaaactcgcttccagactgttagaaagtctacagaaccaaccactcttggttcaggtcatataagattatttcttttgcatttgagttttactacgaaacgtacttctggcgtttgtgtgtggtgtgtgtgtgtgtaacgatgcttttatagtcttttggttgagatgaaacatcatcggatttaggttagagagattttaacacttcgacaattacacaaactcggttcctttgtacaaagaaatatgagcttatgtatatacacgtctctttccttgttattactatctgatcactcttatctctatccgtttgcattgatacgatcctatctagtaaataggcccagtaggcctaattaaggtccagtaacataaactgatttgggctaaagtgaatgaagaaaactccatcccaccgttggccggtctattctcctccggcgtcgttgaggatctccggtggtttaaggaatcaatcacaccatg

SEQ ID NO: 28297 - DNA, 3003 bp, Unknown
  misc_feature (1)..( 3003): 2750-1469P.txt file - cDNA_ID_2994992; gDNA_ID_2684098; Annot_ID_137079
attatttaagcagataattattattttttgatataacggaagggaccatcatgttccgttgtctccaagagtttacgaacagatacaagttatctagaagattagttccaaatcataatatatatatttttttaatacaagtatacaagtttccacatcttttgttgactgtttattcgagaagaaacaaagataacaccttttgtccgtgtaatcatatatcaactcgtgggtcatgactcatgtatgatcaaacctaaacatcttcaaaaccggtaaaaaaatcagtaagtaaaacaaatattgagctgtaaaaaaaattcttagaattgttttaggcagatttatctttagaatttagagataaaacaaaaattgttaaaccaacaaatggatccacaaaacaaaaccatgagctctgaagtcaatctcaccagtcaccatgactcacttactacgtgtatctgtcttttttacatatattttgaaagtttcatcctttatcccgatggatgcgaataatacaaataacctaacaaaactcgaatcagagaattccagatattacttacataagacaattttagcaattagctttcaaatctcatctctttattctctctctctatctcttctcctcaagaaccctaaaaatctccagaaaaaagatcccaaatttcgtatttcaacgatctgaatctctctctctttcgggtttattttgtttcccgatatggtttagaatttgtgatttaaatggaagctgacgtgtcaatttcctgaaaaaacccttatcgcgaaattttccagattaccaaaaaaaaaaagattgaaacttttttcgatttgtttgaagaagaagcacggtaggaacgacgacgatgaatcgtgctttggtcctacttttatatgtttgtactgtttcttgtttagcttcaagcaaagttattttgatgaggaataacatcactctctcttttgatgacatcgaagctaacttcggtgagtctcttccttatcactctgttttcatttcagatttttgatgaattgaatctgtaattggggtcaacgcataaaaaagaagagatttttaatctgtttcttgcaacagctccgtcagtgaagggtacaggtgaaattggagtggtttatgtggctgagcctcttgacgcttgtcaaaatcttatgaataaaccagaacagagctccaatgaaacttctccttttgtgttgattgttagaggaggctgtagttttgaagagaaagttagaaaagctcagagagctggtttcaaagctgctattatctatgacaatgaagaccgtggaacattgatagcaagtatgaaaatttatgtcttgatcttgtgattctgttgtttctacattttgctgaaagttttgagatttgcagtggcaggtaactctggaggtataaggattcatgcggtctttgttacgaaagaaacgggagaagttttaaaggagtatgcgggtttccccgatacgaaagtttggttgatcccaagttttgagaactcggcgtggtctattatggcggtttcgtttatctcgctgcttgcaatgtcggctgttctcgctacttgtttctttgtgcgtaggcatcgaataagaaggcggacatctcggtcctctcgagtgcgtgagtttcacggtatgagccgccgcttggtgaaagcaatgccgagtcttatattcagttcgtttcatgaagataacactactgcattcacttgtgctatttgccttgaagactacactgttggagacaagctcaggctcttaccttgctgtcacagtgagtacattgtatacaaaatcctgtaactcagggcacatttgttagaacttagaactaactaacaatttctgattctgtttttgtgtgtatgttttcagagtttcatgctgcgtgtgttgactcatggttaacctcttggagaactttctgtccggtgtgcaaacgagatgcaagaacgagcacgggagagcctccagcttcagagagcacgccattgctctcatctgctgcatcgtctttcacttcttcctctctgcactcttcagtcagatcatctgcactattgattggtccttccttgggctcattaccaacttcaatctctttctctcccgcatacgcaagctcatcctatattagacaatcattccagtcttcctctaaccgtcgatcacctccaataagcgtaagtcgaagctcagtggatctcagacaacaagcagcttctccatctccatcaccatcacagagatcatacatttcccatatggcttctccacagtcactaggttacccaactatctcccctttcaacacgaggtacatgtcaccgtatagacctagcccgagcaatgcatcacctgcaatggctggatcatcgaattatccgttgaatccactgcgttacagtgaatcagctggaactttctctccatacgcctctgcaaactcgcttccagactgttagaaagtctacagaaccaaccactcttggttcaggtcatataagattatttcttttgcatttgagttttactacgaaacgtacttctggcgtttgtgtgtggtgtgtgtgtgtgtaacgatgcttttatagtcttttggttgagatgaaacatcatcggatttaggttagagagattttaacacttcgacaattacacaaactcggttcctttgtacaaagaaatatgagcttatgtatatacacgtctctttccttgttattactatctgatcactcttatctctatccgtttgcattgatacgatcctatctagtaaataggcccagtaggcctaattaaggtccagtaacataaactgatttgggctaaagtgaatgaagaaaactccatcccaccgttggccggtctattctcctccggcgtcgttgaggatctccggtggtttaaggaatcaatcacaccatgccaatgagatacctcaacgcaatg

SEQ ID NO: 28298 - DNA, 3003 bp, Unknown
  misc_feature (1)..( 3003): 2750-1469P.txt file - cDNA_ID_2994996; gDNA_ID_2684098; Annot_ID_190203
atatattgtttcggtttaagataaatgtatcacgcaattcaaacatatgtcaaaaaatcaggctgggaacttattcccagaggtttgtacctgttgctgtcttggtttacttaagacttgtgatatcagtttgcaatgtattggaaaataatatagtatttgccacaagattgttccatttcatcttctttttgtattttaatccgtatttgtatcaatcatattgctctctattgcaaggttcgtagtcaactcgcaaacacccccaccttacaattgccagttatcgattatttttacgctaataaatctaaaattccattttgtttcgttttttttttgcaatggaaacatttaaataaatacaaaagaaatacctacgataatggggtatttatacaaaaaaatgaatttgaaacaaaaaaatataatgaaaaaaagagagagttaaatttgctaagaatttattcttcaggtttctgttttcgttggaactaagtttggagttggagcaggagcaggagcaccgagaggaatttagtggggagcgaaaagaacctaaagaaacgtggaatattaatgatgaccaattctctaataacattgttagacataatttaatatgaacattactttcatcattgtcatttgtctgctaatgtattcgcgtgtttgcttttacattattgacttatgtctgaatattataacgccatatagttaaaacaatagacccctaaatgtatcatgagcacatttggtatccataaaaactgatggaaaatcatcacaaaagtgatagctatctcggtttatttagtatattatatcagattttgaagtgacttcaactcagtagtgactatttttacgtactaacttatatatgtaaatattcagcattcgcattcgcatgtgtatgggcatatatattatacataataaatgaaaattggatgagacaagatggaccgctctaagtgtgattgagatgtagcttgagaccaaagagaccgttatcatcatcaaccatcatgtcctctctttagcacatggaaagcaatatactatagaaattgtactatatatatggatcaagcatacgaatcagagtccattttgatgtgaaggcatcaaatctgcaaaattaaatcaagtttcttgagcgacaaagctgatgatatcattcttgcacttggagtattttctacaacataacctaagccggtggttatttaataatgtttagtaatcttgaattccatacatttacgagggagtgtctgcatagttgatagtaatcatgaagaagctaggtcggttcatttcatcaaattatatgttttacaaaaattgtatcaacatgacttgaatccattatcacagtaataaaagtttgaaacggaatgaatacaatattgagatgctgcaagataaatggatataattaatgctttgtcttttctttcttcttttaagccttaagtgtcacaaacgtaaacatcaagattcaataccataatgatataaaagatcgtgcgtgaaccatgtgaatgtgatcaaacccaaagtgaagctaacaagtaataacacatgtcaaagatatacaaacatttgtatttagagtgtataactataaccccatcccaagagtgtcgaaccaaaaaccataatctaagagatttataccgatcagatcacggaagaagttatagaaaaccgcatctcgttgattctgattttcgacaaataagatacaagccagcccaccgtctgcacggatactcaacttccctgttggtaatcgagttaatttcgaattacatgggtcaaattagaaaaactgttcttgttttatttgtttttaaatgggccatggggttttaatgtcttagtatttaatgggcttatttaaggccgactctaataatagacgaaattaaaaataggcccatttatccgttaattttgccatggtttttttttccatgaatattgcaagttttttttttggtgtaaatcttacaaggtttaagaaagaaaaagtgaattaatactactatcaaaaccgggagtaacagctaattatgtgtgtattattatggttttggatagcaatattatttaagcagataattattattttttgatataacggaagggaccatcatgttccgttgtctccaagagtttacgaacagatacaagttatctagaagattagttccaaatcataatatatatatttttttaatacaagtatacaagtttccacatcttttgttgactgtttattcgagaagaaacaaagataacaccttttgtccgtgtaatcatatatcaactcgtgggtcatgactcatgtatgatcaaacctaaacatcttcaaaaccggtaaaaaaatcagtaagtaaaacaaatattgagctgtaaaaaaaattcttagaattgttttaggcagatttatctttagaatttagagataaaacaaaaattgttaaaccaacaaatggatccacaaaacaaaaccatgagctctgaagtcaatctcaccagtcaccatgactcacttactacgtgtatctgtcttttttacatatattttgaaagtttcatcctttatcccgatggatgcgaataatacaaataacctaacaaaactcgaatcagagaattccagatattacttacataagacaattttagcaattagctttcaaatctcatctctttattctctctctctatctcttctcctcaagaaccctaaaaatctccagaaaaaagatcccaaatttcgtatttcaacgatctgaatctctctctctttcgggtttattttgtttcccgatatggtttagaatttgtgatttaaatggaagctgacgtgtcaatttcctgaaaaaacccttatcgcgaaattttccagattaccaaaaaaaaaaagattgaaacttttttcgatttgtttgaagaagaagcacggtaggaacgacgacgatg

SEQ ID NO: 28299 - DNA, 3003 bp, Unknown
  misc_feature (1)..( 3003): 2750-1469P.txt file - cDNA_ID_2994996; gDNA_ID_2684098; Annot_ID_137078
attcccagaggtttgtacctgttgctgtcttggtttacttaagacttgtgatatcagtttgcaatgtattggaaaataatatagtatttgccacaagattgttccatttcatcttctttttgtattttaatccgtatttgtatcaatcatattgctctctattgcaaggttcgtagtcaactcgcaaacacccccaccttacaattgccagttatcgattatttttacgctaataaatctaaaattccattttgtttcgttttttttttgcaatggaaacatttaaataaatacaaaagaaatacctacgataatggggtatttatacaaaaaaatgaatttgaaacaaaaaaatataatgaaaaaaagagagagttaaatttgctaagaatttattcttcaggtttctgttttcgttggaactaagtttggagttggagcaggagcaggagcaccgagaggaatttagtggggagcgaaaagaacctaaagaaacgtggaatattaatgatgaccaattctctaataacattgttagacataatttaatatgaacattactttcatcattgtcatttgtctgctaatgtattcgcgtgtttgcttttacattattgacttatgtctgaatattataacgccatatagttaaaacaatagacccctaaatgtatcatgagcacatttggtatccataaaaactgatggaaaatcatcacaaaagtgatagctatctcggtttatttagtatattatatcagattttgaagtgacttcaactcagtagtgactatttttacgtactaacttatatatgtaaatattcagcattcgcattcgcatgtgtatgggcatatatattatacataataaatgaaaattggatgagacaagatggaccgctctaagtgtgattgagatgtagcttgagaccaaagagaccgttatcatcatcaaccatcatgtcctctctttagcacatggaaagcaatatactatagaaattgtactatatatatggatcaagcatacgaatcagagtccattttgatgtgaaggcatcaaatctgcaaaattaaatcaagtttcttgagcgacaaagctgatgatatcattcttgcacttggagtattttctacaacataacctaagccggtggttatttaataatgtttagtaatcttgaattccatacatttacgagggagtgtctgcatagttgatagtaatcatgaagaagctaggtcggttcatttcatcaaattatatgttttacaaaaattgtatcaacatgacttgaatccattatcacagtaataaaagtttgaaacggaatgaatacaatattgagatgctgcaagataaatggatataattaatgctttgtcttttctttcttcttttaagccttaagtgtcacaaacgtaaacatcaagattcaataccataatgatataaaagatcgtgcgtgaaccatgtgaatgtgatcaaacccaaagtgaagctaacaagtaataacacatgtcaaagatatacaaacatttgtatttagagtgtataactataaccccatcccaagagtgtcgaaccaaaaaccataatctaagagatttataccgatcagatcacggaagaagttatagaaaaccgcatctcgttgattctgattttcgacaaataagatacaagccagcccaccgtctgcacggatactcaacttccctgttggtaatcgagttaatttcgaattacatgggtcaaattagaaaaactgttcttgttttatttgtttttaaatgggccatggggttttaatgtcttagtatttaatgggcttatttaaggccgactctaataatagacgaaattaaaaataggcccatttatccgttaattttgccatggtttttttttccatgaatattgcaagttttttttttggtgtaaatcttacaaggtttaagaaagaaaaagtgaattaatactactatcaaaaccgggagtaacagctaattatgtgtgtattattatggttttggatagcaatattatttaagcagataattattattttttgatataacggaagggaccatcatgttccgttgtctccaagagtttacgaacagatacaagttatctagaagattagttccaaatcataatatatatatttttttaatacaagtatacaagtttccacatcttttgttgactgtttattcgagaagaaacaaagataacaccttttgtccgtgtaatcatatatcaactcgtgggtcatgactcatgtatgatcaaacctaaacatcttcaaaaccggtaaaaaaatcagtaagtaaaacaaatattgagctgtaaaaaaaattcttagaattgttttaggcagatttatctttagaatttagagataaaacaaaaattgttaaaccaacaaatggatccacaaaacaaaaccatgagctctgaagtcaatctcaccagtcaccatgactcacttactacgtgtatctgtcttttttacatatattttgaaagtttcatcctttatcccgatggatgcgaataatacaaataacctaacaaaactcgaatcagagaattccagatattacttacataagacaattttagcaattagctttcaaatctcatctctttattctctctctctatctcttctcctcaagaaccctaaaaatctccagaaaaaagatcccaaatttcgtatttcaacgatctgaatctctctctctttcgggtttattttgtttcccgatatggtttagaatttgtgatttaaatggaagctgacgtgtcaatttcctgaaaaaacccttatcgcgaaattttccagattaccaaaaaaaaaaagattgaaacttttttcgatttgtttgaagaagaagcacggtaggaacgacgacgatgaatcgtgctttggtcctacttttatatgtttgtactgtttcttgtttagcttcaagcaaagttattttgatg

SEQ ID NO: 28300 - DNA, 3000 bp, Unknown
  misc_feature (1)..( 3000): 2750-1469P.txt file - cDNA_ID_2995000; gDNA_ID_2684098; Annot_ID_190197
taattaaattttctattccaaaattattgcttttccaaaagctggcttatgacatttcatgattacacttgtcgagtattgactatgcatttgttcatttatttattgactttctcaaacttttgttccactcaaattcagttttaatcttcttgataatcctcgtaagaaaaaagcataccacgtgtttaggatagactaattattcaccttacttagcataagcttatctaaggaaaagttaacttcaaatagattatttgatgatgctcaaacattttccatttattaaattttggaatcgatatcatgaagaagctaaaattaagaatcatagtggcgaccttatatgctttcttgggtggactctctcgtctctccaccttgattggtcagctttacttgcaaatcatatcttattaattagtcaatttattaatttaaagatgtttgcttttgttacgattaataaattaatgggtccaacatagtgtcaaaacctgtttaagtatatttgtttggtcggtccaaagaacacgattggctgattcgctctcgcctctgttcggttcaatgccactttgaattgtctttttctttttataattaggttaattatactggccaattaactttcgtctatttggatgataacttgagtggttctttttcattagtaaatagttctaattttgattggtagattaattaattaattaattaatcgctaggatatttcgtataattaatttatatccgagtggtgtgtcatcgtaaaaatgctaatgtcacgatagtgattagcaaaagcatgaaaaatttcctagtttctaaaacacttttttgggataaatttatctctaagctgcttgattttctttaatatgcaggagtttgtcagactgacggtgtaacggaacgggaaaagccaaacgtgagacaaacgctggtcacggcttatgatacattgctagccccacaagtcaaaacttgtatcgaagtgtcacattttcctcaagacaacgcgcgtttcgtgaaaacgcgagtaaacggcggtggaataacaacatgtattgcaacatggtttagccaactctgcattctcctccacagacttttaaaagaacggcgtcacgaatcctttgacttacttcgcattttccaagtcgtcgcggcttcgatcctttgtggtctcatgtggtggcactctgattatcgagacgtacatgtaagtaccaaacttcatttaaaacaaaacattttggcgtttttgctaataataatgttgttataacaggaccgactaggcctactcttcttcatatccatcttttggggagtacttccatcatttaacgcggtcttcacgtttccgcaagaacgtgcaattttcactagagagcgtgcgtccggtatgtacacactctcttcttacttcatggcccatgtactcggatcgctctccatggagctcgttcttccggcatcattcttgacgttcacttattggatggtctatctacgccccgggatagtcccattcctcctcaccctctccgtgcttttactatacgttttagcgtcacaaggacttggacttgcccttggtgcagcgatcatggacgctaaaaaagcgtctacaatcgtgaccgtgacaatgctagcgtttgtcttaaccggtggttactacgtcaacaaagtgccatccggaatggtgtggatgaaatacgtttccacgacgttttattgttaccgtcttttagtggcgatccaatacgggagtggggaagagatattgcgaatgcttggatgtgattcaaagggtaagcaaggagcgagtgcggcgacatcggctggatgtcgatttgtggaggaggaagtgatcggagatgttgggatgtggacgagcgttggtgttttgtttttgatgttttttgggtatagagtattggcatatctagctttgagacgtatcaaacattaaataaagagagggagagggggagaaagttaaataaaaatgagtgggtaaatttaatttttagggttctagttcggaatattaaaacgtcgctaattgtaattttgcgatttagcgacgggttcagtttttaacatgtgaaaatgaaaatgacaagtatttttaattgtttttaataaaatgtatattttcacctattggttttgtattgtttttattgtcaaaacctattgaatgttttgtgtgatattaaaacagagaaaaaaacagagccatttgtgatacggtaaaagaaaaacagagccatttgagttttctgagtagtcaaagactcatagttaatggcccatgggcttgatcaaggcttattttgatggttatacttttactggtggtgaacccaactagtctggattcaaaaagttattttagataaaaatttaattttcaaactaccaaaagattgagattcattcacaattttttttccaattagttaaatttatttttccaataaagtattagagaacaaataaataatagaagtggaaaatggtcacaaaaatataaaaattctaataggaaaaatctgtatgaagtcaaagatttgtatcaagaaaactaatttaaagctagaaatttaaaaaacattaaaaattccttaaaaataaaatcttgaataccataaagaaatattgtaattaaagataaaagctcacaaaattttgattagctttttaattatcatttttttttgctaaaatcaaagtagtcacaaaaaatattggctgattcattttattttttaagttaaatgtcacattgtaggcaaggtaattacaaaaatgagtggaattataaaattatctacataccgacatcattcaaccgtcagattatggattaaccatttgagaccgtccatttatgagtcggtttaaattgtgacataaatggaaaatgtcacctctcacgcgttattgaaaaaaaattcccagattctataaaaaagagaaatg

SEQ ID NO: 28301 - DNA, 3000 bp, Unknown; identical to SEQ ID NO: 28300
  misc_feature (1)..( 3000): 2750-1469P.txt file - cDNA_ID_2995000; gDNA_ID_2684098; Annot_ID_137075

SEQ ID NO: 28302 - DNA, 3000 bp, Unknown
  misc_feature (1)..( 3000): 2750-1469P.txt file - cDNA_ID_2995011; gDNA_ID_2684104; Annot_ID_190353
agatatttaaaatgagaaatttattaagaatttataagttttgaaattacaaaaaatctttaaaattataaaattgaaagtatatataaatcattttctgaattatttattcatttatttattatatttagtaaaaacatcaaaagtaaacaatatagtaacatttattcttattcattttctgaatcattactatcatttttttactcaacgctttcagcagatttgctgaattcgtcttattgtttttcttcttcggaaccgtctgtgatgtcttctaattgtctattttgtaggtcaatgtggataacatcttctgttgttatgtctggtatggaaacttctctgagactttcttgttacatcacaacatcatcaactaggccgactatacggcctctggaattaactttaataaccgataaccacacttcacgcctaggcctcacacgcgggtaagatagaaagcttgtgatgctaggataaatggtttgaactttgcataagtcttgtttgcattgacatcgaccacgaatgattttgcggttgtgatcttagatcttggttcttgaacgatctcatacaaccaaagtagtaaaagttcattttcacatccgttagtaacctacataaagtagattttaattaagtttatcatttcaacataagtcattaagatatcaaaatttccaaatattacttacatataattttaaccatccagcgaaatcacgatctttgtaagtttcgtcgcaaaaattcccacagaacaatatttgtacttgcaagtccctcgcaatttgcaatgactttgcgaggaattttttcgtcctcgcaagttcctcgcaaatttcacgcaatattgcgagggaattatccctcgcaaaatttgcgacggaaaagcgacgtgtcttctctccctcgcaaatgtctcgcaaatctgtagcaatttgcgagggattgtttccatcgcaaattgtcctcgcaaatcgcttgttttcttgtagtggtatttggaagtttataaggtttatcaactccaacttaaatacttcttccgtctttgatactagatgtttaaatgttttgcacacaaattaattaatcatttatttttatttattttttaaactaaaaatcatttattatgtacctaaatacgattcaacaaataataaaacaacctacagaacttaaatcgtgaaaacaattaaaaaaatttacattgaaagttgaaaacattatctagtttaaaacacattttttttcttctctaaaatatgaaatatataaaaatatcaaactgaatcattcttttttcttcttcttatgatctctgtctttctgttagattatatatatgagaatcttatatttgtatatatctaatatcttaggaacagatttatgcttatctcatgtaaccctatatatatgttcaatacataactctccattcacggagattcatacaattacactttcattatcatcacacttgtaaatactgaattttatagttgccttcatgatttcgaactagatatatattctgttggttctgattacatttatatacataaatttattccaagttgcgtgttatttatttgatcagaattagtatatgacccaaaaataaatattcaaatcaaagttcatgcggtttcatcatttagctacgcgatgtaggaacatacttgacatcttatttttatttggtcgttcttctctatgaatcacgtggaaaagtataccaaatgatttttggcagatacgtattactaaagtatccgagattaaatattaatacactatatagaagaattaatgggacataaatcataaatgcatggaaacattggtgaaagacacttaacacttgggacgaccaatgttgtttgatatgaagtgaaattaacgcgtctgcctaattgttatggttcatattatgtcacatggaccaacttcttgttcttcttcattcaagaaccaactcacgtacacgttttttcattttcttccctcaaatatctagctgtatattatattgcaaaatccagatttgaatatgatcgatgcaaaagattgtttatagagtagagtagtagactaaagaaccagattactcttacctattcagattatttgtgttatattttgtaactaacttaggtcactaagtaacgaatttaaagctaaatgcatctattcattctatcacaaaatccagccgttattttttagaaatgtgaacaaatattaagcattaagatatttaaaataggaaaaataatagccacaaataaagtaaattaaagaagaaaaaaaaaaacattagtgatagtccgatgatagacgtgtcctattgattacatgttatttcccactcaacttccttaattctaattccaatccttgatgtgagggtttttttcttcattgattctcaaatctacattatgtgattcttgatgtacctgtatgtacaatttgtattcaactaccaaataaaaatgtgagcaagaataggctaagaaataatactaatacagtatccttagaatacataattgtatattattaaggataacacatgtaatgtttaggaaagatggccaatgataaatcttataagaaacctaacaaatattaacaccggtaagatttgttctcttaaaacaaatcctatataaacaaaaatgaagaacaaggacccaacatatgtctctcatgtgaccgaccaacacatcctcagttgacctgtctttggtctaaccttgtcttcctccacaaagctaacagaaataattatgaatgttagtctcttccatgtgtcagtatattattggatcttgttggagcaacttgacaacatataaaagcacgaggcagctcaatactatcattccaacaagagaagtgcttgagagaaaaaaaaagtatcaaaacttcatatagccaaatttaaacaaaaagaaaaaagagaagaaataaatg

SEQ ID NO: 28303 - DNA, 3000 bp, Unknown; identical to SEQ ID NO: 28302
  misc_feature (1)..( 3000): 2750-1469P.txt file - cDNA_ID_2995011; gDNA_ID_2684104; Annot_ID_137113

SEQ ID NO: 28304 - DNA, 3003 bp, Unknown
  misc_feature (1)..( 3003): 2750-1469P.txt file - cDNA_ID_2995015; gDNA_ID_2684104; Annot_ID_190345
atttttgtctaaattcaccggcaaaagttaatattttgcagtttgatcgagtgaaagattgacgatgagccttcttgtaaccagaaaaacccgatttacatgagagaacctgcaaaataccatagaaaagagatgagcttcaaccacaaatatctcaagctaataagtgagaacaggagagcagtgtttttacagcttcttggtcaatcttgtggtacattagcttccttcttgctccacagctttttcgataagctaccacgacatgagctagaccgaaaaccgcagaagatagtaacaaaaccggcattccccatgagatcttgaggtgatagaccttagcctcctcaagagtagaattcacagtgaaaacacaagttttaaccaaaagaagaagaatccctccaaaggaagataacattactgtttcaagatacagaccataagctaatcttgtgtcttcacataaccaagagagacctgtttcaatagaagctcaatgaatcagaatgctaacatttgtgttttgagtaagagagaattaatgagtccgtacttacagataatgacgagagatctaatgagcgagacgagtggtacatcaatgagagaggtcttgaaactatactgacgaaaatgttgtgcaggggagtgacacgtgaggcacgtgatgctagagacgataagacaaggaactaccacatcagccaccgtgatcagaaccggtaatgaagaagctaacagagacgccgtcattgctgccacaaagaacatcgtccttaaacatcttcgtgctttctccgccacaatccatgacttccacgccgccatctataaatccggtggtggctaaaacaacttcaccatttttttcgaattcagacaaaacgttatagctttatgtaattaaaactttgtaacggttgatatattatagaaaacaatgcaattttcaaatattattggtacacagaataaagtaatgagttgtataagataaagtaaataaatgagtgggaaatattaaatgattaatggaccaaaagacagcaaagacaaagaaatgataagtgtgtttggaggaagagtggcacatagaagcatgtgaatgttaggttcactcttataatattcttccagccattttcttctgtctttgttcccccaaaagtttagcttacttactatgtatacaccttttgtttttactaaaattcgtttttattaaataatttggtaacaaatcatatcgtaatttatcaaatcacgactgctaattttctttgtttgtttactctataaataacgaatatccatttttgttatgtatgcaaagaaaggaaaaaaggttttaacttttcagaaactagaaaatatggctgtctacagataattgagatgcaataattatgaagcaatgatctggcagaagaaatcaagatgttgtttatgaattatgactagataattatgggatctttaatatcagaaagtaaacaaaaatcttcttataatgcataattgaataacaaatcaatactttaataattatgttcccatgcatgttactgcagaaacattggaataaaaatggtacaccgatttatgtacgttgcatatcaatacaaatatacaatacgaggaaactacttaataatctatttttttcttttctttcaaagaaatacttaataatgtatatactatgatttatcttatatgttcaattgttcataaacattagatgagtcatccttcttattattacacatctttctcgtatcaaattaatttatctatctataaatcattgtgattttgtttattattcatgattgctcggaagcttcttgtttaataaaaatttattgccaaaataatagaaatcgtaatgtatattagacttattactttattagtattacgcatttggtggttcacaattaggaatactgtatacattttgtctagaagagaagtataaatgggccgatagtttaactaccagaaggcccaatgtgttttaaaaaacaatgcccacttaccaattctttcaagttttcaactagattggtggggaaaattgacgattaaaccggacggacggtataatccattggggtaggtagggaaacgagcgaaccgaaccgggggtaggtgaagtcttatccgacatgaaccaaatcgggtcgggtcgaatccttacaccaacttttcgcaccaactctctactgaccctaccaacccccatagtggttggtgaaaggactaatcattttctaattttttcttaatcatatattttttacatttaaatcacatggataagatcgtaaagttgctaaatgacgaaccaaaatgatctgtaataacgacacaaagtcatactataatacataaaaaaaatatgcaactgaaaccagatgataatttatagttttacacttttattgaattattagaatgtgaaaaatgaatctttatttaaatattgtatgcttattataaattttaaatttacataaacgaattactaatatttttatatataaataatttacttattgtaggactataaatatataattaagtaatgtgaataataagatacaaaaaatttaaatatatttatggtatgttttctattttcagtgatatatttttattaaaaagagccgaactttattagacagtatactaattgttgtctaaaccaatcagaaggctaaccaatcttattaataaaatataatttgactaaaaccaaaatgttcacatagttttgatatacattattatggctaatgggttaatctttaggacaaaatggattatttttgcattatacaaaatttaaaataatataaatgacattttctttaattaattgtatttaatgccgtatatattaagtataaactcatttctcttcctcttgaaaaactcactttatcaccaccaaaaaccaaaattcactgccaaaaaaaacacatcaaaacgatg

SEQ ID NO: 28305 - DNA, 3003 bp, Unknown; identical to SEQ ID NO: 28304
  misc_feature (1)..( 3003): 2750-1469P.txt file - cDNA_ID_2995015; gDNA_ID_2684104; Annot_ID_137106

SEQ ID NO: 28306 - DNA, 3003 bp, Unknown
  misc_feature (1)..( 3003): 2750-1469P.txt file - cDNA_ID_2995025; gDNA_ID_1971889; Annot_ID_58470
agtgtaatgtagcaccctagttaattttcttgcagctaacttgagtgttctggataagcagtaactttagccattgttttgtatataacatcttaagattttaagcaacacttcaaattttttttttggtttataggtgggacgatgtcaatgagttattggaggagatgctttcaaatagagtatcaaatattcatcaagttattgggcaaatgatcaagggagattatgatgatgactcaaattggcagatagtggaatacgtgttggacaaactcaattcagaaggatgtggtttgggaataaggttttacaatgcacttctggatgctttgtggtggctgggccagaaagagcgagctgcaagagtactcaatgaggcaacaaagcgtggacttttccctgagttattccggaaaaacaaacttgtgtggtctgtcgatgtacataggtagcctaagatccctacactggcttcgtttcatgtgtatgaaatggttgagtaccagtcaatctaattcttggttttcaatgttctgcaggatgtcagagggtggcatgtatacagcactatcggtttggctaaatgatataaatgatatgcttttaaagggagatcttcctcaactagctgttgttgtttcagtgtaagtattttgatactgggtacctacctcattgcaagatgccttcaagctttttatcttgccttttgccttttttaattctttctttctaacctctcagacggggacagttggagaaaagctctgctgcaagagaatctcctatcgcgaaagctgctttctccttcttgcaggatcatgtctcgtcctcattttccttcacgggatggaatggaggtcgcattatgtgccagcgatctcagctcaagcagttactgtcaacgaaagagccaacttcagaagaatccgaaaataaaaacctagtggcattagcaaactcgccaatatttgcggctggaacaagagcttcaacaagcagtgacacgaaccacagcggtaaccctacacaacgaagaaccaggacgaaaaaagaactagcagggagcacagcttaagaactagacaacgtagtttctgttgccaagtccagaaatcaaaggcctcttctgccttcctccatatagactggtgggtgaaaactgtgggcgtatttcacaagcactccatatccatgataactatgctatggtttcaagcagtagagtcaacctctgttagacagaagaagctggagaagaagataaatggtgatcttagtttatatgaagaagcgtctatatgaaaatctcaagtaagtagccaactaagtgttttgatggattgttagacccatgattttgcagccatagattttttttcgtttttttttccattcaactatgtttttgattactataaagctaaatgctaatgtaagatcaaagctctagttacaattaaaggatctattaatcaagattcctcagggaagctctagtttttgcttgtgacctcacctgatgaactctctctgtttcgaaatctaacttattacatagcaatgacccaactccacccagaataaagaaaacaatctgttgtgcaagattccttcttcggtctgattaatctttttctctctctcgtcctcagatatgtgtttgttttctgatttaggaaagtcactacaagtttgtcatccaaattggtaataaaataagaaaaagattggagaaagaaaggatcttcctatagtgcttcacacattacaactttaagattccactttgtgtgcgcataaaagtaatggtggctttgctttctaaccgatgctagtgctttgtgtgattttgctgtcttccaaaactatttaccaaattttgtaaatactttttagaatcttttccctacaaatctaaaatagataaataataatagtatgtgatcatattgcttacagtcaaatcacatcctaacattctactaaaagactaaaactatcacctttttgttttttaatgctatatagttgtgatcaagtctggacatacgatcatgctgtttatactacaattaggtccttaacagcgtcttaaaatttactcttagctagaaaacgacaaattcgactacacaatcatttttgttgttgaattagattcctgaaattgtaagtttttgtgttgaaattcaaagttataatttccaaaaaggattcacctgtctcccaagatttttttcttaataatcaactcatagatccacaagatatagtattttagaagaaaaaaaagtacaaggatggagctgtaactaaatagattattagagcagagtacagaatcatttcagaagctgactatttttctaagctcaagttgcatgcgcttaggccttagagacattgcgttgaccagtacattataacctgtagatttttatcataaaaatacatgagggtaacgttaagaaaaataaaagcgtcgatttcatttcatttttctcattctgttatttcatttttttgtatttaactttgagtttgcgaaagtcaataaatatttcttcgttatacgacctacattttttggtcgacatagcgaaatacttttttaacttcttattataggataacatttatttaactcttttttcgtcatcctataagattaattaaactactaacaaaaaacctaataaatctagtcagccaatgaataaaaaaagtctatccaaatgaaaactctgtagagagacaggcaggtaagaaaaaaatacaagaacagacgaataaaaacaaaacacgtgtcatatggtaccgtcaccaacacctacaacatgtaatagtttaaaaaggaaccacgtggcttttggcttataaaagggtccccaaagaagctcagatctaactcacaccactccattgcccattgctctgtgtactttgcttctttaggagaaagaaagcacaaggggcaaaatcggaaagattatcatg

SEQ ID NO: 28307 - DNA, 3003 bp, Unknown; identical to SEQ ID NO: 28306
  misc_feature (1)..( 3003): 2750-1469P.txt file - cDNA_ID_2995025; gDNA_ID_2684202; Annot_ID_191260

SEQ ID NO: 28308 - DNA, 3003 bp, Unknown; identical to SEQ ID NO: 28306
  misc_feature (1)..( 3003): 2750-1469P.txt file - cDNA_ID_2995025; gDNA_ID_1971889; Annot_ID_176820

SEQ ID NO: 28309 - DNA, 3003 bp, Unknown; identical to SEQ ID NO: 28306
  misc_feature (1)..( 3003): 2750-1469P.txt file - cDNA_ID_2995025; gDNA_ID_2684202; Annot_ID_137235

SEQ ID NO: 28310 - DNA, 3000 bp, Unknown
  misc_feature (1)..( 3000): 2750-1469P.txt file - cDNA_ID_2995033; gDNA_ID_2684204; Annot_ID_191349
gtgcgaacggatccattgaggggaggcattaaagggcatactaccatcttccgatggtctagtcattactttacttgcgggaagcaacgaaacaatcttcacatcatttgctaaaacactcttgaattgctctaaatcaaatatatctgaaaactcgctgcaaataaaaacatgttgaacacaaaaaaccatgaacatttttgatgatccattactctctaaaattctgctctaagaaatcaaaaatacctctcgtcaccccaaatgagattgatttgcaatattgggacaacaagaacagcacctagaatcctcgcaatcacaactgcatcaacaatctgaatcttctgctgattcaacccaccagagacaaccaccatcagatactttctcctctctacaagaatcttcttactctctcttctgtattcaatgctgaaatctaagcaaggcttgtaacctaatccatcaggctgtttccagaagtcataattcttatcatcatgtccatttccattagggatgatcaaatgtgattggtgaccaccaaaggtttcatttttctccactcccatatctaaagatcgatcctttgcgtttgaaatctcaacttgagtagtgcttgatcggatatacgcaaaacccatatgggatttgggcgagccattagaatctgaactctgaagttgactttcgtgatcgccagaaccgaaatgagaaagacaaagaccgagtcttaatgatatccccaaaatagaaagtaagaagagagagaaagcccagagctttgggtttctgagattgaagaagaacttgcttgtgttcttctttgaagatttattatcgagaaatttgtgtaaagatgatgatgaaactgagtttatgatctgagctgggactgaaatgtagctaactctgttcttcttattactgtttttgttcttccatgttcccatcacaacttttaaacagacgaaatgagagattttggagacaattagttacggcgggaagtggaacacagaaggatcattatgttacaaaacagagactgtgttgtgtagtttcgtttccaagaaagattctcatgttattttaaaatttggtggtattattcaataattgaaaattagttggagaatatctgtatttttggtattttttatgggtcaatttcaaaaaatgcacccaacaaggcaacaacacacacgcaacaactttttaaatatatcaaaaattatagaccaatattatttggagagagacaaattattataatatagtttatcagatgagacgaccttgttaatgaagttccttacattgattagtatgttaacaaaacaagacggcccaagatatatgaaatgtcactggcccaatatggagctgattgtggtccagtagtagaaaagtcgttaatttttagagatatcggtttgaatattattatcctctaattaatatagtcgctttattcatcttgtatcttaccggcgacactacttaatcccaccttagagagctggtttcgtccccttggtgggaatgcatattttgtttttttaatttctcataagtaaaacgaacaagatcatatatctagacgtagatgaatccaatagtgtttggtacgtaattaaactttgcatatggttcgagtaacaaaaacatatatgcatattgtatagtttgaacgatttgggagggataaacaaaggttagagttagagactcaaagtttatcaaggttagtggagtcgtggactcacgtatctttgaagcaaaactgataataaaatcaattatgggataccatatacattgttctcaaaccatagaataatatgtatattacaattaatcgtagaaaaatgtacctgtctttatcatatgaacatcacattagatacatatgctatatgtcacttcagcacgttttattaccgacgaattgtggaatttgaaatttaaaatttaataaatccagtgttaataattattttacatcgtctctttctctctctatcttgcaatttaaatctgatatgaacatcaagaaattgctttatttaacacatcgtttatgaaattacacatttgtccttagaaatgacagagccaatcaatacaaacaaagttcagggctataatagtcatttaacgaaaagtaaggagaaattcataatcttgctgccataacaatgattcaaagttaaacctgcgtcactaatgactctcttacttatccaatctctacgtagttgtaaatagtaacgtttcaaaatcacaatctttcattaatattataaaataaccccataaaaattaaaagctctcaatccaaccccagctctatctaaagttagggataaactctcccatttcctcaacaatcaaaatctctatctcctccaaattccaactctcataatttctcttcttcgacaaccgagagacgcggagattcaattcaacgctcctctggaattttttgcatttctttcagttataattattttcctttttcttttctttccttatttctatttatttaaagttgttttaattctccttttccaactttagtgccatttgttcacgagatagagaaatcataaaaaagaaatcatctgttcttagcttcttttagtttctggaaatatctctttttttaacagaagctgtaattttttttttgactgcgtagaggagaagaagattagaggtgttcaaaggtgataacgtttgcagaacgtgaccacaattataatattgaaaggtatcagaaaactttgctaagatttattataaactccttttttatttaaattcaagagatatcaaacaactacttcatttttttttttgtagcagccgagtactcttttttgacggtgtccgtgttcgtgcttggtctgaaattgacgaaaaatattccgacaagacaacaacaacaattagagagattcagacaagggatttgaaattcggaggatg

SEQ ID NO: 28311 - DNA, 3000 bp, Unknown
  misc_feature (1)..( 3000): 2750-1469P.txt file - cDNA_ID_2995033; gDNA_ID_2684204; Annot_ID_137288
gggcatactaccatcttccgatggtctagtcattactttacttgcgggaagcaacgaaacaatcttcacatcatttgctaaaacactcttgaattgctctaaatcaaatatatctgaaaactcgctgcaaataaaaacatgttgaacacaaaaaaccatgaacatttttgatgatccattactctctaaaattctgctctaagaaatcaaaaatacctctcgtcaccccaaatgagattgatttgcaatattgggacaacaagaacagcacctagaatcctcgcaatcacaactgcatcaacaatctgaatcttctgctgattcaacccaccagagacaaccaccatcagatactttctcctctctacaagaatcttcttactctctcttctgtattcaatgctgaaatctaagcaaggcttgtaacctaatccatcaggctgtttccagaagtcataattcttatcatcatgtccatttccattagggatgatcaaatgtgattggtgaccaccaaaggtttcatttttctccactcccatatctaaagatcgatcctttgcgtttgaaatctcaacttgagtagtgcttgatcggatatacgcaaaacccatatgggatttgggcgagccattagaatctgaactctgaagttgactttcgtgatcgccagaaccgaaatgagaaagacaaagaccgagtcttaatgatatccccaaaatagaaagtaagaagagagagaaagcccagagctttgggtttctgagattgaagaagaacttgcttgtgttcttctttgaagatttattatcgagaaatttgtgtaaagatgatgatgaaactgagtttatgatctgagctgggactgaaatgtagctaactctgttcttcttattactgtttttgttcttccatgttcccatcacaacttttaaacagacgaaatgagagattttggagacaattagttacggcgggaagtggaacacagaaggatcattatgttacaaaacagagactgtgttgtgtagtttcgtttccaagaaagattctcatgttattttaaaatttggtggtattattcaataattgaaaattagttggagaatatctgtatttttggtattttttatgggtcaatttcaaaaaatgcacccaacaaggcaacaacacacacgcaacaactttttaaatatatcaaaaattatagaccaatattatttggagagagacaaattattataatatagtttatcagatgagacgaccttgttaatgaagttccttacattgattagtatgttaacaaaacaagacggcccaagatatatgaaatgtcactggcccaatatggagctgattgtggtccagtagtagaaaagtcgttaatttttagagatatcggtttgaatattattatcctctaattaatatagtcgctttattcatcttgtatcttaccggcgacactacttaatcccaccttagagagctggtttcgtccccttggtgggaatgcatattttgtttttttaatttctcataagtaaaacgaacaagatcatatatctagacgtagatgaatccaatagtgtttggtacgtaattaaactttgcatatggttcgagtaacaaaaacatatatgcatattgtatagtttgaacgatttgggagggataaacaaaggttagagttagagactcaaagtttatcaaggttagtggagtcgtggactcacgtatctttgaagcaaaactgataataaaatcaattatgggataccatatacattgttctcaaaccatagaataatatgtatattacaattaatcgtagaaaaatgtacctgtctttatcatatgaacatcacattagatacatatgctatatgtcacttcagcacgttttattaccgacgaattgtggaatttgaaatttaaaatttaataaatccagtgttaataattattttacatcgtctctttctctctctatcttgcaatttaaatctgatatgaacatcaagaaattgctttatttaacacatcgtttatgaaattacacatttgtccttagaaatgacagagccaatcaatacaaacaaagttcagggctataatagtcatttaacgaaaagtaaggagaaattcataatcttgctgccataacaatgattcaaagttaaacctgcgtcactaatgactctcttacttatccaatctctacgtagttgtaaatagtaacgtttcaaaatcacaatctttcattaatattataaaataaccccataaaaattaaaagctctcaatccaaccccagctctatctaaagttagggataaactctcccatttcctcaacaatcaaaatctctatctcctccaaattccaactctcataatttctcttcttcgacaaccgagagacgcggagattcaattcaacgctcctctggaattttttgcatttctttcagttataattattttcctttttcttttctttccttatttctatttatttaaagttgttttaattctccttttccaactttagtgccatttgttcacgagatagagaaatcataaaaaagaaatcatctgttcttagcttcttttagtttctggaaatatctctttttttaacagaagctgtaattttttttttgactgcgtagaggagaagaagattagaggtgttcaaaggtgataacgtttgcagaacgtgaccacaattataatattgaaaggtatcagaaaactttgctaagatttattataaactccttttttatttaaattcaagagatatcaaacaactacttcatttttttttttgtagcagccgagtactcttttttgacggtgtccgtgttcgtgcttggtctgaaattgacgaaaaatattccgacaagacaacaacaacaattagagagattcagacaagggatttgaaattcggaggatgtttgggatccaaagcagacgtgatttaacgatg

SEQ ID NO: 28312 - DNA, 3003 bp, Unknown
  misc_feature (1)..( 3003): 2750-1469P.txt file - cDNA_ID_2995037; gDNA_ID_2684204; Annot_ID_137267
tgcaagacactgctcatgtctttttcctttttcttttcctcagttatgaagatctaagaagcaggatattttccaaacaccctcaacttttccctaaagaggtaactggtatacgcccattttgctacagcttactatttggacatgtaataagatgcacttctgtaattacaactagtgttggttctattttattatctgagcttaaatttgttttgtccacatgtatatgagtgtgctatttcttggttgcaggttttcaatgatgagacatttaagtggtcttttggaatcctattctcacggttggtaagaactactgtatcataagcaatcattatcttgataattgatgtaaatctagatgtcttgaatttgaaacaacagacttgttctttaatcttagcatgactttctgcataatatagctgtctccaacaatttattgtttgaacaatgaccactcacaaccaaaatattgcattatttcgtttctctttccttccgtgtgctgcgtgcttgtctctgcaattcagacttaagcttctctaacacaggtgcggttgccttctatggatggaagatttgccttagttccatgggcagatatgcttaatcataattgtgaggtacttctacttatctttatgaccaattagctcctagattctcctaatcagaaagcatgattgacttatggtaatcaatatttcaaaatctgcttggaaaggttgagacgttcctggattatgataaatcttcaaaaggagttgtctttacaacagatcgaccatatcaaccaggtgagcaggtaaataagataaattcattcagataacctgagcgagcattgaagtttaatataagtcagtgtataacacaaagaagtcccgtttacacagtttgccttttagcgcttcagtaagtcagtccaaagtggaaccaatgttgtctgaagtctctgatatgtttcagtaacatgacattgtgcaggttttcatatcctatgggaataaatctaacggagagctattgttatcttatgggtttgttcccagagaaggaaccaatcctagtgattcagtagaactagcattatcacttaggaaaaacgataagtgttacgaggaaaagctggatgctttaaagaaacacggattatcgacgtattccattctccaccatccatgttcccctctcaaatttgtagatctctcttgattaacttgagttttgttttgattgtttgtgttaacttttctctggcagacctcaatgctttcccgtaaggataacgggttggccaatggagctaatggcatatgcttatcttgtggtgagccctccagatatgagaaacaactttgaagaggtttggcaactccatcttgaccctttttaccatccaattcttcccaaattcataatacatctcttatcaattattatccatttcagatggcgaaagctgcttcaaataagacatcaacaaagaatgatctaaaatatcctgaaatcgaggaagacgcattgcagttcatactggactcatgcgaaacaagcatatcaaagtacagccgatttctaaaggtaagtaacaaaacagctcatctctctctctttgtgggaaaattttcactccatctgcttatagtttgctttgtcaattatctaattgtaggaaagtggatcaatggatttggacataacatctccaaaacagttgaaccgaaaagcgtttctgaaacagctagctgtagacttgtccactagtgagcgcaggatactgtaccgtgctcaatacgtaaggaacaactttctagccaatacgatagataagagtctgtggatcgatccatgatattgtggaatctgtgtttttttttttgttttgtttgggtcagattctgaggaggagactgagagatatcagaagtggtgagctgaaggctctacggctcttcagtggacttaggaacttcttcaagtgaatgttgaatgaggacatttcaacagctttaagatggatcaaaggtaggcctcgttgtgcttcaaccaaaaatgtagttttttattacaaaaaaattgaacgttggtgtaggcatggttggatctgtctcactcgtataggaatatattggtccagccatatatgtaatttgatcattttctataaactcaaaacctgaacctaaattgattaattaaggaaacgcatgagagagtaagggtagaaacatgttcttcgtatttgatccgaatcgaactgaaataatcgatccaacaaacaaagataatttgaaaattaagaatatatctgactacaactcataacgaaaaccgtaccaaaactcacactccttgttaccgcaaacaagataatctgatggtacacgtcagaacatttgtttctttagcaaagcaagtaaacattccactgtggcaaagtaaaaaacgagaaacctataaagtcttcctaatgaaacgtactgattttatggagtttccattttcgacataatatgacgtggcaatatctaaatggtttaaagatgttttatctccaatgatataacgccacgtaagcccgctgaccaaataacccaaagagtaagcaagcgacgtcgtttatagtttgatgatcttgtcgggtaacgaaactgccccttgagtcaaaacaggcttcttcgtgtccgattctgaacgagctcgctctttctcatccaattctctccaccgtcttctactccgatcaatcttcaaattttcttaacactcatcgaccagatcgagtttccatcgatctaatcaatcaatcatcagatttgatcttctcaagaaggtaaatccctctcactctctgtgtcaaacctaatcacctcgtaggaatcgaaattggaacaattcaatttggtttggtttggaatctctagtcgattcttcttctaaacgattgaattgcgttttgtgctttgatataattcgaaattattgtggcagatg

SEQ ID NO: 28313 - DNA, 3003 bp, Unknown
  misc_feature (1)..( 3003): 2750-1469P.txt file - cDNA_ID_2995039; gDNA_ID_2684211; Annot_ID_191515
ccgagggatgagagatcaacgtcgacggtggctttcttagaattccggccgagtataatggagtaagactgcatatagtactcgaaatcctcaccttgaagcttcgcaaatccaacctccacatcgcttccgccaccaacagccgtagccatgccgtgaaattctccgatttgatcgaaagaggaaccgggacttccaaattagggattgcaatcgtaataatttgtgaatcgaagcaagatttgtttggaaactggtttagcttatccaggacaaaggcttattttgtgaaattgacgattatacccatgattttaagacctgaataaaaaccctaatgacacaactatttaaaacagccgaagaaacattgagaatggcggcgagatctgtgagcttaaaggttccatctctcccgcaaatagtggagcatcttattgattgtttgaattttttgatttcgtttgctttagaacataggcttggttagttttatgtaaccttttgtttattttcgttgttggtttgattgaataagttgccaaatgatgattgaaaattttgcgcaagggttttgagtttcggatgattggagtttactctggtctgaaggaaccgtgacaaaattattttctaataattcattctgatggcagctcaatcattgttagatatatcaaatttcaattcgagttttgggtgcatggtttgattcggatggttaattgtagtttgttttgttagtagaagcttggttttggggcagcttaatgaattttaggattcaagttttcaaatcatttagcctataatgttctgaaatgtgttgtgtaatggctttgatttcctgaggatctgactatagaatgtttaaaatcctgaggaacggtgggaaatcatgtatttgtgtttctttttttttttaagattcaggttctacaaattatgcttaaagggctttgagctcctgaccgcttgtattatgagatccaagaaaatgtgaaaagtcgtttttttttcctttcccattttgatggtttgggttgcattttactgttcttttagttatcatgactatgctagattctggtctggacataagttgcttaagatgtgtggaaattatgcgtaatggatttagaattggcaatttgttatttgaaggaattcacttctatagatatcctttaatggcacccgttcatggtcagctccaaatatgcaagaaatcggaaaatgcattagtgtagtcctcttttctggtatattgtcaatactcaaatcttacataaactttgtttcaaggacaatgaagcatgtggtcaagattttgagcctgctggtagctgtctctgccttttagtttgctctcttgcaggctgcaattatggctcgtagccaaacatagttggttagtaatgagtctgttgtgctcatttttgcttattgctattctcagttagtcaatattaataatgtatatctttgcaccagctacctatatacgttgtagtgtcctttgctattaattgttggaatcggtttagtgcagttccctacctctcctaaagaagcagtttttctgcagcgggtactttcagtactcttttctttctttgttaactcgaattgttaattaaggttaaattaagttcttgactagtgcttttgctcctagctgttgttaatgttgattatgtactagtttgttttggtgctattgttatattgcaggatattgcagatgcaaaaagacttcttaagcgctaacggaattgatgttggatcggatttgacacattatggtttacttcttttcaactccctaaccagtgtaatagaatacttggagtcttcgatggttcatagaaagagttcccattttcattatgtacagtcgtttactatgtttttttgagagatgtacattgagaaaccggtgtttgcaattggattttgttttggggttttaaacatgatgaagaacaatgttattctgataagttcactttaattgacttttttttttggaatatcgtttgttacattttttctcgtgtatacaataagttgtgaatccaactctttcaagtttaaactacttgagattaacttaaatgctccaataaaattgattgaattggattttctagttttgtttgttttgaagtaaaaagttggacttgaatgctgataagtgataataaattgacttgcaaccataactgaaccaatctaacaacatgtaactattccaagtttattataagctagatttctgaaatggaaatgtcgttttaattttacatttttgccgagatggttaaaactggtaatcatatacattacaatttggttaaatgaccaaatctatttgataacaaagagagatataagttaatgaaaccatgattagacaaatcgacaagcaaagaaaacgttaagcaaaaaacactaatcataataagcaaaaagtccatccatgttcatcacatgtacaaagatcctctctgtcactctagacttttcctctgtttgcttcttcttacaaaatgacacacttaaaccaaataaagaaaacatttcccccaatctttatacattttcttttgaattaaagaaaaaaataaaagtgataaaagaagaagaagaagtccccagctagctccttaaagaagcacatctctttactcatttcacgattcccctgtctcttgtttctctctcacttacctcttctcgagttttctcccattcttgggtcttcatcgagaccaaatccggagaaagttgatgtttttacagcacaaacagacacagacacatacatgtgttgtgtctccctaatcccattattactaactcgcatccaattcacacttctctcctaaattcccatccttttcagatccaaaacactctcctccaaaacccagattgccaaattagggaatttgacacaaaacccatctgagagcataatcaagagatagagagacaatg

SEQ ID NO: 28314 - DNA, 3003 bp, Unknown; identical to SEQ ID NO: 28313
  misc_feature (1)..( 3003): 2750-1469P.txt file - cDNA_ID_2995039; gDNA_ID_2684211; Annot_ID_137339

SEQ ID NO: 28315 - DNA, 3003 bp, Unknown
  misc_feature (1)..( 3003): 2750-1469P.txt file - cDNA_ID_2995053; gDNA_ID_2684232; Annot_ID_137644
ggaatgtaagtcattttcgttgcttttagatttctgtcagctggcatgaaattgctatcccttttttttctcgcagcaattcattcttgtttgttatattttggaactgcagaacgcaagtgggttcgcaacccatcacttcaatttcttggcttcctatgttgcgtgtacttgtcactgtgtccaaggatggatctcttcaagtgtggaagacacgagtaataattaatcccaataggccttcgacacaaacaaacttctttgagcctgctggtaagcctgatatctcttatagagaaaatatattttcctccccgacttaggaataattcccatggtttggtttggagactttgattacgcattgtagcactatccttttttttttttctttgcagctatggaatcaatagacattcctaaaattctctcccaacagggtggcgaagctgtttaccctttaccacgaatcaaaactttagaagttcacccaaagctgaacttagcagctttgatttttgcagttaagaatacttcctactggcactccttccttaggtagaagtgtggcttctgtctttgacatactgggtttcttatacagaacatggtgggtaatgagaacactcaaaatcgagcagctcagactagagaaggaaggaagcagctctttgcagttttgcaaagtgctaggggatcttcaggtgaatcttgaacactaatgttattcaaacataacaattgatactcttcttaagctgtatggatgtgtctcttgagagtaaccaatcctctgttaatagtatgggttgtgggttcgaccagagtcgttcgtatcaatatccggctttctaacatgtgagatgattaacagcttctgttctaaaggaaaagctttcgtctatgggttcctctggaattttagccgagcatcaacttcaagctctgctacaggagcacaaggggtaggtggatatttctcatgcaatcactgttggaaaattgcgcaaaaaaaagttactagcatgtgctgtgaattccgtaccaaatgactcaaatttcatctgcttcatagttcactctgttacttttctacagccagagtcagctaacaatttcagatatcgcacggaaggcgttcttgtatagtgtatgactgctttaccttcttgcttagacattatgtttgttttattatttggaactattttgagcttagtcgatgaattaatccgtacagcattttatggagggtcatgccaaaactgctccaatatcaaggttaccccttattacggtcgtggatacaaaggatcaacttaaagacattcctgtttgccaggcatgtaactgttgtttagtgtttcttttctgtagtatctgatttatgcctgactgattggattatctgacagccatttcatttggagctgaatttcttcaataagccaaatagagttcttcattatcctgtgaggtccttttatatcgagggccttaacctcatggctcacaatctctgttctggaacagacaacatctacaagaagctgtacacatcggtataatctgatatcatgtgatttcgttttagtttttggtttccttttacttacagaacttttctgtttcagatccccggaaatgttgaatatcattcgaaacacattgtttacagtcgtaaaaggcacctctttctggttgtctttgagttcagtggtgctacaaatgaagttgtgctttactgggaaaatacaggttcccagctgcctaatagcaaaggaagcactgctaaaggtttgtctaatcattggattcccttgctattctttagagaacttcctatcctgcctcataacttttagttttgaaaacattaaacggtatcatactgcatccagtcatttaaatataccaggggtacaatgtatgctataaaacagtagttactaacaatcaaggaagctgaacgtttcaacgaatgatctgtttacttgatagagatgcaagcttagaattatttaagccgttcatcctttttgttttcctatgtttccaaaggcgtaaacgaacaagagaagagtaacctcaaagctatacttttttggtatgcaggttgtgatgctgcctttatcggcccaaatgacgatcaatttgcaattcttgacgaggataagacaggactgtctatgtatatcctcccaaaacttaccacaatggaagagaatgagaagaatttgttatctgaagaaaaccaaaagaaagaggcggatccttctggaattcagggtccacaacaattcatgtttgagacagaagtcgatcgtgttttttccacaccgataggtgatgttgcatcagataatctcattcttgaagttacagataatctcattcttgaagttacttatcaattggagcatgccatcgctaactgatgcctctttaaattacagagtccactctgatgtttgcttgtaatggaacccaaattgggctggcaaagttgtttcaaggctaccgtctctcagcttcagatggtcattatatttcaacacaaggtgagggacgaaagtcaatcaagttgaagaaacatgaaatagctcttcaggtatgcaacatctattataacttcgtactgtttattagtagtttggtgggaaattttccaaccaaataaacttttgatatctagtatttgattctatgaccagctcagtaaatgcagtcgttttattccttaccctttaatgtggtttacatctggccggttctctttgaaattaaaacgatcatgttcagaaaattgactcgtcatgttggtgttagcgttctattgctgtcaaaaattggttgaatcgacaattgatattcctgaaattttggtcaatcaacttttgtattacgtagagattcttagaatatgatttagatttctaaagtagttttttccatcaattgtataaagaactaattgttgtctcaaaatgtacaggttcaatg

SEQ ID NO: 28316 - DNA, 3000 bp, Unknown
  misc_feature (1)..( 3000): 2750-1469P.txt file - cDNA_ID_2995061; gDNA_ID_2936555; Annot_ID_194202
tcaaaggtatcctatgtagttttcaaactacatgtatataataattattttttagttcctatatatattttctcaagaataatcaatggatcaacaaataaataaactatattttatcataacaatcttataatttgaatattgaaactcatattttatgtttgatatattacaggaataggagtccaaggaaaagtaccgtgtctttcgcgtatgtttaataaaaataatacgtgttctttcctaagatgtgaagctaattgtgcacggaagtataaagggtatggtgattgccgtccaggagacaggccacacgacaaaaaagactcgttgttttgtttctgcaattatccttgttaaaatttaaaacacctaaggagtgcacatacattttacctccatgcctttttaacttttttgtatttacagtaaaaatcaaaccatatttataataagtgttgtattgtaatataataaaccatatgttcggaatttatggtctgacggtttgtactagtgaattcttaccaaattctagtaaagaataaattttggtaatttgcgtttatatatcgtaattttttttaatctttcatctaattaaagtttggatatgaggtataatgcataaacaactaaacggaccttatatcaacatctcgtttccacatattcaaagagttaacgtgagaagaaagaaaagatgaagattcttccttacaccagaaaaagctatatcatcatcattcacaaatgtgcaaaaccatgggaaaagctagcgatatcagcaacacatgggccgctagatctagccgttacatgactcttttacagttttacttttacccatagatacacattcccctctttacaaaagtcaaaactaatataagatatcgttggagcatcaagaaaagataaaagaaggatggagtcttccacatcgtgtgatcaaagatagttaggcttacactcttgaagctacccgttgacttagaaagctaatgctttaaatgatgaaggccaaactatccatgcgcatcaccaagcccaagtattattatattcacaatagcccatttgttgttacattattttgttgattgaataatacctaaatagtttaactaatcttctattcgagttttagttatttacatgtttatgtaaagattaggaagttttgagttttgagtaaatactattgaatacaatgacaacaacaaggttagacatagaacagtaaaaccaataagaaaaacatatcacacctttgcagcaggaagaaaagacgatctcgcaaactcttcataagttgcgttatggcacttgtgtatctttagtctacaatttcgctctttgttactattagtggaaatcttgttagatatctcctaataatactagcaatttaaatcaatgatagatgttgtggaggatggagacgatagagcaatttgtagtgtctgatgataaactataatttcatatttatgaaaaaaaaaacaaaaaaaaaacttttacaaatggtttcaattgtagactttgtagtagagaattttatatgtaatagagagatttatagccaacgacttcttattttggttcaacgactcgagtggggaaatgcttttgatgtgtttaccaaagattgcgcatcaatcaatggttacaaaagtcaacaaagtcaaagctatatagattacgaccattctcagccgtccgataaataaagggtattctgtctttttgaatgacaactagcatttctggtgaccacgagaccgggaatgttcgtcacgggacgttttcattgtcgttcgttcccaccaacatttatcgttattaatttacaaacaaaaccgtttttagcaactagtaatatttaattaatcactaaagcactgatttattgttctaacaactaattgattgcaaaaactacaaaaactactccaccgactccacaattccgcaaaatcagttttgtagtttttttttttgtatcaaatccacaatccgtaaatcagtacatttttcagtcattatacatacattaaattatttttgtcaattgaaacaaaagttaaatctaagtttttcaactatgacttacggtaaaacctatcacaatcatatacaaatacaaatatttgtttacctagttgatgttcgtttctccattaagatcatttatctgaatggatttgaatattgatgttcgttttaaccaacttaatagagcaatgagataaatcagttaaatgaattttaataaactcatccaaaaatgatcgaaatctggctgattctgatcagaacagttaactggaagtgattcagtttaaaatactaaatgttataaatacaaaaaaaaaactaaatactataaataccaaaaaaataaaaacgaacatcattcagataaattaatgagatggatcatttgaataaactatttggatgcatatcctaaataagcaaactaacaagaccctaaaaggattagatattgttttgaccttttttcctaatcttgttctacatcaaatttgtaaccactttcgtgactagaagtttattttatacccttactagaagtttaacgagacctctctcatttgagctttcttattcgatatacgcatacatggattttgtggtcgacatttccaaagcctataagatcatcaatccaatggttaaagataaatgacattgagcttgactacgataacttaagtgcgcatcaaaacatttgattattcctcatccaaattaaaaaaaaaaagaacggtgggagcatttaataagatatttatttacctgcactcacgtcctctctcttcttctttcactcttacacgaaaggaaaacaaacaaaaacgaaccaaataaagttattttagtgctctctaatggcgatatgagagattcgtgagagaagatacagaaaaaagcttcataatttgagattctttctagaaaaatcaatcaatg

SEQ ID NO: 28317 - DNA, 3000 bp, Unknown; identical to SEQ ID NO: 14936
  misc_feature (1)..( 3000): 2750-1469P.txt file - cDNA_ID_2995061; gDNA_ID_2684234; Annot_ID_137693

SEQ ID NO: 28318 - DNA, 3000 bp, Unknown; identical to SEQ ID NO: 9727
  misc_feature (1)..( 3000): 2750-1469P.txt file - cDNA_ID_2995065; gDNA_ID_2684236; Annot_ID_192430

SEQ ID NO: 28319 - DNA, 3000 bp, Unknown; identical to SEQ ID NO: 9727
  misc_feature (1)..( 3000): 2750-1469P.txt file - cDNA_ID_2995065; gDNA_ID_1972175; Annot_ID_179974

SEQ ID NO: 28320 - DNA, 3000 bp, Unknown; identical to SEQ ID NO: 14959
  misc_feature (1)..( 3000): 2750-1469P.txt file - cDNA_ID_2995065; gDNA_ID_2684236; Annot_ID_137720

SEQ ID NO: 28321 - DNA, 3000 bp, Unknown
  misc_feature (1)..( 3000): 2750-1469P.txt file - cDNA_ID_2995069; gDNA_ID_2684236; Annot_ID_137719
tattttggcccaataataacacggatgagagttctcagttctcacatttgacatcctccgcttcaattctaaatctcccggcgaagaaaattaccggcaaatttcacggagaaacctcgccaacgaagcggagttatggcgggcatggctgcggtggcaggattacgaccgtggaacgcttttattcaagctctagttctgatatctctatcatttccctttctctccagcgcttaccgacctggagatatcgtccggatgagcaagatggggcagtatcactctgttcgtacttctctttaacatattagctgagattattttctaatttgatcggagactaaggatctattgattctctggcagtcgagaacgacttggcatgatgtgatcggaaagcattgcccgatcttcgccgtcaatcgcgaggtactgtgtgcaaataggcttaagacatttgatggataatttggaaatttagattgaagcttgcctttctttgccaatttttaggtgttgatcccaatagcgaaaccaattggctacacaggaactgatccttataagatgtgagaattttctggtatttattttgattgcatttcaaatgaaaattttgtatagctctatttggtgcttttgaattgagtttacttgcttagttcattactggtttaaccagcttttagattgtatttagcaatttcgattgttgctactctgaaaggaaatgatgaagatactgtgatgttttcgccatttctctcatctcttttgattagcttaagccatttcgtatgttttttttagctctgtcttactgcagtttgtgtttttctgatgtcttatctgtgctgaacatggagtactgacatggctacatctttatcgtgtttgtacattattcatatgcaaattaagagtaattttgtgcctgatgtgtgtttatggatgatttttacatgcagaaaattccaagttggaagtgagaaatttctgattcactggcttttggtaattaatcgtaagagctcagaagttccgatgatcgatgtaaatttggtatgtttagcattgattttgagtttttatctaagctttgattgattagattatttgctaccaggaaaaaaggcagatttatgtaataccagtttttggatttttcggtgtgggttgattttttcatttgcgcagagatattctggaggagatctgcttggagtcacagctcaagttatcgacatgcctcatagctgtacgtaatactacctatctagctatattgtgtcctgattaggtgctcctgtttattaacaactgttttctgagcgaataagagaattgtctggtctggccaaaccaaatatgccaagtcctacgttcatatttgaaaactctagattatatgatatattaggtgatagcttctcggtgttgtgatgtttggttgcaaagcctatggccctagttaagctggcttcaatttgacactattcttattatatccagagtcttacagtatctggtgtaagttaatatcatcttcaccttcttagagacactgggtgctaatatattggcagtttgcattatagtccatttttctgttgttattttttgtgtcgattacatagactgattcaatctgtctgtctggtggcattactaaataaatttacagtttcatggttatgttaatagtggctttgaaaatttcttgtaactaatgaatctcatactttctctgctctgattattgaattttcatttctgcttgccttagagtagcactcagttatagtttaattgagttgagatcttacccatgaacagatctgaatacacacccggagatccgcaaacagttttgggatcctcaacactggccaaaacatgttcttgttagatacacatggtacaataacttttctcacctcttttcctatctctcctagctaataagtttgtgcatatggtcgaatcacaaagcttaaggataccacgttactgatacgtggctgagatactttattgtgatgcaggaaggagcagtcagagattgatgtatcctcaggattctatgtcctgtttggctcaggtaaaccatttttcgtcttgctaaacaattaattaaataagggacaataagctcatacacttatgtattctcatttttttgtttacttgtgatcagctctcacattttcttttgtactctccatttacgtcttacaatcgtcacgagagaagctggcaaggtaaatggtattcatgtcccctccaattcatacttgtatctttctttcttgaaccttattcttgaaaatgttgttgtaggtttgtaagagagacggtggtggagagcagcagcatgaatgttggagaatttggcaagggggattgagtcacatagtcaagtatatgtatgtttctacaattttagatacttggaatatggaattggccgttcaactctcagaaaagatttttcatcaaacatgaatagtcgaaagcaaaaactttgtccttgtaacattatggtttaatagatttacgtttcttaaaagttactgaaccatcaaccatggttttggttcaatatcaattacctagtctagtcttaaattgtctatagtttgagggatccaagacaaatcgtttcttattttgtaccagcgaggccagacacagtttcagaaaaaaaaaaaaaaaaaggatgtgtatacaagagtgaattacatttttatatagtatatagtatagatctgacaaaacggagagtacgtagtaattaaaactacaaaagcgaaagataagagaagagaaagcaatgcaataaatgaaaccaaccaccaactaacctcacaccttctactttcatgcatttgcactcataagctctctctatataaacccaaccttcattaccattcttcattatccaatccaatccattacttactaagtaaaaagagaaaaaaaaaaaattaagatatg

SEQ ID NO: 28322 - DNA, 3000 bp, Unknown
  misc_feature (1)..( 3000): 2750-1469P.txt file - cDNA_ID_2995075; gDNA_ID_2684240; Annot_ID_192548
tcaattagttaattaacctctttttatattgtttgcttaactaatgaattaacctcgtcttatattaatttgcttaactaatactacgatgattacgttttgtttttttttactttacaagatgtctagtcgttagcctttcacagtctctcatttaatttgttatccttttcgcatagaataatattcaattgtgtgttctgaatagaaaatatgtgaacttgtaggataatcacttcggctcttcttcttgtttttgttttttggttttagggttatgattacgttagtgaataaacttttgtgctatgttcgatgaaattgttgaaatatgaatactttagggttttgtgtacatgacgcaggcatgggatcttccataaactaacggtttgggcagatggaccgagtatgataacgcagtgcccaatccagcctggccaaagatacgcttacagattcaacatcaccggccaagaaggcaccttgtggtggcatgcacacgcgtctttcctacgcgccaccgtatacggtgctctcgtcatccgccctaaatctggtcactcttacccgtttcccaaacctcacaaagaagttcccatcttatttggtacgtcaatatagtaaaatcttttaccaaacaaaatacacacaatttctgagtatatacatataattaaaaaaattgtatttcataattgatctgattttattttttaaattgttaatcagacgacacgttagtatttcagttggtgaatgatattgaaggataaggacgttggtccttgtcatttaaaattgaaacttctatatacttcagtagtaatattgaccaaattaagtcttctatgttttaaattattatatagtactgtgtaataatatattagtaaacaggtgaatggtggaacaccgatgtagtcgcgttagaggaggcagcaatcgccaccggagttcctccaaacaattccgacgcttatacgatcaatggccgtcccggaaacctatatccatgctccaaagacagtgagtccaaagaaacctaatctcatgatatttttttcttaagtataacatacatggcatttttttttttttttttttttctctaacttcgctgcatgaataaatattaagaattaaattcacattccaaacttattagtttgcaaattaacctttattttcttaatgaatgaaaataggaatgtttagcctaaacgtggtgaaaggaaagagatacttacttcgcatcataaacgcggccatgaacatccaactgtttttcaagatagccaatcacagactgacagttgtagccgccgacgcagtctacaccgcaccttacgtcaccgacgtcattgtcatcgcaccgggccaaaccatcgacgcccttctcttcgccgatcagtccgtcgatacctcctactacatggcagctcacccttacgccagcgctcccgccgtccctttcccaaacaccaccaccagaggcgtcattcactatggcggcgcgtcgaaaacagggcgatcaaagcccgtgttgatgccgaaactaccttccttcttcgacacgttaacggcttacagattctactccaacctcactgccttagtcaatggacctcactgggttccagttccacgctacgtggacgaagagatgctcgtaaccatcggtcttgggctagaggcatgcgcagataacaccacgtgtccaaaattctcagcttctatgagcaatcactctttcgtgttacccaagaagctatcgatcttggaagcagtgtttcacgacgttaaagggattttcaccgcggattttccagaccagcctccggttaagtttgattacacgaacccgaacgtaacccaaacaaacccgggacttttgttcactcaaaaatcaactagcgccaagattttgaaattcaatacgacggtggaggtagtgttacagaaccatgcgcttatagcggcggagagtcatcccatgcatctacatggatttaatttccatgtattggctcaagggtttggtaattatgacccgagccgtgaccggagcaagttaaatctcgttgacccgcaatcccgtaacactttggctgtccctgttggtggatgggctgtgatccgtttcactgctaataatccaggtataaactctctatccaattccttagttatactaaaaatgtaattatatagtttagagttttacaaaggctattattgttgtttatgcatgaaacctaaatattggctacattgtttcaggtgcgtggatttttcattgtcatatcgatgttcacttaccattcggactagggatgatatttgtggttaagaacggaccgaccaagtcgaccaccttgccaccgccaccaccagatcttcccaaatgttaagcaagataaaaaaaacatatttcatcgaaaacaataaaaagaagattatttagagcaaagaagacaaaaatttgtctctctgtctcacatttgttttgatgtagtcggtaaagaaattgtattgtagtccattcatatgttgttaccaattgtgtgtgctgtgagtaatttatatgatttattattatttttgtcacttttacaagttttaatttgatatttttgaaaagaacgtcacttgaaccaaaataaaagttctactaattaaaaacatttttatagaacaagaaaaaaacagtttttgataatttgcataagctaaaaacatttgtaatctagacattacccgaaaaatatttattcaaaattttaaaatacaaagttagtgccccatatctttgtaaagtactccaattttgtgatttgcagtttaattactacttcaatccggtaattttaatctgatttagtttcataccggcatttgggataaaccgggttcccggttaaacaaattccaaaacattatccaaaacaaacagagaattttatcaacggaattttcccaaaagaaaaacagagaatg

SEQ ID NO: 28323 - DNA, 3000 bp, Unknown
  misc_feature (1)..( 3000): 2750-1469P.txt file - cDNA_ID_2995075; gDNA_ID_2684240; Annot_ID_137748
attagttaattaacctctttttatattgtttgcttaactaatgaattaacctcgtcttatattaatttgcttaactaatactacgatgattacgttttgtttttttttactttacaagatgtctagtcgttagcctttcacagtctctcatttaatttgttatccttttcgcatagaataatattcaattgtgtgttctgaatagaaaatatgtgaacttgtaggataatcacttcggctcttcttcttgtttttgttttttggttttagggttatgattacgttagtgaataaacttttgtgctatgttcgatgaaattgttgaaatatgaatactttagggttttgtgtacatgacgcaggcatgggatcttccataaactaacggtttgggcagatggaccgagtatgataacgcagtgcccaatccagcctggccaaagatacgcttacagattcaacatcaccggccaagaaggcaccttgtggtggcatgcacacgcgtctttcctacgcgccaccgtatacggtgctctcgtcatccgccctaaatctggtcactcttacccgtttcccaaacctcacaaagaagttcccatcttatttggtacgtcaatatagtaaaatcttttaccaaacaaaatacacacaatttctgagtatatacatataattaaaaaaattgtatttcataattgatctgattttattttttaaattgttaatcagacgacacgttagtatttcagttggtgaatgatattgaaggataaggacgttggtccttgtcatttaaaattgaaacttctatatacttcagtagtaatattgaccaaattaagtcttctatgttttaaattattatatagtactgtgtaataatatattagtaaacaggtgaatggtggaacaccgatgtagtcgcgttagaggaggcagcaatcgccaccggagttcctccaaacaattccgacgcttatacgatcaatggccgtcccggaaacctatatccatgctccaaagacagtgagtccaaagaaacctaatctcatgatatttttttcttaagtataacatacatggcatttttttttttttttttttttctctaacttcgctgcatgaataaatattaagaattaaattcacattccaaacttattagtttgcaaattaacctttattttcttaatgaatgaaaataggaatgtttagcctaaacgtggtgaaaggaaagagatacttacttcgcatcataaacgcggccatgaacatccaactgtttttcaagatagccaatcacagactgacagttgtagccgccgacgcagtctacaccgcaccttacgtcaccgacgtcattgtcatcgcaccgggccaaaccatcgacgcccttctcttcgccgatcagtccgtcgatacctcctactacatggcagctcacccttacgccagcgctcccgccgtccctttcccaaacaccaccaccagaggcgtcattcactatggcggcgcgtcgaaaacagggcgatcaaagcccgtgttgatgccgaaactaccttccttcttcgacacgttaacggcttacagattctactccaacctcactgccttagtcaatggacctcactgggttccagttccacgctacgtggacgaagagatgctcgtaaccatcggtcttgggctagaggcatgcgcagataacaccacgtgtccaaaattctcagcttctatgagcaatcactctttcgtgttacccaagaagctatcgatcttggaagcagtgtttcacgacgttaaagggattttcaccgcggattttccagaccagcctccggttaagtttgattacacgaacccgaacgtaacccaaacaaacccgggacttttgttcactcaaaaatcaactagcgccaagattttgaaattcaatacgacggtggaggtagtgttacagaaccatgcgcttatagcggcggagagtcatcccatgcatctacatggatttaatttccatgtattggctcaagggtttggtaattatgacccgagccgtgaccggagcaagttaaatctcgttgacccgcaatcccgtaacactttggctgtccctgttggtggatgggctgtgatccgtttcactgctaataatccaggtataaactctctatccaattccttagttatactaaaaatgtaattatatagtttagagttttacaaaggctattattgttgtttatgcatgaaacctaaatattggctacattgtttcaggtgcgtggatttttcattgtcatatcgatgttcacttaccattcggactagggatgatatttgtggttaagaacggaccgaccaagtcgaccaccttgccaccgccaccaccagatcttcccaaatgttaagcaagataaaaaaaacatatttcatcgaaaacaataaaaagaagattatttagagcaaagaagacaaaaatttgtctctctgtctcacatttgttttgatgtagtcggtaaagaaattgtattgtagtccattcatatgttgttaccaattgtgtgtgctgtgagtaatttatatgatttattattatttttgtcacttttacaagttttaatttgatatttttgaaaagaacgtcacttgaaccaaaataaaagttctactaattaaaaacatttttatagaacaagaaaaaaacagtttttgataatttgcataagctaaaaacatttgtaatctagacattacccgaaaaatatttattcaaaattttaaaatacaaagttagtgccccatatctttgtaaagtactccaattttgtgatttgcagtttaattactacttcaatccggtaattttaatctgatttagtttcataccggcatttgggataaaccgggttcccggttaaacaaattccaaaacattatccaaaacaaacagagaattttatcaacggaattttcccaaaagaaaaacagagaatgatg

SEQ ID NO: 28324 - DNA, 3000 bp, Unknown; identical to SEQ ID NO: 5534
  misc_feature (1)..( 3000): 2750-1469P.txt file - cDNA_ID_2995133; gDNA_ID_1620800; Annot_ID_168621

SEQ ID NO: 28325 - DNA, 3000 bp, Unknown; identical to SEQ ID NO: 13150
  misc_feature (1)..( 3000): 2750-1469P.txt file - cDNA_ID_2995137; gDNA_ID_2214602; Annot_ID_135571

SEQ ID NO: 28326 - DNA, 3000 bp, Unknown; identical to SEQ ID NO: 13150
  misc_feature (1)..( 3000): 2750-1469P.txt file - cDNA_ID_2995137; gDNA_ID_2214602; Annot_ID_187082

SEQ ID NO: 28327 - DNA, 3000 bp, Unknown; identical to SEQ ID NO: 27374
  misc_feature (1)..( 3000): 2750-1469P.txt file - cDNA_ID_2995141; gDNA_ID_1621122; Annot_ID_172114

SEQ ID NO: 28328 - DNA, 3000 bp, Unknown
  misc_feature (1)..( 3000): 2750-1469P.txt file - cDNA_ID_2995145; gDNA_ID_1620352; Annot_ID_154362
gggtatgttcaacaagggctagttgaagatgctatctacatgtgtcaattaatgagactagagaagctgaaatatgattgtgtcactttagcgacattaatgtctgctgctgcacgtactgagaatctaaagctcgggaaagaggtgcagtgttattgcattagacatagttttgaatctgatatcgttttagccagcactgtgatggatatgtatgccaagtgtggcagcattgttgatgctaagaaagtgtttgattctacagtagagaaagacttgatactgtggaatacgttacttgcagcctatgcagaatctggtcttagtggagaggctttgagattgttctatgggatgcagctagaaggtgtacctccaaatgtgataacatggaatttgatcattctaagtcttctaaggaatggtcaggtagatgaggccaaggatatgttcttgcagatgcaatcctcagggataattccaaatcttatctcatggacgactatgatgaatggtatggttcaaaatggttgcagtgaggaggcaattctgtttcttagaaagatgcaagaatcgggcctgagaccaaatgcatttagcatcactgtcgctctctctgcttgcgcacatctagcatcattgcatatcggaagaacaatccacggatacatcataagaaatctacagcattcctctttggtttctattgaaacttctttggttgacatgtatgctaaatgtggagatataaacaaagcagagaaggttttcggaagtaagctatacagcgagttgcctctctccaatgccatgatctcggcgtatgcattatatggtaacttaaaagaagcaatcgctctatacagaagcttagaaggtgtaggtcttaaaccagacaacatcacaatcacaaatgtcttatcagcatgtaaccacgcaggggatattaaccaggctatcgagattttcactgatatcgtttcaaagcgtagtatgaaaccatgcttggaacattatggacttatggtagatcttcttgcatcagctggagaaacagaaaaagctttaaggttaatcgaggaaatgccattcaagccagatgcacgaatgatccaatctttggttgcttcttgcaacaaacagcgtaagactgagcttgtggactacttatcaaggaaattgcttgaatccgagcctgaaaactccggtaactatgtgacgatatcgaatgcttatgcggttgaaggaagttgggatgaagttgtgaagatgagagagatgatgaaagctaagggtttgaagaaaaaacctggatgtagttggatacagattacaggagaagaaggagtccatgtgtttgttgccaatgataagacacatactaggatcaatgagatacaaatgatgttagcattgttattatatgatatgggtacaggttccaaatgataattatgtgtatgaaatattataaatttgatcatgtatatttagactctcaagaattgagaagctttgtgattactgttgtttaattataaaacacaacaaccatcgtatcttaagtgacatgggacaacaaaccgttgcgtcagatcttcaaacaactagttttactcagtccagccagtacatggaccgaccgattgtcggtggagaatctgataacagatctcaaccatccacgtggttagtcggtaccttgagtcctgcgtcaccattttcagacaacataaattacacaagtacccctgaatttttgcatataaaccatgaaattgcttcatatatatatctccggttttacctgaccgtaacgatcacgcattcatgcactttaacttacgttttatcaccgacactgacactgatgacattgctacagtcaaagtctcgtagattcgggtctaatcaaactttaaggaacaaataaagatttgttttataaacgaagaagaagaagattctatgcttgtgaaatgagcttgaatttttattaataatggagtaatgggtttacgataccttaatttatgacgaagagatactcttccaactcccacgtgacatgtttgattatataataatatgaaaattttgtatgtttttgagtctaaaaaggtatttctatttttagctacacatacaaatcacatgatagttatgatccactataaatttctcaacaaaaaggagaacaaatcataaatattgctaagccaaaataaatttgacatttaaacactctgtagatgttaggttaagattagttggggacatgtgctacaattacaaatgaatttcgtaaggctgttgtaatctgctttaggctaaaatgcgttgtcgcaattcctattgtttttaatttccctcatacttttctataaacttacaattttttacctacacttagtctaccaaagtatcaatattatagggtaaaatccgaagcaataatgtctagtaaaggcaatcaaacatttgtagcggcgatgtggtcaaataatggtttcctcttgatgcttaatgtcgaaactagaccacaataatacaaatatgggcacaaatatatcaatttctgaatcataaactttttctctttagaaagattagcatgtctcacttgtttcatcctatatttaatttcgtctacatatatagatacctagttcataaaaacttccatttttctagaaagttcaacaatcgtttaataatttctaaaatagtagctaggtggaacccgtggaaggctggaaagaagagcatttgacatggtcacaaaacttgcaaaagcccataagcttaaattcgcaataaatacaataaataatgtcatcacaataaataaatacaatggcacaatcgtaattacaaccaaaaaccacgtccattaaaaactaaacaccaccttcttcttcatcccctcactttaagctcttcttcactcacactctctcaaaaatcaccaaaccaaactcttcactctctccaacaatg

SEQ ID NO: 28329 - DNA, 3003 bp, Unknown
  misc_feature (1)..( 3003): 2750-1469P.txt file - cDNA_ID_2995149; gDNA_ID_1620838; Annot_ID_50836
ttgctactgactaaacgaatttgattagtaagttgatttttgaggaattggttagttgatttttgaggaatttaaagatttcaaaagtttagagattttaaaagttttaaaaaatcttatggattcttctcaatgagttgtctaaactctagcaatgattttcatggatttttgtttacttttcctaaacgaagttttacaagacaatattttttccctcttatcatttcatttacttgttttattttactcttttttgtttattaacctaaactaaattatatatttcatatgatataaatccttggcatattttttgtattattatcaattatcactatcgttaatgtaaaatttatgaacttagaatttctactgttatttatgttaacagatgaaagattgatttttttgggttttttgagttttatttttaagagattttgaaagttgtgtcgaagagaattcatgtcccaataacatgagaatttaatagaattgtaaaatcagtgataactaaactttttgaataacaagaaattgtggatggagtttaaaagtcatcaaagcaataacactagaatatactaagaatataataatccattaacgaataaatgtggaatctgaaaaaattttaaattaaaaattcatcaaccaataacaccttcttagcagcaaaactcaaaagttaggcgatcgaatttgattttgtctcaacttagcctgtgaattcaaattatttttctatgattttgtcccttaaattataactgatctacttcatatagactattataactaaaatcatttctagtcaataatagaagatgctacgaacaaaagcacttaattttgaaaccttaaataaaatacatagtataacgatttttatatacttatctattagatcacaaaaactaaattcaatgttaaaaataaagtacataaatttatttgagatatggaagaggtaagaaaatattatttgataaatatatcacaacaattattttgttaaatattacataaataaaatgacacacgaatattatcgaaaatagtcaaatatccaaaatagataatagagatagatcttttcaacttcatttccttgcatgatggtcaaaattgatattttgttacatgtatcaagacttccagtttacaaaggtgaatttgaactaaaataaatatgaaaatcaaagaagaaataagtataatctagtaacacaatataaataaagggttttgtgcaaaaaaaactgaaattgtatattgttgcagctttacccttcacgttaaaaaaatgcaaataatcctataaattttaaaaataatgcgaaatatagccatttttttgcaaatttacatatattgtaaatattttcatgatcacatacatttgtttttgaattagactcttccaatatagcaatctattgaagaaataagtattatttatcaaaaaattgaatttttgacaatagcaaaaaagttaatttgcgtattattttgaaattcataagtattttgcatttttttatgtgaaagataaaattgcaaaaatagacgaatttgaaagttgtttttgcacaaaacccaaaaataaaatacaacaatataggatatatagatcatagcctctaaaaataaatttaaaattagactcttccaatgatgtttcaacccatataacaacagaaaagcaaaacaaaaatatttaaaatttgagataggttcgaagatgattatctttggaacttggttttcttgatgtatatgattaaatttggtgcatatgtaattaagtgtgcactggaccaataaaaaacattgaaaccttatataatatatcttcttatgacacattattatttaaataaacaaacaaacaaaactttaaaagcgtttgcgttcagcgttcagcgttcagcgtttgcgttcgacgtttagagttggcacaaaatccaccaaattaaaaccattcaggcggaggattcaatatatctcacagtttcactctcaacatttcaatatctctctctctctctgtgaagaacaaatacagcgtttcttctgcgattagatctatttcgatactcacgaggattgcctcctgaggagactacatatactaaacaaaatacaagctgaggagactaaatatatttagttaataccaataatatatgatatacaactacatatttacaaacaaagaaaatatagtagatttgtaatatatacataattgagatttgatgattgattaaaccaagaataccgtgcgtagcacgggtactgacatagtatgtgtattattctgaacttcataagattatttttcatttttgatgtgaaagataaagttgcaaaaatggtcgaatttgaaggttttttgcacaaacccagaaataaaataaaacaatataagatatgatcatagcctctgaaaataaatttagaactagactcttccattgatgtttcaacccatataacaacataaaagcaaagcaataagttgaaagatgataatcaaaattaaaaaatgagtatctttgcaacttggttttcttgatgtatataattaaatttgttacatatgtaattaagtgtaaactggacccataagacctttttcatccttgtaagcttaatgggctttatcaatataatgttggccgacaaaaaaaaaaaaaaaaagacccataagaaacattgaaaccagtctggcccatgacccatataatttatctttaaaagagtctgcgttccacgtttgcgttccgagtttgcgttccgtgtttgcgtttagagttggcacaaaatccaccaaatcaaaccagtcgggcggaggattcaatatctcagagtttcactctcaacatttcattctctctctctctctcaacaattagatctgtttcgataatcacgaggtttccctcacttcctttccattgctaaaccaggatttgcctcctgcatttggaaatg

SEQ ID NO: 28330 - DNA, 3003 bp, Unknown; identical to SEQ ID NO: 28329
  misc_feature (1)..( 3003): 2750-1469P.txt file - cDNA_ID_2995149; gDNA_ID_1620838; Annot_ID_169983

SEQ ID NO: 28331 - DNA, 3003 bp, Unknown; identical to SEQ ID NO: 28329
  misc_feature (1)..( 3003): 2750-1469P.txt file - cDNA_ID_2995149; gDNA_ID_1620559; Annot_ID_160563

SEQ ID NO: 28332 - DNA, 3003 bp, Unknown
  misc_feature (1)..( 3003): 2750-1469P.txt file - cDNA_ID_2995161; gDNA_ID_1971823; Annot_ID_176251
ctcctagtcttgcattggttacaaggtagacataagaaagaataatatcaagaccaacataaccaaccaaaaaaaaaaaacatgtagctctataaaattaagcaagagggataatacaatactaaaacatataaagataatgggactcatgtaagattcattagtcaatgctgattagaatactaaacaaagaagatcgaacaaaagtaaaaaaaaaaaaaaaaacctcttttacttcattctctgtgattctaccatctccatttttaaccctgcaagtttcaaaaagtgaaaaaacaaatcaagaactttagctacatgttgatcaatatgtttaacaagatttgatgataattgataacaatacatgttgaagaagatttgaagacgagaatcgaagctttcgtctgtaatttggtaccaaaactcgtataattcttgaagattgatcttatcaaccattattcttcttctcctacacaatgcgtcgaacaactcgtctgcaaactctttggaattttcattctccaaacctttcaaacacagaacaacaaaatttacaatctctatcgattctccagagtcaaactcaatttcaaaactgtgaaaatcattatgtcgaacctatgcaatgagcaaaatcacttttgaaaagataaccatctttagaaagatgagcgaaattgttttgaacatcgttccaatcaacgattccattttctttgctgcttatgaatttcaaaccatgaatcgctctctctgtacccgatccatcccgattaggtctagttggtcgctgagataaagctcgagggagattaaccgaatcggtaatttcgcctctgtgtggaaccaccggttccggtgcagaccgagacgaataaccgtaaccacgccgtgagatcttctggatctgctgctttgagttcgtccccgccgtcagtctctccgacgacgcgctccatcctaagctaagcgaccttgatcctgaaccggaatccgagcaagaggtgatctctagatcggtacctgaaatatcggtgccggttccggtaacggagtcgatgtttattattacgccgcttgggaattcgattgttacttctaggagctcttcgccggaggaggaggaggaggagggtgagggtgagtatgttgctggtaaggatggaaagctttgggtgaattctccggcggaagctaaatcggagccccaacgatcgttgtgagtcccgccggaaaatgacattgacattttgaatttgttgggaggagaggagagaagccaaggagggagaagactgaataaatacagtttttgaattttgtgtttattataaaatttgtcttttgtactaatcaaaggaacgaccagaggaaattaccaaagcagaacgaaaatataaaaataagtttggtttctaaaaatacggttttaaattatactatatttacgagttacgacacaaaaaattatactatatttttgtgcatgttttaggtacactttaattatacttaactcgctgttgttgtgaaattatatatttttttaaaaaaatttaatttgtttagcatattaaaaatatatatgatttaatgttttgaatttttatatattaattaatgtataattattatatttgatttttattctttaaaatataaaaacaataaaatacaattcatttggttaaaatctatatcacaactaaataatttgaatttgaattgtatttgttttgtttagtgtttaaaactagaggtatcaaaatgtctcaactcaactcaatccatgaaccctaatgagttgaaaattttgactcaaatgagttaatgggtcaaatgagttgatgagttaattggtttgatgagtaaaatgagttgggttgtaatggttaatggtttcaatggtttacccaattaacacatcaagttttgtaaaattgaattaaactaattaaaatctctaaaccaatgtcaatttaagtttaaccaacacatctaaaccaatttaataaatcattatttttccaaatttcttaaatatataagcgataaaattgagaaaaagtaaactcgtaaatttttttttaaaaaacataaacccgtgatttttccgccaaaaataaaaacatgtgattaaaactaataaccgaaacaaagtttggaagataaaccgacaataagtcggagatagatacgaacgaagacgaaaagctaaaacataaaacgaaatctaaagcccgatgttaatcggattagcaaaagatagtaacaagattcaaagttttttatctctaaaagatttgagagaattaagagagaaaaaaacttatatgacacaaatacatttaagattgtattttggtgagcaatttaaaccaaaataacataattctcataatacattcaacacatacattaaggagggtcaacattatcgaatcgagatccacccaaattaattttataacctaaccggtatagtaatttgccttgtatataaagtttttggaaccaacccatttaactaaattcacaaaatataataatttaaatttaagtatattaaaactataatatgaattaaaattagttagttatctttatttttattataagtttttgtccaaaaccgatcctaacctaaattgaaccaaatgaaaccacataactggatgcagactaatcaacaacaatcgcacgtgcgtctgagaacttgtcacgtgaccactccgctcctttctttggcttcgagttttggatgatgaaaaataattattaccgcgtttattataaaagtttctagggtttacgaaatttgggtctctctccctctctctacttaacgctctctgtatcttcttctccgtcaacgatacgaacccagagacgtcggcggttaaaacaatcgtcggatctctctggattcgttagacgagaagtttccggtatctaatttctgtgcgttagagagaaattagggttgttgctacgatg

SEQ ID NO: 28333 - DNA, 3003 bp, Unknown; identical to SEQ ID NO: 28332
  misc_feature (1)..( 3003): 2750-1469P.txt file - cDNA_ID_2995161; gDNA_ID_2926152; Annot_ID_198148

SEQ ID NO: 28334 - DNA, 3003 bp, Unknown
  misc_feature (1)..( 3003): 2750-1469P.txt file - cDNA_ID_2995163; gDNA_ID_2214482; Annot_ID_183394
aaatatgggaaagaaaacacaaaaacattctgtcagttggtgacaaaaggaacattctgtcggttatacagtctttaaccattcaccaaagcaagttgtttataaattaacatcgaaaactatgcatattttggcttactggcccgttaacaaagcataaaaaaagtatttatcgttctctgttttttactgcctaaaatctttccagatttggaattacattggcttataaatgtacgttaatgagtaaacactaaatcacagcatcccatatcgccaactaagaaactcaattatctcccaagtaaattttacttaccatcaccaatctatcatcacttgttacccattttaccaagaaaaaacgaaaagtttctttcccataatatatatgccgccgattgccaagaaaaacaagattttcattcctagattgtgtttgcgggtaaacaataaaaagaagaagaaaatggtcaattggttaagaaactctaataagtaaaaacaaaatggtttcgtgtaagatcaattcgaattcatttttattttggcaaaattgcaaaaattaataagagttgatagtagacgacaaacattttcttgtacactaattactgtaacagtcacattattataatgaaagagggattcagcaatcctaaaatatgatttgtaatttcataatcattaattaaatcgcccaattttgaactttttaatcttaaaacttcggaaaatgattggtctatatttgtgcccaatatatatatatatatatatatataagtataaataataagttctattcttaagaatcattagtatatcctaaaacctgcttttggcaatcaagaaaataacttgcaaaaaacccatggcgaacctaatcttcactaaaacagactccagaaaaagagtgttccaagcaaaatcttgatgatataagagactccagaaaacaatcgtctctctagtgagcttcacatatcaacagtgtataagtttttgactagcaaaaaacaaatatcgttcacatttgactgatacatcatacaccaaactgaaaagacagcattccccaaatcacgtatagaatcttaaatcatataaaatacattttgttctttgctttgaaatatcaaatgttagtgtgatttgtcgtcatgcaacgcatgcatataatattaatttattatttgatttggtaataagtctctttatacatgcattgaatccaccgaccaagtctactatatgctttgaaagtttgaattatataataatagaaaagattgttgtgaagagcaagctgaatcgatttggagaattggattccgatctggttttataattgttcgactacaataatgtcaaatgggatagcaagaaaataatgtataaaggttgaaattgcgcaacacctaacaaaagggagagaaagaaaacaccccaaaaacaaaaaggtagaggaagaaacacataaaagaggagtgaaagagaaagaagcataaaaagaaaggaatagaaatagagcaccaatcaatgacttcaaattcaattatttcgaaacaaatttttaaatttatagattactaaaaatcaacaaacttttatagaataaatttgtaaatctatgattcattagctaaacaactaatttttacacactaaaacaattcagagatgtgtacaaataaagacatgtgttaaataataataattatttgtaaaaaaatgagatataaaaaagtagatgcaaccaaattttttaaaaaaaacctttaaaatgccataaaaccattctaaaagtttataactgtatatatagatttgttattaattattttatatgttgctattcatttattaaatatcatctagttgttcaccataatccataatagggacaaaatcttaaatacatttcatatcaatttttttctttcttacaatctgccaagttaaagaaattcacaaattataaaagagaaataataaggtagtattaaaaatttaatactagtgactatcaatagatagtaacaaatactaatataagtatatattaattacgcgttatatataccttttaacaaaatatattattgttgttgactgatacagagagaaataaaaaaaaaaacagtttcgatttttgttattgcaacaaaaagtttcggaaaatagagagaaaagagagtgagtgaggttggtgatgaccagattttgaggcttatcaatagtacaaagcttgcaaaatcaatggcgcaaattctgttggtaagtataagaaaaaaaagaaaagctttttcctttagatgtcatgtaactgtcgggagagcactcacgtgtttctgtctcttcacctgtaaatattctcgccacgtttgctctctttctttttttccccgagaaaacgcaaagacaaagacgtttttttaatttggctatagcatgtggaggctatgggttcttatcttgtatcgtcgttctttgtcttcaatatctttaattcaatgataagcagatcatctctttcttcactcctacacatcgattcacgtcatccacccagaaaaattcatacttcaattaaaaattctgtaagtggaaaaaacacagttggcaaaatgggcaaaagctaataattgatttatctccatttatggctaaaagcctaacactaggctctacacttttcaagtcttttcattttctgggtaattgttgttcaattttagagatttagggtttttgattgttcttctttttctgggttttatctaaattcgtggatatgagaatggcatgtgcgtgaatgtggcctactttgttttcttccttctaatttgggaacagagtttggttgtcctatttattgttactttgtaggtttcactcttttcgacattacttttcaattgcttcagattcataaatctatcttcttctttctttggttgttcagctttagcgtgttaggctgaacatttaagaaccatg

SEQ ID NO: 28335 - DNA, 3003 bp, Unknown
  misc_feature (1)..( 3003): 2750-1469P.txt file - cDNA_ID_2995167; gDNA_ID_1620666; Annot_ID_163952
catcaatgcttcacaaagcattggaaggtgtaataatgatggagacgtttccaaaaacaaccgttgatgtttttgcattggttcttgaatctggaggaagtaagtcttaacaataactcgactgctatcaaaattattttaccagaatgtgattgcttattggttcgcttggacattcgtggagttgattatggaagcaacttattggattgttgtttggcattttctgattttctccaatggtattgtattgcaggtgacctctctgttttgatatcatgtgctagtcttgctttagctgatgccggaattatgatgtatgaccttatcacagctgtttcagtggtatgtgtatgttacaatagttgcattgattcctctgcgttatctcttatgtttattagcattaagtgaagaagaaagtaacacatacattgacatatacaagtgcaccatagtctgagacatgtaaaacgtatagatatctgttaattctttattttgatacactgaaattatgcctgcaattttcgaagtcttgcataggcaaaagccttatgatagacccggttacagaggaggaaggatgtgaagatggcagctttatgatgacgtgcatgccatctcgttatgaaatcactcagctaaccatcactggtgaatggacaacacctaatatcaacgaggtatgcctttcaataatatctcttgtccttaatttgccgatgacggttagagacaaaaggtctttcttttcttagtgttgaatattgatgttattcaactgctttgtttgtctaaatcacatggatattggttaattagactgttcttcattttctttttaagctgttcataccatagggtctatgttgttaacatataattgtgacataggagctgtgcagacatgttaccaaacatttgtatttcaaatattgcaggcaatgcagctttgcttggatgctagttcaaaacttggagagatcatgcgtgattgtctgaaacagtctgcctcagcttccgatgaatgagcataaataactatgattttggattgtagctcagacttggtatgaaaccggttttagctgttataggtaaacggatttagtctaaacctgtgtgtagtttaaaccgatgtatgttttcacataagatttgatggaactagatctttagctatgaaatggatcccaattgcgagtggtatcaaagacatacagaatttaaagtagggaatttcaacaaatcaatcacattgttctttacaatttcaaaaaacttgtggatgatattaatatcagattttctaaatttatacgaaaatggaatgatattaagaatagtatacagaaaaatgaagaaaagagtaactgatttttgcatcttaaaaaagaaaaagtcttctctggttcacacatcacacaagttgggggcggtgatgaaggagggtgtttaggtaatatcagctaacgtcggaacttcaactgatcatgtagtacgtacgatacgaagaagaagaatctaatccgcatgacatgtgattattttggtcagagagagaagagaagacgtgtgtcgcagcaaagtggacagttgtgcccttatagccaaagaagacttcacacgttttcaacaccacctaacaactgtttctttctatctcccacctcttccccatttttgtctttttatttcttcttctagtttctcccaattttctctttgatttttttttgttttttcttgtcttcttgttaagattgatacatgaactaatagagtaactagtaaattctaagacctttcagcattcttgaaatgacaattacaaacacacgataatttgcgggaacatgaatgatagaagacattagaaaaaaaaaactccaatgtataaaaagtttatgaaaaatataataacattttttacgaattattcagttttctgtaaatttttatttatttcgtaaatgcttgtatctaacatttcagctagattgttctactgattaatttctatctaacattttatgaactttatcatttcagtaaccgcaatgcccgtgaccactctgcatataaaagtgtatgtcttcttcacattcaatcacacgtactttcaaaattctactaaaaattaaatgttttttttttatataactaatcaaagatatctaaagtttttgagtcaaagttatgcgttactcaaatagaaaaaaacatttagaaacctaaaataatatctgctcctcctaaaacatttaataacattcaaaaacaagtcaataaaaaaaaaaaaatttacgaataaagcccttaattagtcaaaaatgaacgaacaaaacaaaggtaggagaaagtatgaatggcccaatcggggagattgcagtagattcatacaaatctgtaaatacaattttaccgggtttggtaaaaatcacaatagatcattttttattaataagaaagagaaaaagaatgcaaattcgtggggtttccaagaaatgcaagtgatatatttagagattgagatctgaccccattttttgcttaacacacaaaaaatccttgggcagaggaaaaagtttatagcgactcttttcctctaaaagggtctgtctcttccttcttctctcttcagatctccatttcacggtatccttctctcttccccttgtctctattgacttttatttgctttgatttttatcgatcgtctctgatcttttgctaatttaacttgtttccgtttgttttgaatttactctctcctgatctttggcatgtattttgaatctgctgttcttagttttttatttgatcttgttctcgtctgtcttaatattgaataattgactagttttatttacagatctttgcattatagatcccttcaagtgcgattttaatcgtagattagttttggatccgttatattggactgatgtttttgatgtattttttggtattaggatcaatcctgtgtttgaaacaatg

SEQ ID NO: 28336 - DNA, 3003 bp, Unknown; identical to SEQ ID NO: 28335
  misc_feature (1)..( 3003): 2750-1469P.txt file - cDNA_ID_2995167; gDNA_ID_2926191; Annot_ID_201036

SEQ ID NO: 28337 - DNA, 3003 bp, Unknown
  misc_feature (1)..( 3003): 2750-1469P.txt file - cDNA_ID_2995175; gDNA_ID_2684256; Annot_ID_193124
tattagcgacgagttcgttagccttatcggtgggatgatactcatcccaaaacacatacttacttctgtctttacacaatgtcgacgctggaatacacgttagcgcaggccggattctgtagaacgagcaacacggcgaatccgagttatcaaaccctataatcacacaaacatttaaacaagttaatccaatgatcaaagcgatataattaaaaatgcctttattaacaaaaactatccagcttaatttatgtgaggaaaatgaaacttctgattgtttaaaaaaaaaaaaaagatgccgtttgtgaatgcttcttttgattttatcaaagttttatattaccgtatttttttgggttagtgatgacgtcgttgacgaggtcataggcttcaccaaacctgtagcttgcgttagggagcttggtctcgagatctaggagcattgtggtggcagctttgttgaatctcttagcaagattactcgctttgttttgacaatttccatccaggcttagagctctttgcagtgggatacaacccattggtcctaaaccaaacaccattagcttcctcgctcctaaactatgtaacacctaaaacattacatgcatcacaaatttgtatcagttagatcattatatatatgaaagataaataggtacttgaagtgttgaattagtttagaaaataaaccttgagttgagattcaagtgtttccattaagtagtcgacgaaggtttgatcattgtatttccaagagtcgctatagacaggcatcaaatagttgttaatgaagtcattgctgcctaaagcgacgacgtatcgagcatcttgaaagaacttgtctgcttcttttttccctatctttgccacaactacatcttgtgtcccttggaataattctatttgcttccacagcgaaaatctttggatcttcacaaatacaatccccatgaaaaagaaataaacatttttagaaaatcattatcatttctttgatgaatcttattcatttatttttatgcaaataataatgaaaacttattatttcatgagacttacgaaataaccaccagtttcgttcaagattccaccacctcctgaagcatagttcactccattttcaagtattacatcttcattcattgatggatccaagaaggctactggtcttggcaatccaattttatcacctttaaatttcaacaaacccattataagcttgtactaaaacgtaattcacatgatatatatatcattgactaataattaattccatactcatgacttacctataatgtctgaaacagtgcggccattagtgaaccttccattaggcaaaccattgccaaaatcaataccgtaaaagggcagattcgccgtcgctaaactcctaggtagattcttattgttgcctacatcagacaatgaatctccaaatataaattggactatcttgcaatcgtagccgttgattgcaagaacgatgaataacacgaatatcgcgcagaacttcatgtcgccaaatttgaatgtgtgttgattgaaaaagatttgtttgggtggtttttaaaagggttttggaggtgaaaaaataaggactaagtaagaaaggtggaggagtagtgtgagaataaagtggtgaaggtagattttgagttgatgaaccaactgattttgtttttttctttttaattattgtttttggtttatgtttgattcaaacctacttcaactactctttcctcgtgttggtatcgtaagttgtaaccgtttcttgtccgtaaacttgaaattttggtaatattaaaccttgccgtttatgagctcatattatagcgtaaaaccaaaaaaataaactttacctcaatacggaatatttccttgtagtgaattaaataaatttagacctctatcaaacacttgtagtgattttcctcctgcatgtattcttcacttgctatttcgttactttggcttctcttactaaaaatatctaaaatcatatgtaaattgaaaaatactattcatgccgaaacaaaataaattaaaggaaatatttttgttttcttctaaaatttgcatgctcgtttgtaatttgttttttctcatgagctcagattgggtcaaatatgtttaattatgggccaatttcaagcccaatgcaccaaaggtggaattgctcggactggaagaaattcaggcagatgatcgagtggtatactggtaaatgaccaccaaaagtactgtttaagccgttggacactgaagagcagtttttgtaggtcagaggctttttctgactgaaacagagtaacgtgtctaaaacagaggtagttaatattttgatcaaaatgtgatttgaaatccacactaaatcggccggttatactggtaaacccacaatttgaagactaattcggtctgattataagccagtgtttttttttttacctgcttaaacccgatttagcggtttagcggatcaaattaattttggttgaaaacttcttctactttttattttattttttatacagtaaaaaagtaatagagtaaaataaactgaaatatcctttcttcaatcctttttttttttttttttgagcaaaaaaaaaaaatactgaactatccattgaaccatttttgtgtgaaccagaaattctacggatgttttgagcccataaaaaataatcaaaagacaacaaaatagttacataactaacctacgtggtcaaaaatcagccgattgctccaccaaatgggcgccacagataaataaatacccaaacccgtaactttatcctcatctcatcatcaccgtccatttctcaatccaacggtgtacatccctcggaaatctccaacaatatctaatccactaaatcaaaaacagatttaaacaaaagaagatttcacaaactcaaaacacagagaacagagagagagagagagactccattgttgaagtgtgttcactgaactcctcctcaaacaacaatg

SEQ ID NO: 28338 - DNA, 3003 bp, Unknown; identical to SEQ ID NO: 28337
  misc_feature (1)..( 3003): 2750-1469P.txt file - cDNA_ID_2995175; gDNA_ID_2684256; Annot_ID_138099

SEQ ID NO: 28339 - DNA, 3 bp, Unknown
  misc_feature (1)..( 3): 2750-1469P.txt file - cDNA_ID_2995175; gDNA_ID_811; Annot_ID_144527
aag

SEQ ID NO: 28340 - DNA, 3000 bp, Unknown; identical to SEQ ID NO: 14776
  misc_feature (1)..( 3000): 2750-1469P.txt file - cDNA_ID_2995189; gDNA_ID_2684224; Annot_ID_191886

SEQ ID NO: 28341 - DNA, 3000 bp, Unknown; identical to SEQ ID NO: 1975
  misc_feature (1)..( 3000): 2750-1469P.txt file - cDNA_ID_2995193; gDNA_ID_1620474; Annot_ID_158115

SEQ ID NO: 28342 - DNA, 3000 bp, Unknown; identical to SEQ ID NO: 14041
  misc_feature (1)..( 3000): 2750-1469P.txt file - cDNA_ID_2995201; gDNA_ID_2214694; Annot_ID_189471

SEQ ID NO: 28343 - DNA, 3000 bp, Unknown; identical to SEQ ID NO: 4065
  misc_feature (1)..( 3000): 2750-1469P.txt file - cDNA_ID_2995209; gDNA_ID_1620681; Annot_ID_164434

SEQ ID NO: 28344 - DNA, 3003 bp, Unknown; identical to SEQ ID NO: 17209
  misc_feature (1)..( 3003): 2750-1469P.txt file - cDNA_ID_2995209; gDNA_ID_1620653; Annot_ID_163531

SEQ ID NO: 28345 - DNA, 3000 bp, Unknown; identical to SEQ ID NO: 17210
  misc_feature (1)..( 3000): 2750-1469P.txt file - cDNA_ID_2995209; gDNA_ID_2926186; Annot_ID_200620

SEQ ID NO: 28346 - DNA, 3000 bp, Unknown; identical to SEQ ID NO: 11085
  misc_feature (1)..( 3000): 2750-1469P.txt file - cDNA_ID_2995213; gDNA_ID_2214478; Annot_ID_183214

SEQ ID NO: 28347 - DNA, 3003 bp, Unknown
  misc_feature (1)..( 3003): 2750-1469P.txt file - cDNA_ID_2995217; gDNA_ID_2926191; Annot_ID_201061
aaaaagaaaaaacaagacacacattgaactgatataagatgatgatgatgcaatagtacctacaaaatctagtggacgccgaacagtactttaattcggttttagaacattctgaattgaaggcctattaaaggcccttcttgacacaatctagttacacgacttacgacggtgcagctaaggctatttcggtaatttcagcttctcctttcctcgatctccaagtattcgagaaacccccaccaaggcaaaagctctgtcgtcgtccacaagaacaaccaaatttgtttccgtcttctgctaacatatcctctttttcatctgggaaccctaatttcttgactaacttagggttttatttatccatttgagatactctgtaattgaaaggttgaatttttagaagagacatgggaggttcgtcggagacaaagatcttacaagaactcatactttacgcggcgagcgctgctttcagctgcttggttctctttgcgggtcttcgtcatctcgatcctaatcgtgaggcttctaaaaaagctctcgagcataagaaggaaatctctaaacgtttgggtcgtcctcttgttcagaccaatccatacgaggtaatctactatgaattaagcatcttagaatcctcactggttggtagctacctgagaatgcgatatgtggtttcgataaccaatttgtattggtctctctgtttaatattgaaatttggatacttttgagttccaatcgtctttttgcgcaaactcatgaaatgagctcgagaaattgctcactagtttctaattttgtgaataggatgtaattgcatgtgatgtgataaatccagaccacattgatgtggagtttggttctattggagggttggagaccatcaagcaggctttgtatgagcttgtgattttaccactgaaaagacctgagctttttgcttacgggaagcttcttggacctcaaaaaggtgtcttgctctatggacctcctggtactggaaagactatgcttgctaaggctattgccaaagagtcaggagctgttttcattaatgttagggtttcaaacctgatgagcaagtggtttggagatgctcagaagcttggtaagtgcatattattattttgtgtgtgataaaggaacacactttgagtaggcctgtcttcatgctcgtcgtgttttcttcctgtgcttttatcagcttcacattgtgcaactttgttggcagttttttgttttttgtgtgtggttattatatcaattacactttttttggtctgttgatggtgtttctaatctatgagctgctctgttctgtttcgttctctcagtttctgctgtgtttagcttggcctacaaactccaacctgctatcatttttattgatgaggttgagagctttcttggtcagcgccgttcaacagatcatgaagctatggccaacatgaagactgagtttatggctttatgggatggattctctactgatcgtaagttgaattcttcactgttcggcttactttgccatgcagactagtgtaacctggagtatgtgggtttcttatgaatagaaatggttgcttttgtagcgcatgcaagggttatggttcttgctgcaactaacagaccgtcagagcttgatgaagcaatattaaggcgtcttcctcaggcctttgagattggaatacctgatcgccgggagagagctgagatattgaaagtgactctgaaaggagagagggtggaacctgatattgactttgatcacatagctcgcttatgcgaaggctataccggatcagacatttttgagctatgcaagaaagcagcttacttccctatcagagaaatcctagatgcagagagaaaggggaaaccatgtttggtaagtttaaaaagaaaacatggtccactgaaatgttcagtgttgcatccactagtttcaaggtactgatgttatgagtttgtcacgtttgcaggaccctaggccattatcacagttagatttggagaaggttcttgcaacgtcaaagaagacacaagttgcagcaggcgagtactcattgagctcgcagtcctcggcttggagaggctcaagggaaccagatgaggtccaggcagcgataagtgggatctcgaagcttctagtttctcagatcattaacctacagtcagaatctcaggattcatggcagcgggatcccgaagaagattcccgatgaaattccggatcacttttataaacgttctggtgttttcattggaagtttagaatttgtcacacacttcagtttattctgtaaaacttttcttttctttttggtaggatcatttgataacttatgactgtactaaaaagtctctcaagtttctacattactgaatctctcttgttcataatatggccactgttctcactcatgggttacttaagtgttaactctttcttcactttacttaatcgttaatggaaccttgatcaatgtgtgaagtgattattctgaatgtataagtttcatacatcaatataaaaatctcaactttgagattgttattagcgcacattgtgcaatggtcaatggtgtcatctgggctttgctttgctttgttttttttttgactgggcttgtatagctgattagagagattaaagctttgttttttttttgactgggcttgtatagctgattagagagatttaaagttcctcccttttctatttcccaatttcgtttgttacttttcttgccttttccgtcgatcttcttctccaacacaacaacaatcagatttgcttgattcaattacgctcttaacatcagcttggaaggtaactactggtctcgcaattgtgttgtagttctgggtctcagtttttctcactggctcgctcgtactcttgatttctatcgaaccgagtcctgttcttattcactgaagcattacgtctgattcagaaatttattagctttggatttggttatttgtttcatg

SEQ ID NO: 28348 - DNA, 3000 bp, Unknown; identical to SEQ ID NO: 7580
  misc_feature (1)..( 3000): 2750-1469P.txt file - cDNA_ID_2995898; gDNA_ID_1621153; Annot_ID_173320

SEQ ID NO: 28349 - DNA, 3000 bp, Unknown; identical to SEQ ID NO: 7027
  misc_feature (1)..( 3000): 2750-1469P.txt file - cDNA_ID_2995955; gDNA_ID_1621123; Annot_ID_172144

SEQ ID NO: 28350 - DNA, 3003 bp, Unknown
  misc_feature (1)..( 3003): 2750-1469P.txt file - cDNA_ID_2995970; gDNA_ID_2214543; Annot_ID_134512
tcacatgaattttataagcattatttagctgggaatagtatatactccatgatattatttattgcatatggttaggagagtttatatgtatgtctttcgcaacatttaacatttagagttcatgtttccatgcttttagaagaaaaaaatactatcgattaaattatttttagaagttaccactgaccagtgacaattgtcataataaaaccattaattaccttctgtgttcagaggattcttgtatcgactttttttgttaaagaacctgaaaaaagtctcctatgaattaattgagaattcagagaaatacatattaaaaacttatccatgtgctatcaatagaacgttcttaagaatgtttctaagcaacactttgtttttaaaacttatttacaactatgtcactagacatatgtttaaaatttgatcataataaatacatgaaatgtattaatatcaaagaaaattaactatttgtatataaaacaaaatcatcttattttatggagtacctactaatattagtgtttccacgttccactttccactgactccgatttgctatcataatatttgtctgtcatatcagttgatttttctgatattccatttccaccaaagtaataatgtgaagaactgaaccactattgtgaccgacgtaaaaacaacattactgttgcgtattatgaccaaatttgatacaaaggaaataattaaaaacgacaaattaccagatagtattagtttatactccttatcatgcattgatgatgcatatatcaaaagtagaaaagagaaaaaaagaagaagaagaagcagaatctagggaggctatttaaagtatagaagaaagaaaaatatgtagcagcttctgagtgtgaaatgctgtgagattgtgttgacttgagataacgattttaatgaaatgttaaaaaattgggagatttgtatcgcctcacatggaggggacacacaccaatagattttgggaatgagtcatccatatatactagaaaattaatcaaaataaatggcgttaaaatatacaattattttccacccattatattctggctctgagtactattgttcgttttaagattaggtggatacttaaatttcttgtagatttttccattcaaaatctattagttatacatgcatctcattgtattttacgatttttaataatatttgtgaaaatgcatctcatattaactcaatttacgtaacataattttgatctccgttttgcactactgaagctagaaaaacataaacataagacaaaaaccaaaaaaaaaaaatccttttacgaatgagtgagatcatccacacaaattttgatggaattcaaaagaagactaatgttaataaagattaaggaaaatacaaaatatatgaatctagctagtggacaaacaattgtatgtttcttatatctggggcacccaagcagctaactagtgtttcaaaataaaaacaaaagaatgtccacataatattaggatattaatacttaaatctagcaagaatacaacaattgtatgaatcttatgtttggatatgcaagccgccagctcatatctccatataaaaccaaaaaaaggtatttttggtaaatataaattagataatacaaaataagtagatgtggatatgtatgtataatgtttaataaatttggtccatgtagtgttaatatgtgatgttacatatattgataaataggttaggttatagcgcacttaatgattacataaattagtgagtgagagatttaatgtgaatgcgaagaaggtggaggagaagaatcaacaatttgattggggtttctgtaaatttgagttgtaagctatatattccccactaggccactaataacggttattttttcttcatcactattcttttgggtgaaaaaggtaacgattataaaagaataaacattatgatctttttttcctccccattttgactttcgagtatagagacattatagcattcataaagaaacacatttttcttttatctatatcgcatgccgcatgcgccatctatagcattcatacgaaacatatcgagttttatctttattccatgttctattgtatcaatttttgaagaggaaatgaaatggtggtaatggattatattaaccaaaggccattgttatagacttatagttttgaattaaactcacggtatattgttttagggtcatacactttaaaagcttacgaagcttttgactctacacgtgttaaacattaataattacagtatatcaaaaccaacaaacatttgaaattttgaaacagaacagaacagaaccatataacatttgtctaacctaataatttgtagctggcatgacggctaatctgttcgttttattgttgttacttgtcgtcgttgtcgatgccaaaatcatgttttttttgtgcgtagtcaatggttcaacgatatattttagtaatgaattcctataatttcttaaaattgcaaaccaataacgtcagtacacataaataccatgggcttttcggtgccttaatattagtgggcttatataggcagaaacatacacttttcccccaaaactagttttgataacatgggcttttcaatgtttaatattagtgggcttatatcaatctaatgaaatttgaagagaagagagagaggaacctgcgggtcgttgactcgttgtatgtttcggcccatataagcccagtattaactgaaaataaaattagtttttttcatattaccatgcatgtttttttcggcccatataagcccaatattaccgtgcaagttttttcttattttttaaattttatctgaaagtaaaattgaacagagtaccgatgacgtgtcctaactcccaagtagaagaagaagaagaagtaaaaaaaaaaaaaaaaagatctgaaagaaataaaaaacgaatcggaagagagagagagagagagagattggagctagttggagatg

SEQ ID NO: 28351 - DNA, 3003 bp, Unknown; identical to SEQ ID NO: 28350
  misc_feature (1)..( 3003): 2750-1469P.txt file - cDNA_ID_2995970; gDNA_ID_2214543; Annot_ID_185296

SEQ ID NO: 28352 - DNA, 3003 bp, Unknown
  misc_feature (1)..( 3003): 2750-1469P.txt file - cDNA_ID_2996012; gDNA_ID_1620555; Annot_ID_160427
accataacagaatcttaaaaccaagtcgaacccatctgacccacctggaaaatcttcaacctcgatgatgattctactgttcttgtgattctttttcttcttattgctctgttttatcatcttcctcaagaagcctgagtactctgagatcaaatcctaacccaagaaacagagaaacagagtttaattcagaaaatggaaacagaggaagttagggtttgaattagtgtggagatttgatttggtttattacctgattgacgaagaaagtaaattggttattgagattgatttgaagatcacagcaaagagacattgtatcaacttcttttgcatttggtgaagatgaaacttcttgtgagctttcttgttcttgttcttccttttggattggagagagagagagagagcaataatagttatcacatggaaacggctatttatatatctctttttcggcgtctttatttcaattatctaatgtacactttcttttatcatcctttataactcatataaatttatgcaaaaggaacttatatacaaacgtcatcgaaaaattgtataaactggtcgcatggaccaacttgtaaccctagtgtgtagaccatctaaaatagtgaaaatgtaataatttgttgccgtttgtaatgaaaaaattattgttcgttattgtttagtttttttggtattagataataagattcattgcttaatcgaaatgtactatatgatattaattttggagcaattagcttgacatgcatagtttacttctttacattagaaaaccttttttctaacatcgaacttaagaaaagttatataaactgcattaattgactgcatgtttattttgaaatccatataatcttgtgtgcagagcacaaatcaatatgacgaggcgttgttagttgttactaaaaataaccaggtgcaaagattgattccttaatgcttcattgatcaggatggccaaaaaataaaataaaaattggtgttagaggaagaaaaaaaaaatacagtaggtgggtaaacaaacagcagggaaatagcttacaatttgttgagaataattcataattatgaccaacattattcaggttatttggggtaaagtaaaaatgtattgcatcaaatcaaataagatttacattttagacagtgaactataggtcacgactaatatcaaatatatatttccagtagcacagaaaatgatgcttcatgaactctcacttatgacttgtcaatagctcaaggactatgctactcaagttgtaatatatatattctgtatttatatgctgttttatacacacgtaacgtatatatgaatgtgccccctttgtttttatgtgaattataaatattctccctttcttggcattacattataaattcgtaatactattattccacttccatgtaatttcaagagttttcttccctttttatttgtagaatatttatatatcagttgcttgtaaagttgggagtttcactttcattgcatgtgaatgggccgggtagggttttatgactctaacgtttgtgaataaagtcgactacttgcttttcatcattatccaaatccagccatgtaaaatatatgtaattgaaaacgatatatgtaacaaaaatgttataaaaaaaagatacaccaatgtcgatatacattacgactctttgagtacaaaataaaaaaatatgactaacttccgataatagtttttatttattattaaaaatgaagtttccaaataaaatatcattttaatatccatacaaattatgaatagtatgtgaggtttagggcaaagtcttctgagggttcatcaatgggatgggagtgggacgaagaaacgaaggcgacgagaggatttaggttttattgttttaaaatttttgtgctctagtatttaagccctttaacaggattttacagggaccaacaaaaatgtaaagccccaaaggaagaagcccacttaaaaaatactaaagtaaaaataaataattaacaggcccatttggcctcatcgactaaagctagcccaaaaagaggatacaataaaattacataaattttgtgtccttttcgatttaactttttcttttagaagaacaatcctttgtttttttgtgcaaatctttagaatctcgagaccaaaacttaagtaatcatcaaaaattttgtcaagtttacatttctatgccaaaaattatacaatatcataatgttcaagcagtgctctagagagcaagaaaaaaatggttaagacataaaaactagtcggctaacactgttcaagaaccatgatttatttgcttcatcaacgaactgattataattcaaatattacaacagagcggcaaatcattcgaaacgcggtacgaacattaaaatttgatgtgcattttggccaaaatatttgttgatggattcaattgggtagtggaagaagaaactgtcaaagtacacctactttgcagtcaagttgtaagaacataaagtacgtatttttttacaatttctaaatatactaaaagcttgcagaaagtatgtatatctagaagtacgtatctcttacgtttgtgaaaactatttttataatttgacaattttaaatgatttgattattacacaaaaatagtcgaggttatgtaaaaatattttttaaaattttcgatattttgtccggtacaattatgtcaccatctcgattcaagatataaaagagttaatttagtttcacaataaaaatctcgtacttacttttcaaactttataattgtgttggataaaaagtacaattgaatcttttaaaatcaacaatgagtgtctgttttgataaatgcataaattggagtgaaaagaaaaaaacaattccagcttttgcgaagttggacatattaaattctacacaattgtttttttttaaaaatacagaattgtagatagaatgaatattgttttttttaattaaaataattgaaaaaatg

SEQ ID NO: 28353 - DNA, 3003 bp, Unknown
  misc_feature (1)..( 3003): 2750-1469P.txt file - cDNA_ID_2996054; gDNA_ID_1620405; Annot_ID_156095
tcctaatgaaaggatatttacaaaaagtatacataaaagaacagaaaattaactgacacaatatattaatacttatgcagtacattagtaaaaaaaattacatcattattcttatgccttttcattttttatctttcatcttaaaattggttaacaattaaattaccgagttaaataaaactttatctagaggtagtgataatattaatcttattggaagagattcatattttgcacgttatagtaacttgttaatttttttatatgatataataaataagttaagacggtaactataaatatatcacataaattataacttatgacgatacaaaataacttagcatgatataattataaacttattgatataaatattttgttatcatgttaacctaataagtattaccgagatatttgttatcatgttattctgataatacgttatctgctaactattctgattcatgtattttttacatgattattaagtcgcaagtcaacttttttgctttatatgctaaatattttgttactttttaataataatgttatcgtcttcgcatatatatccgtataataaccatattgtaactatgacaattttgtaattaatccaaatatgaaagatacttttggtttatattttttttctctttcatatttacctaatttttaaattatctcttctacttttttaatttcaacttcttctaagtatataaatttaattcacccactagattttaacccgcggtataccgcagagacaatttattttttaaattagtatatataaaaatttacaaattaaatctatttatttttattttatagtttacaattgttattaaataacatcctgccaaacccgtctcgccaaatccgtcccgtaaaaaaaacccgccgtacaccactaatttaaatatataattaaaataaatattttatgggattgcaattgtattttagtttgtcaaacaaatatttgttttaaatagttgccaaaatctagttcaaattttggagaaaaaagatttattggatagataaagaatgtatttaggtgtgttttgttcattttaagggattgcaattatatttttgtttgtcaaatatttattgttttaaatagttgctgaatactatgtgcgtgacatatgagattggaatatatttggaatatttttagtttgttaatcaaattatttctggaaaaaaatcaataattaaaatggcagtcattgtaaataagtctaaacttcataatttatttaacaaaatagctgcattatatagacaataaaatgactttttttttcctttgtttctcatatattgatagatcacataatttattgaattaatatatacaaacaagagttccactaattcttatttgttatttcgattccactattcaacaaggtccacactattattagaaattcaaactatacttaccataaatatcgaaatcacaactagtcagtcacacacctattctaacattagaaaaacaccgacctcattgcaccactattatttgtagttgtacctcacaaagcacctccctcaaagtcttcgcaaaaacgtcacccaccaccacgaaaattcataaccaaataaaacgacaattttgtaattcttgatttaataaaaaaattaagtaaaaaacaatattcttaccattttgtcgccatataataagaagaagagagacacaacacaacacaagtagtagaagtggtgtagtgattacggtgtaacgcttattccaaaaaccccacgcgcgtagggcccacctctcccccgaatccccatgattttctttaacgtctctcgagtgctggtgggacccttgttttatggaaccctgatgtagttttatgtactttcatttgtgacccttatacttctgttaattacaatcttgccgctattttgttgcttccttcttgtttttgttaccttaaaacttttgtttgaatgccttcagaaaaagtttacttctctttagacggatgtgatcacttgttcaatgtaacaccaccgtaagttacagtggttaaaatgtctggtagaattatagctgtatatatttattgatctctaaaaaattagcttgtagaaattattgtctttaaattgttagtaggatccatccaactactacttaaaaaaatctgattagtataagatatatttatgattaatagaaaaataatttttgtacaagagattaataactaagatagtaaaattctatcatttcatttctaaaaccaaaatagatgaaattaataaataaataattattgatttcatgtgtgtttaaacaatttttttttgtatcacattatgtaaagtaacaagttatcaatttcataaaaaaatatttacgataattacattgttttcttaatttttttgtcgactatatatcttaaaaataatgttaaaaatgcaacaattttgacagtaattcctaatcatacgaaaattttcaaactttgcaacttcttcatgtattattgcattgacaatcagttaataattttactttaataatgttgtctaagtaaaaaagaaaattaaaagttaataattgaactaaaaagtgaatgtcgaaaaaaaacatttaacttttttacttagctctctcgaaagttcctcaaaaaccgaaggacgagtaagtcacgaaaaagaccattttgtaacgcctctctatcaattattcctctatgtgtcaataaagtatatttctcaaaaggaaaacaacaaaaatggttttcgatttcttgtactttcaaaaatagcataaaagccaatagattctcctctctcaaagtttcgccccttgtttttactttctctctcttaaaccccaaaaaaaaaaaaaagatcttttgctataaaatcccacttcacactttcttcacatcaacaacaaaacctctctctctttcactttctctctaaaaaccagaaaaaaaaaaaatg

SEQ ID NO: 28354 - DNA, 3003 bp, Unknown; identical to SEQ ID NO: 27149
  misc_feature (1)..( 3003): 2750-1469P.txt file - cDNA_ID_2996092; gDNA_ID_2096294; Annot_ID_195496

SEQ ID NO: 28355 - DNA, 3003 bp, Unknown; identical to SEQ ID NO: 27149
  misc_feature (1)..( 3003): 2750-1469P.txt file - cDNA_ID_2996092; gDNA_ID_2684204; Annot_ID_191338

SEQ ID NO: 28356 - DNA, 3003 bp, Unknown
  misc_feature (1)..( 3003): 2750-1469P.txt file - cDNA_ID_2996092; gDNA_ID_2684204; Annot_ID_137277
tttggtgtggttcaaatttctttcaagaaacctctgtctttctaattatattgatatcatttttgtggtgtttgtggccagtttcctcggtacttgagctttgttaaaggtgttgtggactcgcatgatctcccacttaatgtatcacgtgagattcttcaagaaagtcgcatagtaagcgctcatatccaattcgtatgcaaagcctttatgatatatgttttgttttaagtgcaatgctatgttaagcttacgattttgtattgtgtctccaaggtgcggatcatgaagaaacgtctagtgaggaaggcttttgatatgattttgggtatatccttgagtgaaaacagagaagtatgtttcataactcttgttcccctaagcttacagtttaaccttttttaattccctttagaaatcactgctacgttctggtgatgattttcctgacgaatgagaatggcattgttaacctatacaggactatgagaagttttgggataattttggcaaacacttgaaattagggtgcatcgaagaccgtgaaaaccacaagcgtatagctccactgcttcgatttttctcctcccagagtgagaatgacatgatcagcttggatgagtatgttgagaacatgaaacctgaacagaaagccatatacttcattgcttctgacagcattacaagtgctaagaatgcacctttcctcgaaaagatgctggagaaaggacttgaagtatgtgttgttcttctgaatggggcctcgttttgttcttccttgcaaatattcctattaactcagaggtgattgacatgtatttctttgtattgtgaacgtaggtactatatttggtagagcctattgatgaagttgccgtacagagtttaaaagcttataaggagaaggattttgtagatatcagcaaggaagacttggatctaggcaagtgcctgatgtaattccttgatttagcatgtcaggtaatcacttatgtataataacaaattctggctttgatctttgtattgacaggagacaagaacgaggagaaagaggcagcagtgaaaaaagagtttggacagacttgtgactggataaagaaacgattgggtgacaaggttgccagtgttcaaatttccaaccgtcttagttcttccccctgtgttcttgtatctggtaaatttggttggtcagccaatatggagaggtaagatctgacctttttcttaagcaaggatttccgttctccttttttgcccctggtgaactaacacagaatatgttatctggacaggctaatgaaggcacaatcaactggtgacacaataagcctcgactacatgaaagggagaagagtgtttgagatcaatcccgaccactcaattatcaagaacataaatgtgaagtcaccattcatcataacttgtacctggctattataattaaatctaggagccgctttttgagcttggcttgtttttttcttgcaccctgcaggctgcttacaatagtaacccaaatgacgaagatgcaatgagagccatagatcttatgtatgacgcagcactagtttctagtgggttcacggtgagtcctattctacattaacattcttaactttttgttgtctctagaattgaaataaagtaaatactggtaaaacttaattgttgtttctcaaaactacagcccgataatccagcagagctgggtgggaagatatatgagatgatggatgtagctctttccgggaaatggtcaagccctgaggtgcagccgcagcaacagcagatggcacattctcacgatgcagagacgtttgaagctgaagtggttgaaccagtcgaagtggatgggaagaaatgaacacaagcctaatgttttatgtccctgctacgattctcatcatattcttcttcttttattagtagtagcagtaaaagtagaaccccaaaactcagaacaataggcaatgagcgaatgataatctctatttatgttggagagattaataattgattgagcttgtttttgttccagtttgtgttgatcctcctcggtataattttaataaccgttaagaaaaattcagttggggtgtttttggaaagatttttcgagttttatctaacaaaactaaaattttgggacatatggtaatttttaattaaatagagggatgttgttatcgtacgaattgggttggtttaaaactttgtttggacagattcgactcaaacgttgaacgcgtttaaaaaagtcaacaaaagtcgaaggttaccggctggtcaggttaaccgttagagattaatgaactggcagctgtatgtcttttttatagttctgtcttaacaggcaaaaaagtgtttaatttatctttcctttgggtttctcacggagtcacggttcctcgttcgtcctctcccgtcgtctctccggtgagtccttaattttccggcggtctttttccctttctcgtctgtttggtgctttctttatgtctgaggcgaatacagcaaaacgtatctgttttggttgttgagttcgaggctggtcctgaaaattcggtgacaaaaagagtcaataactctcgtgatcgagttggatgcgttgttttgagggttgattcagtttatgactatgtattttggtacttgcaagattttctgattttatgaagattcgtgtttgacttttatagcgtataatctacggggcaaacagattcgagcaacttgtttttttctagcgcttgttttgtgtttactctgtcatgtgtttgtattttttgagcttccactagtgattaatcatctcagctcaatttgaacataggagatgtagtttttatctgtcggtggatttctagggattttgcaaaatgttttgggctttcctgaattagtatgtgatttggtcgtaaagtattttagggatttatgtgttccttggggtgaatctgacattgacattatcttggtgtctgcagcactaaattgatg

SEQ ID NO: 28357 - DNA, 3000 bp, Unknown
  misc_feature (1)..( 3000): 2750-1469P.txt file - cDNA_ID_2996123; gDNA_ID_2926234; Annot_ID_142721
tgggttgtttggtttaacaaagattaggagagtagttttaagtcaatttaagtttttgtgtagttaaactaattaatcaacgtgttttcttaataattcaatttattcaatataatcaatttaaagattttccctataattgtttttataaaatacctctttaagtaccattaatataaatgagaactttatacaaaattctgttaaagtaattatgcaacgtgtttttattactaattaaatttatttattagtatataataagatagctaatcagatatagtttaaagagtttccatattaatttgattataatacatttgcttataaacaaagtgaacataaaatttatgtgacattttcaaatcaaatctgttgtaagcaagttttcaattttttaattaaaaacaataatgagtttcttcaaactattttttgttgtattcttttaggttattcaagacgtaattggggtattttatataatgtagtactttcactaataacaattttccaattgtgaaaattgtaatacttttaaattgagtgtgatcaacattttaaaataaattataatttaagacagattttgttaaaaatcagaaaatgttgaggattatttgttttatttgcgtattattttatttatatgtttattgtagttttggtcataagacagatatggtgaaataaatacaataatgggaatgagtgccgacaaatccagctgttttaatggaaacgatacctgcttatctccttgtccctctataccactgttactaataataactataatgatttgatattattttattcttataaatgacgtggccgatccctcaacgtgactaaatcctttaaaagtctaacaaattatttaattgtataataaattaaagcttcaaatcagttttttctttttagattcttctcgaaatgcgatagaacattgtagatatgtcaatggtgattgaaacctaaagtttaggatgtgtttgggttttaaggccaaaaatcaaaatcatataaataggatatgttttttagattctgctcgaaatgtgatagatatgtcatatggtgattgaaacctaaattttaggatagggtcaagatatataggttttaaggtcaagtccatataggttttatagcttatgcatattgattcatgtgtttttgtagacttgtaggtttttagcattataggtcaactcatacatttatcatttttaaaatctcaaatattattatttagtattgaaagttctgttttttttttaaaatgtaaaatcaacgaaaaaagtaccataaattacgaaaaaacttagtttaagatataccattaaaagttttggaaacagaaaaaaggaaaaaaaaaacgaaaaaaaaaatgtaagcgttgagtaaaaggatacttaatcattcataccacttgctaaacttagagacacttcttatacatacatcttgtggtttaaaagttttcaagattttgaggtggtaaataattttggaaaacaaaagagagctagcaagtcattgccacctctacgaactatcaatctagaacagagaatcttaggtgttgtattttataacttgataaatttagtgtgttcgtttggtcgtcgtaagttgcagcggcagacacaaatggtgatgttcgtttggtggatgcatgccgatgcagtaaacgtaagtcgttgcggctaaaaattattatcgctaattaaaatcagcgttaaacgattaaaagctgcgttatatgtggtaaatgacaagactatccttactatgtttgggaaactacaaacaaacctaaccttattttttcttcttctttcatcatttctttcttatagtcatcgatctcaagttctttgaaactaatctctctccgccgtctcaatctcgctttttcggtgattttagctcaattagatctcccgtcgttagttacttctgatacgacgttaaatatctattccgaggtacttttgttattcactgattcaaatctcttgggaattttgagtttctttttgatttgtgtttttttagctactcttagtttggtgggtttattctaaatttccaaattctatgtctgtttctgtataatgggtctgaatgtttggaactaatacttacggtctttttcactatatggttctaaatcactaatgcttacttgctttaaatcatatgttgttctctactctttatataaccattggagttaattggatttagatttgcattgcccttaacataaacatctgcggcaacggcagagtcggcgtcagcatcatcaaacaaaaataaattatacgtcagcagcgacgaaacgaacaataatctgtggtaaaatttaccgttgtcgcatacggtgacgaaacaaacagactaattatagttgcaatggtaatttattggtttactataatattactaggtacgagtacgtttaaatgagaaatgtatgaattagttagaatattttgttaataattcgttgcaattatgatttgttggttttgttagatttttttttaatgggattgtcccctaaaaaaactgaaatccaatcacatttcttactttctcgtttcgatttggtttattcggtacggatacagttaaaccgggtaccttaacccaataatgggtagcaaacaatggcccgcttaaatttataccactaatgggcctctttcccaactttaaaggcccataatattttgaaaaagaataataatgagttggcttacctgagtaatgacgtaagatcacggaaccacgccaggatccttccgccgtcggcgacgtcgctcctgacgtcacctcaacacgtaaaccacacaattaagtttattcctctctctctccgtcaacttaaaccggtgtttgtatataaatctgattgatatagaaatcgaaactcaaattggagaacattcgagaagctttggatttttgaatcacgaagacatg

SEQ ID NO: 28358 - DNA, 3000 bp, Unknown; identical to SEQ ID NO: 28357
  misc_feature (1)..( 3000): 2750-1469P.txt file - cDNA_ID_2996123; gDNA_ID_2926234; Annot_ID_203805

SEQ ID NO: 28359 - DNA, 3000 bp, Unknown; identical to SEQ ID NO: 1367
  misc_feature (1)..( 3000): 2750-1469P.txt file - cDNA_ID_2996260; gDNA_ID_1620393; Annot_ID_155667

SEQ ID NO: 28360 - DNA, 3000 bp, Unknown; identical to SEQ ID NO: 11673
  misc_feature (1)..( 3000): 2750-1469P.txt file - cDNA_ID_2996267; gDNA_ID_2214509; Annot_ID_184207

SEQ ID NO: 28361 - DNA, 3003 bp, Unknown
  misc_feature (1)..( 3003): 2750-1469P.txt file - cDNA_ID_2996308; gDNA_ID_2936564; Annot_ID_194572
aagggtaagttaaactcttgagttctttgttaaactaagatagatctatgggggttggtctgacacaggataaaacctaatcccctgatccttgcgacattgcctaacgttgcgaagtgcatcatcaacaacttgcttatcctttttacgtttagagcattcaccaatctccattttcgcttttcctttgcccttgaagtcagaagaagagctagaaaagtgattctgaggtataggtcttggattaacaagtctggaagcctcagatccagcaactaagtgaggttcatgagaagctaaagatgctggaggaagaggctgtgatatcagtgatgcagaggagatgtctgaactgtctgagctagtcatatgagtttgatcagtgatagtgttagaagcagcaccttcctcccaaacaggtacatcaagtacctccacctcatcatcatgaatcacaggtgcattaagaaagggacagttgtttacgtgatgagtgatacgacaacaattagtacatatccttcgaagcttctcatactcaaacccaatcatagcaccttctctagattcaaaacgaactctccgaaaaaaccgaaggcggtcagtgaatacaagtctgatcttaacacggataaaggcaacataagtggaagtgtcttgattaaaatccagttcaagaacaggcccttattaacccttataaataaggaaaataataaagaatatcctagaaaggccgacggccctaatccgtaagaaccatgataatacaagctgtgacttgtgagtcgcaagaactgggtaatactatattctcaaaatcactcattagagggaggaaagacagaaaattgttaaaatattacttattttggtttatattagctgcaagcatatttttctctcttggttttgcacccataaaatctaagtaggcatttgtagtatagctagagttagctcacattaactcagttagagtcctcatgcaatatttgttatgttaaactatttctcataattattaaccaatagtagttcatcaaattttaaaattctcaattaatgattcttgaaattcataattttataacatttattataaaaaagtatacagaaaatcaatctttttgatagaaaaaaccccttagaaaatcaatctttttaatacgtagggaatatatatttacttcatttataaataagtaatttaaaataacatcacttagttttagtttaattcaactctttttttttatagttatgttatgacttatgtttcataaaagagaaaaaaaacttgtatgtggttactataaattaagctgattttgtagctttgaaatttgaatgtagccttatgatttgagtattgatttttggatatcaagttatgaaacttcaaaaaactttctttgtgtattagctgttaggtttgcacaaaaagaagaagctattaggtcatcaatttgttgagttcttattgtttgtcagctgactcagctccaaagatttttaaggatgtttgtatcatgagaaccgaggtatttaccattgtaagtgaagtgtaataagactaaagagttttcttagagcatcattatttgtgctatcttagccaaattcttagagcacctttaatggggggggggggggggggggggggtttaaacaagtttcttaacaaagaacaaaaaaattatatgatttaaatattcataagtctcttaactttgatgaaacctaggcaattgtctcttagttaagagataattggtcttggtttcaccaaatttaagagacccataattaaaaatattatttatctatacttatactttaattttgtttaagagacttaggcttaaaaactaccattgaagatgtttttaggttaagatttgtgaaaaagaactcttatataagagcttttaggcttatataaaaccttttttttcacaaatcttaccctaagatttgggtaagataccaccaataatgttggtcttatatgctaattcatattaatggatcccatgtattttttttttctagattttattctagcataaaaatagtttataacctcttgtatatgtaatgtcaaattgtcaattaaatctattgaagttttggaacctcataattaggataacgaaaagattcgtagtaacatcatttgtctaaatatcttggaatcttacaaaatgatatgttgtttcgaagtggatatatttatgaccattaacaatagactcatgtaacaatcaatcacaaaaacaattcattatgttgttcaaaatctcaacaattctgaaagtacaaaaagtttatggataaatgtaaaatctttaagaaaaataggggtcaaaagtgttataattttgaatattaaaataaaattaaaaagtgtattttgaccggaaaaaagtagaaaaatacaaaatacaaatagcataggaccggcacgtatattacctgaaattcatccctgagtctcgttcttcttctctcacttcgtttcgttttctcacaaaccgtctctatctctctctcgagtctcttgcttcttctctaatcctctctctctcgctagatcgattactgagattcgacgaacctttgtttgatttgtaattttgagatcgtggtgcttctctctctttaatgttgaatcggttcgtttctcggatctcgatgatcctcgattttctcaaccaaacttgaagaaaaacctttccatttttcgctccgagcttaatttcttgtttccgccatgtttgaagctcatgtaagcctttttctctttgttaattttggggattgtgatgtcttctttaccggttatttttttctggtgtttctagttttagaagttatgtgtttggtttagttcgatgttgtgattctgggtgattgattagcttgtctcgtcgtatgttggaatttatctatggattatgaaaatgggtttttagtttagcatctatgagagcagcaatg

SEQ ID NO: 28362 - DNA, 3000 bp, Unknown; identical to SEQ ID NO: 7629
  misc_feature (1)..( 3000): 2750-1469P.txt file - cDNA_ID_2996323; gDNA_ID_1621154; Annot_ID_56968

SEQ ID NO: 28363 - DNA, 1208 bp, Unknown; identical to SEQ ID NO: 15267
  misc_feature (1)..( 1208): 2750-1469P.txt file - cDNA_ID_2996367; gDNA_ID_2926108; Annot_ID_138554

SEQ ID NO: 28364 - DNA, 3000 bp, Unknown; identical to SEQ ID NO: 15282
  misc_feature (1)..( 3000): 2750-1469P.txt file - cDNA_ID_2996375; gDNA_ID_2926123; Annot_ID_196701

SEQ ID NO: 28365 - DNA, 3000 bp, Unknown; identical to SEQ ID NO: 15282
  misc_feature (1)..( 3000): 2750-1469P.txt file - cDNA_ID_2996375; gDNA_ID_2926123; Annot_ID_138625

SEQ ID NO: 28366 - DNA, 3000 bp, Unknown; identical to SEQ ID NO: 15290
  misc_feature (1)..( 3000): 2750-1469P.txt file - cDNA_ID_2996383; gDNA_ID_2926128; Annot_ID_138650

SEQ ID NO: 28367 - DNA, 3003 bp, Unknown
  misc_feature (1)..( 3003): 2750-1469P.txt file - cDNA_ID_2996387; gDNA_ID_2926128; Annot_ID_138653
tccagcatcaatttggctggggaaggtgttaaaatctctacgatcaggtacgtgtatttccattccttctctgccttgtctttaaacatctccgtgtacactttccctgctccttgaggcccacggatgtagaagtttacctgaagcatattcaattttgatcatgttaaacctgcaaaactctagacaatttatatagcaagaatgtgaatccaagcgcaatagaggttctacaatgaaatacctcaacatgctccactccgtcttcatctgtaaatactctgttgggtatacgttgacgagcagctcggtttctagtttcttgtccatagcctttgatgggggatccaatcctaaccctcacctagttaacaagacaatcacagtcacagaaattgtttcattttataaacagatgcttttgtttcatacaccacccctccgctatgatcaatctgtagagttagtttctaattacctgaccatcatcttgaattctcttcaaggctttgtcaaagaccttgtacctagaatacataatggtgtctttagattactcaaatccaagtgtctgagcagataaatcaaattagatttctgaagcctcactcttttggttgaaaaatgagctctttaaacacaccgtagccagcagctccagcgacaccaagcccagccagaataacaagactgtaggacgcaccttctgtaaaggtcaccggcttctccgggatgtggtatgtaggagaatcaaaaggatcctccacagtcgtcacctctttcttagcctgtaaaacaattggcaaagcaagcatcattattagatgacagaagctgtctgtcgcttttgacggcttgcgttgtgataaatggcaaacacataacgtagacattaagtagaaacttgtaggaagaaacaccttattctgctgattcccaggttcttttgaagttcttgatgcaaaagatctggtaaagtaagatgagttgatgttctttggacgagcttccgtacatatacttgcttgcgggtttcggaagcgaaacaatagtcctgtataacagacaattgtcagaacaacaaggtacacatcaacactaggatttgaagtttgattacacaattatcactgctgaccattagctccagtagagtcctgcataagaaaaacgatgagaggtatgagactaacatataagcccaaaagggtgtaaagagcaaagaaaatgttgtcgaagcaaatatttaacaagtaaagggaagaaaatacctttgaaagaaatgagttgctaaaaaccctcttggactgatatataacaaaagtaacactgtaagttttccccagatcaaggacactagagagattcaattcaaacaggactagagacactgaaaaaaacgacctcaattttcacaagatcctaaacaatccgtgtctatgtagtagaagaaccaatagcttttagccaatattatatagaaatgccggcagagtgagatggaatacgaaagccttaccgattttgggattccggaacaaggttgtgtagcggaggaaaacgacgccagtttcgattttgattggcggccgatggctatcgctgatctccttaaaagattcatcatcatcatctctgaaccaccaatattactgattgaaaaatcgaagtggagacgacgacgacgacgagcgaggttgaatgagcaaggcaaagccgctcgccgttgctggggttttatcgtagacacgtgacgcgcacgtgcaagctatttccttgggcttgggcttagactcatgagataaagcaaataaaacccaaatgggctttttagaaaagaaacccaaataacagagtatctcttcttcttcttcgtgcaacaacctaaccatggaaattgcaatttgcaaacatggcgctcgcgctctcgctgtcggcatgttctcctccactccgccgcactcgtcgtgccggttttcgaacaagctgctcgatcttcgcgaatccagcacagcgagccaagaggaagctgcttgagctgatctccgaggaggatcgaggtctgagaacccagaaagaccccaagaagcgagatgaaatcgtgaacgccatcgaatccatgacggttatcgggcgcagctccatcaccacagacgactctctatctgccacgtggcggctcttgtggacgacggagaaggaacagttgttcatcatagaaaaggcaggcttgtttgggacgaccgccggagacgttttgcaggtgatcgatgtgaataaacggatcctcaataacgtcatcactttcccgccggacggggttttcttcgtacgctccgatatcgatatcgcttccccgcagagagtcaatttcaggttccaaaaaccacttcttcttcgtacgctctgatatcgaaatgtgtagcatcatagcttagttgatagcgtttttgatattcagattcaatagtgcggtattgagagggaagaactgggagctcccactgccaccatttgggaagggctggtgagtgacttctctctgtttcctcttcggagctacttgtatagataaagagagtgagtttgggttttggttccacaggtttgagaatgtgtatatggacggtgagatcagagtggccaaggacatcagaggagactacttaattgttgatcgtgctccttataactggactgaatcatttgtataatttgtgatgctttttgcttcttgtataagttatacaccatttctgtctctctcctttatcattgggcctcaaatagatgatgcaggaatatagggaggaggaggaagaggaatttgaaggatcattcaaagtgtcatccttgagtttatttagggtttttgtctgtgtttgttacaaacacaccacccacattttctatgcccttttttaatgttattttcacaatccatgacttaaaaggccaacactaatcctttgtctcttatttcattgtgaactcacaaagatg

SEQ ID NO: 28368 - DNA, 3003 bp, Unknown; identical to SEQ ID NO: 28367
  misc_feature (1)..( 3003): 2750-1469P.txt file - cDNA_ID_2996387; gDNA_ID_1621147; Annot_ID_56774

SEQ ID NO: 28369 - DNA, 3003 bp, Unknown; identical to SEQ ID NO: 28367
  misc_feature (1)..( 3003): 2750-1469P.txt file - cDNA_ID_2996387; gDNA_ID_1621147; Annot_ID_173078

SEQ ID NO: 28370 - DNA, 3000 bp, Unknown; identical to SEQ ID NO: 9192
  misc_feature (1)..( 3000): 2750-1469P.txt file - cDNA_ID_2996391; gDNA_ID_2926128; Annot_ID_196775

SEQ ID NO: 28371 - DNA, 3000 bp, Unknown; identical to SEQ ID NO: 9192
  misc_feature (1)..( 3000): 2750-1469P.txt file - cDNA_ID_2996391; gDNA_ID_2926128; Annot_ID_138692

SEQ ID NO: 28372 - DNA, 3003 bp, Unknown
  misc_feature (1)..( 3003): 2750-1469P.txt file - cDNA_ID_2996391; gDNA_ID_1621157; Annot_ID_57044
aatgtgtgggtttaaaataaaaaatggcctataattaatctagtgtctgactttgttctatgtataactttttttacattcatagacccttgtttctattcttaaaaaactttatatgataaaacatgcaatgatcatatcatacgtcttatccaaccagaatacaagagtcttgacatcattctcaatggtttttctaagcgaacctgaagtacacacatcaatacacgcctcatatcacaaaaaaggatgttattttgacaattatatcgtaacacatgttaccatctatgcatgccttcaaacatcaaagtcaattgaaggaaacacacctctcagttgtcggtgacttcccggatcatgtaaagatgactttttgaaaaccaagaacatcattgcccactccaaagctgttacctctcattccaaactcgatcgtaatcgccatattcaagaaatacgtacttggagatcatgcacaaggctttttaaaaatagaccgaactttactagttactatctaccaatcaggttatgaaagtaggcaaaaggggaagggtcaaggcccatgagacatattttccaaatagacactaaaaatgagccagatttttcaacaacacatttggtttaagggctcaaaaaatatttgtcaacacccagttttaaaacaaaagaaaatagtaaattacaggcccaaatgtttttgttgccctatagatattagtatttcttaaccagtcgctgataattattgatgaatagttgagagacgataaagattgagctgtcaggaatacaaatcaaacatgatattgttcgtttacattattactcaacgaacattcacgtttccaaattctgatatcttttctaatatttctccacatgtagcatatcattagttactgtttaaaaatgagtaccaaaaacgtgaaattattacaataacgtataaatgttaaatatttcgagcaatcaatacttgtcaagactcattgttagtaatgcatcactataattcattctttttttgtcttggtcaaacatgtatgaagcgagcagagtctatgaatgtcatattatagacatacgtatgcggctttggtcgggaccggcccaataaaacaatacacatgttcaacgggttcttccacgtgtcaaacttatgttggctggacggtatgtgactgtgcattgtggttacgtttccaaaatgaatacgtaagaacttttcctaaattatgtcttttgcacaatactgtaagtctgtaactatggtactaaacattataatatcgaattggaaacatttacatttgagaattttagtgtttgttggcaacgaagcatgtgagatcacagagaagcaatactcatctctgagctgttcaaacagttttacatgtcagcacccaaatatagtcactatattcaaaaacaaaattatttacttgcattcaatgctagccttttttattcggtccacaacaaattataaatatttgtatataagaaaaatcagagacctgattttgtaatgcgtggcttgtcaatttcaagcaacacagaaaaaagctaactaagcaaaaaacaaaaaaaaataacaagtggctggttgatagaatgtatctttcatcagtacataacactgtttttttgtcaacgtaaaacagatttttataacttttgtttgccctcaacttttttcattacattttctggaatatcgcatggttgaataattaaaagttaaaaatgatttttatgaagcacggcattatactatatagtcagtcccaacgaaaatgactttacataaagctgtcaattttttctccaacggtcagataattgtttcgttgaatagtcagttttttttttactattttactattgggctttattgggctcttacaattttatcgatttttgtttaccgtccagaaagtggaccctgtgggaagaggaaaagaaaaaaaaagggtcaggttttttgtctttatacgagagcacatcggtacgttccagaacaaccctctctagtctcctccatcattatctttatttaatagtaaccctagtacaaattaccaaactattcaacattaacataattattcaacattcaccatcatgaataataactagttgagaaaaacgtaactagactagtttgatctgtcaacataaaaagagaaaaaagaatttcgtgactagtaaagtttaagaccattcacaaatgatcattgaaattattagttctaaactcttagtttggttatctatttggttttgattcgtatctatttggttattcggttttttggttttaaagtttagtattcattcgactattttgaaattttggttcgtttttttttttttttttgaaatttaatatccattcgattattttgcttttaatatttttaaatatttcaattattttttgatattttttgaatattgttactatttaatatatatttttaaatatttttaattactaagtatagaaataactaatatttttgaaaataaaattatattttggatattttagatcatctaaaatattttagttaggtactaattcatttttggttattttgattataaaatttaatatctattcaacaatttttaaattgttgattcaattcggttctgtttttttttttcatttaggtttagtacatttggttcagtttatttgactctcagtttatttgcctaagccttgaaattaggtgttaactattggttattctagttgaaatttgaaataaagaaaaaactatacgttatactattttattttcttagcaataactaaaaataaatgtttggaaacgttaggcaattttattatattctatcgttgttctctataaatgaagtctcgaccacacacttggtagctacacacgagaaagaaaaagctcacaactttaacctttctggagagagaagaacaaaagagggagagggagagaaatg

SEQ ID NO: 28373 - DNA, 3000 bp, Unknown
  misc_feature (1)..( 3000): 2750-1469P.txt file - cDNA_ID_2996395; gDNA_ID_2926129; Annot_ID_138696
aatattaagatttttttgatattttagttatttttgtgtatttttagatatattcgagcaaaactactcgtgttgttttgggagtttttgaaatttttaagtaatttaatagatttgcacacacaatttgatatttcaatatataaataaactcgaacccgaacccgaacccaaaccgaacccgacccgaaatcttaaattacccgaatgggtcctaaacttctaaactcgaaaacccaaacccgaaatacccgacccgaatacccaaacgcctaggactaataattaatagaaaaacagaaatccacaaaaatatttagaaaccaagcattgttgaaaatatatttctatatatgccgtaatcttgtaagttaattttaacatcatgcaaatattaaatgagttaaaattaataaatgaaaatcattgaaaagttaaatcctataatctaagctatttttctcaaaatgttctattttcacttatgattacatgagttaaagacaaatttgttaattttccttttattgaataaatgttaattgtttataaatatataaacatataaattagtatatgtaaatttgtttattttttaagattttctattctttttagaaaataaaaaagttaaattttaaatgacacatgtaaacatctgatcgtttgacttgacacgtggcacgatcgtatgagttagcaactttgaaaaccatactttatataataaaatatgttaatgattgaagaatgattttttttcaagaagtttaaaagcaaaaagagaaaaaagttactgaaagaaaagaagaaagaagaattagaaaatctagaacactcattcaaataacatttttacctcaatcctattgatctatcgtggctattctcgattttttgaatattacaatcccacgattttctaatctcaccaaacataacattgtccataattatcatgcaatttaaataagtttatataattgtatcattttataagtttttattacgctaaattagtttgatcttattagtcttttttctttttttgtaaaaatgtttttttattacttatgtttgtagtttctatcaggcccagtttaaggcatgtattcaagatgcaaaaacaccaattttttccttttctcaaattttctcaaaaggagtccatattttttaatttctatataaaatttgtttgttaaaaaatttgaacacaaagtcaaatataattttgaaacggcccgtttctactatatgaattcatatatttctattaaaaaactactttttcgaaatatctacatattagttttactaatttatcaccgatcgaaatcagtcgataaccttttttttatctccattttctatccccaaccgaattggctcaagctatacacaatgccacacatatatattttaagcatgaaatttccggtaaaacagttccatgtgtcgtgagtttacttaaaaagtagagacgtgttttgtctgtcatgaaattgaaatgtcaacacataaatgtaaggttttttagataacaaatcaatcattgtataaaccacgaaatgtggcatttttttgtcgtctaaactatttctcttataatagtggaggacacatgggggaccaaattttctataatagcatatacattattagtctgatggttgacaattcgtagatataaaattgatatcccatatgcgtttaaatccgatctacacatttagttggaaggtaaaaaaaaaaacagtttagtcatgtaatgcgtttaaaaaaaaaagatcacttgtgtttaatagaaaccataatcccaaaaatatttaacttttcatttatattagaaaaatcaatcatctgctacataagataagagatataataaatacatggtaacacataccaaataaaataaagaaaatcagctatctggcgtatataaattgcatgactacatatacgaaatgtatgacgttatgtaattaacatcataaacaaagaatttaaggttaaccgatcaactgattgtggcgttgaccaacaaaaatattcaaaaataaacttttaatttatttttaatatattaaaaactatgatatgtcttgtaactgttaatttagttttaatgttttaaaaactatgatgtggtctgctacacttcagatagctgacgaatttttttttatatatattacacctacaatattaacataattatatgtttagtccaaatagaccgaacaacaattcacaaaattgaaactgaaatcggatatgaattgggtaaaaaaaagattctaaataattttctgataaaaaacaaagaaactatatcactccaaatctcttgaccatagtgtttgttccattccatcgtcaccatagtttagactttaaattcagtttcactttgactaattttagataaattaacatattaaacggaatcaacaacttccctctctcccttggcgactacagaggcgaccaacaaaaccagtttcctgtttcattttttttaacaggctgccggcatttgccggtagtttttttgcttttctactcctttcttcttttgtttttaatattgtgatgggagatattccccttaattggatttctgctcgtcctatcttctcctttcgaatggtgacggtgtttattgtcatgtttagaacagagacatacaattaccagtttcatgtaaacccgttgctatattcgaaatcagaaaaaattcatcccaccaatgtctctttacccatgtcatgtcgattcatttgaatcatggtgtatttccttatctaaagtttgttttcggtggtttctctcaccgacgtgatctccggttttcaaccgatgaagtttcttcaaatctatggtttggagaagtcatttgggtatttgatccaggaatcaatagacaaattcttttgagtgaaggaattggcatcgacaataatttcctcttctcaaacacatggtccgatgatg

SEQ ID NO: 28374 - DNA, 3000 bp, Unknown
  misc_feature (1)..( 3000): 2750-1469P.txt file - cDNA_ID_2996419; gDNA_ID_2926258; Annot_ID_143164
tccagtgctagatacagttaaaacagcaaactttcgagctagggcaaatcgcataagaatcctctcctctggtaggccagtacattgaggacaatctgaagatttgtcccaaaagtctgaagctttcctgtggcaaccatgagctataaacagaactgcttttggtgaatttggtatcgtccatatcaattgagtctcgttctgaatctctaatgttggctgagattgcaattcgggcttgacattgttagagatctgtttcggtagttgcattttcgtgctctgattcttgccactgaaacaaaataacagaaccaccaccaggaagatcccaacaacgaaaacaagtccgaattgatggattcgagatccatgcgaagatttccatttgtcagtacgcttcaacatcactgcaaagatcaagttaaatctcaggatcaaacggaactctgagaacaattctaagttgtaattatcacattgtcggagaatcaaattcgtatatcaaccaaattctacagaaatttcactaatgaatcagatcaagcattgcccacaacgaatcacagggactaagactaacagtcaacacttaccggatgagacaagaggaatttgtaaaacctttattccgaccggcgagtggtttacccgtaagtaacccgtaaggttccgagagaactcacgttgctttgaacgacgactttaaactttgttccgtttgctcacgattgtgaataataacattcaactcccaaccgttttttcttttattattctggtgaaaagcgctccgttttgcatttataactcgcagttcctgccgttttaaaccaaggaaataatttaaagttatcatctctgttgcataaagtttgatgttttaagttttgcacataaattaagaaaaaagtaactttttgtactttttaattattattttgttagtttaataatattattgttatctctctcctttcactattggccacaaacaaaattaataatcatacttttacaaaacattaatttttatggaacaagtaaacatcaaataacttggtacaaagggagtattacaattggtacagacacgtaaaccgtgacttcaatgatccagtgacactatataaaatacgtttttgcatttctgtaggttacaaatattaaattagttaccctatacatactcttaataattcattcaagagcatacaatctcaaaattgataagactaactaaacaaaaaaaaaagggaatattcaaatcaaggctgagattgttaggagtttaatgagtacagtatgtaccacgattgagaagagaaaaccttggggtagaactagaatatctctaagaccaaagtatggagaaagaatttgacttaaaagctttaaacgactttcttaggtacgtaagagtatgggggaaaaaggttgtgacgctgtaaagttttaaggtaaggttttgaaaccgtttttttttatttaacattgcatgaaaaactgatgtaatcaacttgtgtaaggaacattgacaattgcactaccaatacatgcagaaacgacaaaacgcttgttgtcttcgaaattactattaaattgtacaactttctacattcaaacatatgatttatgttatccacagctgacaatgtttttgtatttattgatttttacggacttttgatctatctatgccagactaaataacacatatttgcttcataatgtagaaaatttcccaatatcgataaatatcagtagcactcatccaatatagtagcatatcatcagtgaccttccttccacacttcccataattatgatatggcttattcgtctccaaccattcaccagcatgatgaacaaaaacacaaaataatcaaggtaatgtttaaatgtcatacatttcacacctaggcacaatagcacgataactaacagtaacactcgtaaattctacgagtgcttataaaataagcagtgtaggtgttgtttacttttttaactagggtctgttagagttatttttttgtcggcaaacttcttttctcactagctgaagaataatatcttccaaaaaagtagagtacaactacaaactattataatgacgacgaggacacgctataagttacagagaaagacttgagaccaataagtttgtggaagtggtacattgattgctactaagattaattgattaattatagttaaaatcccaaaaacttggttaactaccaactccatagccataagagagcaattaatggacggtgatctccaggaataacgcaccattaattctccatgtgggctcccacactggaaccctccccctgctaatgtgtcggtgtgactccacaaaatacaaatcctcgtagagaaggacactcctgtaattgtctgcatcattcattactctttccatttaccagtaaaatatttattttagttatcgtaaagttttccataattcgttttaccctattaactacacatgattaatttatacatctatacatacatacacaaaacatttatagactatgtgctaaattcccgcggagatgaacgcggcattggttttggcttttttaaaagaatactaattattttcacaaactcgtgactattatgataggaataatattggtgaaatattatcttttacaaaaatgcatttattttggtaagcatatgtccgcttggcttctttagaaaaattcattcctctttgaatgttgttttttattcccgtcgtacagatcaaaaaccaaacagtccctctcgacctactggattcgcgttttgcttttgatcacatcttcgtcattgagcttcttcttcttctcgatccctgttggttttggttgttgtttttgatgaactgatagtggagatcagagatctggaaaacagagccgtgtgttactgttttggattgatggaactgaagaaacgttgtgagaaagttagggaaactgtgaagaaatg

SEQ ID NO: 28375 - DNA, 3003 bp, Unknown
  misc_feature (1)..( 3003): 2750-1469P.txt file - cDNA_ID_2996442; gDNA_ID_2926258; Annot_ID_143175
ctcgagataagggacaaaagcaatgagatagcgccacctcttggagagaatagaagtcaaagcagcctcctttgtggtaagtaaggacaatatatgaccaaggagatcatctggtagactgctaacaagatccaccatctctgcagtagaaagtacatttaacacaaactcctaagcaatccgaacatgaacataaattacaaaaaagaagttgcacttggggatcttatacagacgaagatctgtaaacactgatgcttaaactttgagtcaaattatagatccccaaggaaaattagaaaatatgaattcgcttaggcatttaccgctgtacattcgcggagtcctacacatatttaacttgtagagacaggggtcaaaggttgggagggaagcaaagaaggcgaaaaagtagatttagggtttgcccaaagtgaaggagtcacggagaaaaggttttaattttccttttacgtgcccctacatagcgttttataaagttttaagttataataaaattcgtttagaagtttagatgagataataagatatatcatgattgatgatgattaaaaaatcaaagctaaacacaaaaattagcacaaatgacccaattataaatgatacttctatagaaattatttttaaaaaattattatgcagattgaaattgtaacctctgatttcagttgtataacttgtgttgttttttgggctccctaaagttagatcaagttggtatctctgatatgttgtcattatagtcaagatctaggtagtttttttcttgctaattaacctttaaattaattagtcagtttgagtaaagcattgttaaagacatcaacaagaataaatcaaagcaaattacttgtgagaatattatcaaaacaatccaattgctagaaattcaagagtgtacacaacaacaaaaactatctttattagcgaaaacaagctgcagttgactccttttagcttatacaacaagaattcaatgcaactttggcataacaatgcaaaccctcttcctagttccagcacaacaattggtcttgcaacttgcaagtgaagacagctaaaggcaagtgattacttggtttaaaaacccggtccaaatcagtctcgattccgattcctattctgatgatcatgatgatgactatcatctgcctcaaaagttgtttgtcagtagcactttagtcaagatgatattaagaagtaaatttggtattggcctctaggtggaggcactttcttaccaatgcttaaaactctcattatcaaggctaagtggattggttctggtatgcttgcgacgcttcttccttgtttccccgtacttgaggaattaagcattgctattactgagtagctagaatgggatgaaaccgtgtcaagtgcaagcctcaggaagctagttatctattgccaaggtggttgtgcagacttgctgaattcaaagagtatttctttcgatactccaagtcttctttaccttgtgtattctgtttttgttgcggaggactatccaaaagtcaacttgacaaatttggttgaagctaaattcaaccttatgttacttgacgaacaaatcgagcaaataagagagccgaatgatgaggatgatgtttttctccgtcttggaaatgtgttgaagctctttgctggcataagaaatgttcagaaactttacttatctgcaaatattcttgaggtcagttgctattttgtttactattgtagtacatttcttgctagtctcaaggaataccaattaatcagacagccttgtctaactttctgaagcatgagaacaaattcattgttagtccgagtgttatgctgagtcactacacagattgtaacgccagctgcaatattacaaatgttgcacccgaatagcgttgagttgagctttgtcttgttgcaggtcctttctctatgctgtgaatcatttccggtgttcaacaacctcaaaattttacgaataaggagtgccgaggatcgaggatggcaagcaatgccggttctcttaaggaactgtccacatttagaaactctagtccttgaggtatggacagaactcatatgtctaactttaaccaagacaaggatcagtatttgtagtccctttatttgtctggtttcagggtcttatacactatgtgacaggtgaatgtgggaatgcttgtgactgcaaatctcgggagggaatagttagttcgctcttatcatgtccagtgaagaaggtgcagattaaagggtttaaaggaacgatgagagagtcgtcaatgatatggcatttcatgacgtctttcccgtgtttaaaggttgtttatgccgaagagaatgattttacaacaatctttgaaatcctgggacgatgaaacttgtcgtgcatatgctctacaaagagttctttagttctgatgtcgagttcttggtgtacactcccatggataagaagtggattttcggagtggctttttcgaatgtaagagttttcataatcgacattgtcatgattattatcttcctcagttaaaccttagtctgctaatatgtatttcttatgaagaccaattactcagtcatcattttctgctctgtacttttctcaaaacctttacgttgtctaaatcatgcgatttgattgtgttttacgtctggtttatttgctttaataaccggtccaaaccaaaccattataatttactaaattttttcggtttgcgtttatcaagattgaattccggttcaaagattcttcctgtaaaatggatctttcatatattcccttgtctctcgaaatccaaaacaatctaccatcgatttcggtcttaggtaggtgctgaagctaactattcccttctgttcttatacttctttgaacgtatcttagatcattttgcttttggttgcgttgttaaatttcgatcaatcgcttctctgtttatgtatggttagatgttccaatagctttgtgtagttcagaggatg

SEQ ID NO: 28376 - DNA, 3000 bp, Unknown
  misc_feature (1)..( 3000): 2750-1469P.txt file - cDNA_ID_2996452; gDNA_ID_2926258; Annot_ID_143179
tgtttttatagatttgtcatgagacctttgtttgtttgtagggtcatagaaaccaatgtttcaccacttcgcctctcttttatcactgtcatcgtacgcctttgttgaggagttgacctaatttcaagtgttactgctgcgaattttgcttagtttccttttccctaaggcttaagagtcgaaagtattggactttgtctctgtatcaaggtagctgctgaagttacctcatatcttcttcttctactagttgtattctcatttgggcattctttttcgttcacagtctcaaaatctttttgctttgggtggtttcctatttgggaattgttgatagtttaatttcttcctttgtatccgtgcagagaagatggatctcttcagcagtctaccagatgaggttctctgtcatatattatccttccttaccacaaaagaggctgctttggcatctgttgtctccaagaggtggcgaaatcagtttgcacttgtccctaatcttgacattgatgaagaggggaagagggaaagagaagaaattctgctgagcttcatggattttgtggataatgtattggcattgcaggctgattctcccattaagaagttttccctcaagtgtaaaactggtgttcatccacgtcgacttgatggttggatatgtaacgtgctgcagcgtggtgttttggacatggatctttacatcgattttgacgaagaatcttttttgcctcgaaaactgttcttcagtgagtcactagtcgagctgaaactaagatgttcattaggtgttaattagtgggtagcgtgggctagactaggtcctgtcttaccaatgctcaaaactctcattattgactcagcttggattcgttgtgatacgattgagacgtttcttcctactttccctgttcttgaggaattatccatgtctattaatgagtggccggattgggatgaaaccgtgacaagtgcaagcctcaggaagctaagtatctttaccattggctgtgaaaacttttcaaatccaaagagcatctcttttgatatcccaagtctggtttactttgagtattatgatatggttgcggaggattatccaaaagttaacttgacaagcgtagttgaggctcgaatcagccttttattagatcaagatcaaatcaagcgaggaagagcgccaaataacgatgaggacgacgttcttctgcgtcttcgaaatgggtggaagcttatgagtggcataagaaatgttcagaaactttacatatctttagatactctccaggtctgtttttattttgttttgatagtatttttttcactgcactcaagtaaacccatctaaattgtggaagtatgagattcaaatttatgttattccgagtgtacaattcttaagccctttcacaggttctaatgcacacttcattgttgttctaaggctcctgcttttatatatcgaaacaatcctggacatattgcagttgtaatgttgagtttggctttgccttgtttcaggtgctttctttatgctgtaaatcgatgccggtgttcaacaacctcaaattgttaagtgttaagactgccgagaatgaaggatgggagggaatgccggttctcttaaggaactgcccacatttagaaacactggtctttgaggtattaacacagatcatttgtcaaacattaacaatgacagagaccattctttgaattcccttactctatacttatctgctttcagggtctaagacattttgtgaccaataaatgtggggatgcttgtgactacgtgtctagggaagacaaaggccgttcgctcgtgtcttgtccggtgaagaagttacagatcaaagggtttcgaggaacaattagagagttagagatgataaagcatttcttgtactcttttaggtgtttggagaaggtagagatttatgctgaagagaagggtcgcactcgcacagaccttgaagtccctgggatgtttgaacttattgcgcggatgctcagactctacaacgagttctatagttgcgatgttcagttcctggtgcgtagttccttggataagaagtggactgcacagtgattgaagtcttcttgggaaaaacttagctcatagtttgatgtcaaaggctctttttgattcttgttagaagctaaattaaaacgacaccatttcattcagatatttgatatatatctgggacatcttctgcttttctttcgacaagtttgctttcttctccctctatggctctttatatagatagacttctctgcaattttaaacccaacgtttaagaagaagaggaaggagactttgttttaaataccaccacttgcaacaaccagccacaggccaggttttaccagtttgctactgggcttttacttgggcttgacttgttccaccatactttcgccgtttcgtagcccaaattcaaactgccccggtttgtttacccgtttacccaataaaccgaaaccggagcctaaactcgactgggtcacctcactggtgtagtgtagtggactagtggtgtccgctttcaatgcaaaatcctcaatttggtttcggcttctccgatgcattagcatgtcttctcgaactgaaagtctgggactttcccctctaccttccgctaaatgtttgcgttgacttcatatctttgcgtctacggccatatgaactagcgattaagcaatctattctcgctctctctcttcccactggacgcattcactgaaatccccaacatttggatactagattaagcgtttgtaacgaggtaaatgctgaagtttaatcatcttctctgtttctactgattctgtgaactgggtttatctctgttcccacttctcctcttttgggggaaagctgtttgatttcatgttttagattcctgattgcttaatgttaccttactgttaaagctgtctctagttgtagatgaagtaatgtacttttaatctcgtgtacagaagatg

SEQ ID NO: 28377 - DNA, 3000 bp, Unknown
  misc_feature (1)..( 3000): 2750-1469P.txt file - cDNA_ID_2996460; gDNA_ID_2926259; Annot_ID_143181
gtgactccaacagtggatctgcagaagagcggtttgagaaatactgcagagaagtcgagtcaaccgctgcttggggcagtcaattggagcttggagcattaacacattgcttgaggaaacacataaaggtgtattcgggatcgtttccggatgttgagatgggcaaagagtatagatccggcgatgactcgagcctcatgttatcgtatcacaggcatgcttttgggctcggggagcattataactcagtggtgctcgtcaacaacatcaccggatgatggatgatggactttatctaaagctttaagaaaagtgcttttgtatcaaaagtttactgaaattctttcttctttaatgtttgttggatttgagagaaccaatgtgtaacttcaatttttcatttggttacaaggcgaagcataatctattgctacacagttccaggtttttcattacagaacaagaatgtagcagcaatttgtacggagaacatgacacgaagaaacatatgacctttgaacaatttcgcgagccaatttggcagagacagttctagagatctgaaagggaatataacaaacacaagttgttcctcccgaatcttgagattttagcaccaaaagaagaaaatgatgacgaatctatgcttattatcacccataaattttgctaattcaattgacacatggccttatcacgaatctgccaaagattcttcatttctgtagatttccaaatctggtgtcagaatcatgctttcctgtttaaatctgctaaaattttgtatttttggaaagttgaaaatgcaatgaacatggattctctttctcgtgttcaatgcaacaacaactacaaagactcttaagagtcaagaccaacaactctcacatttagataaaaaaacttgaaaatggttttgacaaagtgtaaaagctaaagtaagaactgtgttggatcacttacttgctctctagactccaggtcacacaagcagaaaagtatctcaaagacgatcctctttttgtttgtttttcttgctttccgtttctttagagcctgaaacttgtggggaatctattgttgcttgaaaagataagcatctaactggataaaccataatccaatctccacctcagtggatgcatcaaaagcaaaagattttgccaaaaaaagaaaagcaccatagagtagacatgatcacactgttgcatacctccctggatccgtggatcattacaaaccatatgacaaggatatttccgtaattagaaaagaaaagtttacatgaactgtatatgcaacttggttctgatgttcatgcagtttttagagaacgccaaagggcacatcactagtatggaagtaaagtagtgacaaagatctgatttatgcaacgttaccatcctccacgtatccaactctataaataggcctactttgtaatttgtatagcatcaaagcaaaaacaaacataaagatccttgagttcccactcacatagtcacactacatttgtatcacatttatatacatagaaatggaaagcgttagaagtttagttgaagacaaaccagtggtgatattcagcaaaagctcttgctgcatgagccactcaattcaaacactgatctcagggtttggggcaaagatgacggtctacgagctagaccaattctcaaacggtcaggagatcgagaaggcattggtacagatggggtgtaaacccagtgtaccagctgtgttcatagggcaacaattcatcggtggtgctaaccaagtaatgactcttcaggtcaagaaccagctagccgcaatgctaagaagagccggagccatatgggtgtaacagaagacaagagagtcaaatgcaaactaggatagaataagatgagaatgatacatatcgttgttttgcttcttctttaattttcggggtttcgagtatctaccatgcacggatatgttttcaacaagtgcaacactatagtttacacaactctagagctaattaagatcaagaactttgtattctcagttaccatacttgttaaatcaaccaatataagctaagaagactaataagcaataaaagagaaagatttgcttttccattgatacctaaagattgttcaacaaaatgaaaggccttttatttatcatcagccatgagaaaagaagaaacaaacaaaagtagagattttcactaacttcttcacttgtaaatgtaatcttttaaaaggccatttgcatgctcgacctcagaatgtcttcgccaactatcaacagctctagaaactgtagcttttgcttcccgaatctcttgagccgagaacttgtgctctatgattcccaaaggtccaggttgcagaacattgatcacagtttcagcttctttctcaagctgcctgtacaaaatgaaaccttagaatttcaacataaacacacacacaaaaaacaaatcttttattgtgtaatctcttgtcatacggagaaatacgatgcaagcattaaccaacctaaaaagctctagattggatacaaattgaattctttttatcagtcaattcttcaatagtaacgcagtaatacaatgaagagaagaaaacaatggagaaaccttaagatcccggagaagggtaaagctctagcgatcctgtaaatcgacatcgtcgccggaggaagagaagaaattgagtaccgcgattcaattgatttattatttaacaaaaactcaacttcgcgacgaatcagttttgacttcacatatattgggccataggcccatagagttactagcaggtgtaagttacaccgtgtaaccgagaatgtaaattagtatgggctaaaggcccaataaataaaagggtttcttctataattggcgaggatagttttgtcctaatagccaaacacgtctcatcatctaaactaggcttccttatccagcaactcccgcgccactcgtcttcttccacctctctctctagagtctagacaatg

SEQ ID NO: 28378 - DNA, 3000 bp, Unknown
  misc_feature (1)..( 3000): 2750-1469P.txt file - cDNA_ID_2996464; gDNA_ID_2926259; Annot_ID_143184
cgtacgtgtatcattcgttcttgataaacatcatttgtcttgtcacgtcgtcgatctgttaaatcatcatccccatactttgcttttaactctatattcattcgttagtataatattactaatctcctctaagtttttttttattaaaaaaaaatattctcctctaagtttaagctgctccaaatgatatatgtctttgtaagagaacataaaagttaagaggaatgaatacattactagtcaaacggaaaagaaaaacacacactaaactcaattcatgatcagtattgtattctagcgaatgacgattttaagatttgagtttactctttacgtggaattcgaacagtaatgttatacaacagtgcttaaaggtacacttgtcttttcatccgtacaatgtacgtaagtcaacatacatatatacatctatacatgtatataaattattatccaataactacgatccatccgaagaaagcaaagcattttaatacatctatgctccctcccgattatatttatcatctatgcgctcttagcacatcgattattgacacaattacatgtgcatacatatatatatatatatatagatatatacacatacatgtacgatgatcggacgctataaccaaatggccttagcgtctttaagcatctgcttgagtgacccgtccacgtggaatgagatgatgtctttggctgatccgatgtaccttcctccaacgaaaacagctggaaccgccgggttcgatgagccgagggcacgtagggcccgttccatttcacggccttcagggtctttgtcgagctcatggatcgccggactagcgcctagttcgtagaatagcgtcttgatgctatggcacatacaacatgagctctttgtgaatatcaccgccgctttcttcgacgacaaatctcttattctctccatttgcgatggtcaagaaagttagtgatcaataagtgttgttttttttgtaatgagcaaggcttaggttgtattgaacatatgcttggataagctgttatttataatggttattgtgaaagattttggattattttattttagccttttctttctacaaatatattatggataaatatataaatgatataccccacactaaatttatattgttatatattgaagtaccccacgaacaaaatttcctagaaagaagctaagttctttgtgatataaatttggataagaaaaaaatgcttatagcctgatgatttcgtgtgatggagacacttgctcttatttatttatttttggtaattgttttttttatatatagtttatacttagatttcagttatatatatgtatactatagatgggattaagtgtaatattattacaacatatattatatcaaaaacgaatagagagatgagttacatcactttcggtccgtggctggcatctgcatcacgtacccaaaacattaatttttataaatttataaaattttccattttttctatagtggaaacgtggaaggttaataatttgctgtaatgtggcataaacaaaaaggggatcgttgatgcgttttgctgttaataaatatatttcggacataatgtagttgacattattgtatctatattataaagtctaattacctgaaaaggataaaagccatttctagacaaaatcatctcgtatatgttggcaaatctggacgacaaaaaatctacagatgcatgaatttcgttatatgatcaaatgtgtatgattaatgattaataactaaacaattaataaaaggtctatgcattaatgtttcatatatagttgttacacttaaaataaactaaaaatcaaaaaatagtttttcaatgtcaaaagttaagtgtatgcaaagagaaaaaaaaaagagagcagagatttggtggtggtggctagtgactgttgcgtcatctttgacatggaaaaaaaaaatctgagataagaagtttatccatatctgaccccactccacaaatcgatgtttagacaaaacatatgaatattattttcgtattttattgttcgtttacttgatttatattcttagaaatatcttcacctatataggctagataagttcttaagccattgtcgaaaccacgtggcggtacctcctcatgtaagcatagacctatgtacttttacatattatcatacataagtttctgatatttatttttgtaggtcacaatatcgaccgtccatagattcattttatcgattagattcttttttactttttaatgaccaaagcgttgacagaataatatatcgtctctacttgcccaagatttaggttcctcactgattcttcgacaagttaaatcacagtaacgaataacgatgattgcgataatatacaaaccctctaactgacatagagggtccgatggattattttgaaagcccaaaagattcgctttgataaggccttttggcccaataattccaatttacttccattctttcatgacattagcccatttccttcttttcaattttattattggttttgtcgagtgaagcgtaaaccctaaatcactaatcatcgattcttctccgttggatcaaaggtatcatgaactcggaacttttctctcgcgttttttttcttcattatttgataatcgaatccgtaaattcaacttgagttgtggcgctgtagatttctcttatagattttagaacgaagaaagaaaatcgtatgtcatctgctttctcaattttttttggttgtgggtttcttttagtgatacgtatcagtgaatttggtggaatactggattggaaaattgggggtttggtcttgtttctagagttgttatgtcctttgtatttatgtcaagtgttgctgtcttaaagcccaacttaaacttgaatgtgtctgaagtctaaaccaaattacgtgttagataattgtgtttgtggtattctcttgtcttgacacatttctttagcttcatttaatg

SEQ ID NO: 28379 - DNA, 3000 bp, Unknown; identical to SEQ ID NO: 28378
  misc_feature (1)..( 3000): 2750-1469P.txt file - cDNA_ID_2996464; gDNA_ID_2926259; Annot_ID_204661

SEQ ID NO: 28380 - DNA, 3000 bp, Unknown
  misc_feature (1)..( 3000): 2750-1469P.txt file - cDNA_ID_2996472; gDNA_ID_2926259; Annot_ID_143188
tcgaacgttcacacactattagagttagaccatagaataattttatttgataaagcagacaaaagatgtgattgggcaaaacatgaacggcaatatagaagactcgacgtccaccccacctactcacccccaccctactttcatggctcccactagctcggcccattgggcctttctaactaatgagaacatataattaccgtacattctctttaattcggcttctttttatcagtttgtcgataatttttcaaagtttttccatttatcattctaacttttaactaaataaattatactcataataataatgcgttgaccaaagtattacctacttagaatgatgtggttttcatgcgtaaccatgaaccatccaatatcaattaaaaaagctaataatgaaaaaggtatagttgcgtgacgtatatttgcaatatgggattggagaataaaataacataggaaaatggctaaaaataaatgcggaaaaaagttactagtaaaatcgtgattgggagggacacgaaataagaaagcgaagatataagaaatataattggtcagaatttgacaaatcatataacgatatagagaagagaacaatatgaataaaaatggaaaaaaggatggcttccactaatggggaaggtcattataatcaagacataatccaaattagctttataaatcacgtgccactttacttgtacttgtacaccacctcttcatcaatcgcattatatatatcactcatcatctatcttatatataaacagtagtattatgtaaatactatagtactatgttattcttttatatatgtccgtccacacatgcgtacacatatttctatctcacataaacagtagtagtataatgcagtctgtaatattctcggcttttaggtacacaatttataattcattcagagttggatctaatatcgctgaagagataattaaaaaaataattagggagataattaagggataatagacagcaaagagcaagctagttttgagtacgaaacccgagactaggagaaagaaataagagagattcgcgggggagccatgcgtgggattattattctaatcatttccttaaaaaattcataatcaatgacctcttattatatcagtgtaagttaatccctttttctgacgacattaaaacttataattttaaaaaaacttaagcgtattacgtgcaagacaactcagctccacacttctcccatctgactatactcagccctctctttgttttttcctaattatctctttcttcgttactacctcaatttctgagcacttgcttgctacattttttttttttaaaatcttcgtatttgtatgtatgtcattataatttttagattttatttttggtttaagaactaatcaacagtacattcaaaaagaaaactagaaaggtgcgatattttaaatagtagtttaagtggataaacggtcaggatggtatgtaatacgaagatgatatagaacagtttgataatgtgacaagtttttttagttagggcaggacagacctatcaactccatgctcagactctgcaaagcccatcatacactgtttcgagaagaagggcattctcgtcaattcaatacccatttattttcctctaagccgttgtacttgcgacagagcccgaaataattgtagtttttatacgtttattacacccagacgaggtaaattaattaagaagtaattattaattttaaaagtcacgattgtgtatgtatgtatgtccgtacactgttaaaaaggggtcccagatctgacggtcgtgattaaaatgcgacgctgcactttctttctttctttcttctctactttattcaaatttttcagtatccattctttctctctctttttttctttctctactcataaaagttgttcactttaaattattggatacttccctcacatttactcttttttgtgcaatcctttcaattttaatttaaattattcagcaatcttcaaaaacatacaaataatgttttaatccaatctcacacgaaaacactgattcttgttatgttaattcatcattcaactctatttacttcactttaatgctatgagaaaggatacactttagttaatcaaatttatcaatactatatattactagaaaatagaaaatgaaactgtgattagtcttgatggtttatttatgaatccaagtggtgggtaaataaatgaacatgcaaaactaataataggaggagatagatgctcagattccacatcaaaacatgattggacggttgtgatgtcatcataaataacagtaatagcttctttttttattgttttgttaccgtcagatcattagtagtctagtattttttttaacattctgttgtggtccccgcaatttacggggcttcccctcatatccagccgtgcatcgcgtatcattagattccctcttctcctacaccttaccacaccctatcattgatctccttctcgcgctattttgatagaagccgcgataagccgaccccccctctccaatatctcgtcccgttttctgcggctgcccttctctgcacagtcgataagataatctcccgctttcattcaatcggacggctggtatttgaagcttataagacacgtgtcatcatcagaatcgacaatcacaatcaccgaaaaggctcacatggatatgtttgaccacggttaacttttaacccaaccatggttggcttttttaacttgacctccttctccttccccctatccttttctcttctcttcccactctctctctctctctatctatcttcttcatctttgtttcagcttctcctttgaaactagattatctccgttaatggcgcctcagatctaaccttgggagttatatatatatacttgttcaactcttcttcgaacgctgtccaacttcttcctctggttcgatcatcgagatctcgaggttatttggccgcaatg

SEQ ID NO: 28381 - DNA, 3000 bp, Unknown; identical to SEQ ID NO: 28380
  misc_feature (1)..( 3000): 2750-1469P.txt file - cDNA_ID_2996472; gDNA_ID_2926259; Annot_ID_204666

SEQ ID NO: 28382 - DNA, 3003 bp, Unknown
  misc_feature (1)..( 3003): 2750-1469P.txt file - cDNA_ID_2996492; gDNA_ID_2926259; Annot_ID_143197
tgcaacaaatagctcaacacttaatttggaatgactatctatttgcaagtatatggctttggttaatatatgacattaccttttccgtaacaatcgcccccgccttctctctacaatatactgaatcacatgcttggaaatcagaatcacaccaacaacagttaaacctatggagacatatttgaacctcctgccaaagagatccttttagactttttcaatctcagttttcgaggaagacaatagccatactgagaagagaaacaaccttgaccacttttccaacggaaagatgatcttatcgagcggtacaggtgagacaaagaaaagtccattctcggggttttgaatcctgaaaccacggacaccgtccttaacaacctgatgacatggtaagaaacaatacaaatgagatgtagaacgtatattggtagtaatataagaagattttggaaccggtgacagataaaaggcgtacctcaccaacaactgtaaccggtgtgccaattgagaggacaagctcacctcactatatatgaaattttatgtatggattatggaactcatttgctgtttgcaacatatcgccattgttatagtcatagaaacagaggggaagatgtaataaaaccaaatgttattgtttcaatttctttttatacttcaccaaattaatggccaacatttcgcaataaaacaaaccagatacaataaaattctaatgatctatgactatgagtgtgtagtgtaccaaaattatctatgagtgtgtagtgtaccaaaattatctaaacccaaactagacaaatcggtgatagatagaaagatcttctcacgatccacaatcagcctgcaactactactagtgagctccacatctcataggagaaatctaactgagattttcctcttgtggtttgcatatggcccaagagacctaattccacgtggacatcgccaccaccattggattagatcacacttccgtcactgttgtcgtcgtcttctccattgtcttcttcctccgatgaaagcggaatcagccagcaagtgccgtgcaagtgaccgttcacgcacacgaagaactctaacccaccttcacgtgatcccagccgccgcgccgcactcttcgggacgagacgcgccgccgtcatgctccacacgcgccctccgcaatacggacacctaaccttctcctccagcgccgcttgtcttctcacgagacactccctcgtctttgacctcataaattcccgaaatacccctctgaaaacccctaaatgctcatctccacccaccgcctgatgctcgcacggatcgctcatgtataggagatcacggcggcaattctttggcaggaagaatctcccggatgtcttggagaatctggactcgcaggcgaagtgacccgacgtcggttgactcagattgaaataccgagtcgactcacccccgccgcagaagaacatgagtttcgctaacgcgtgccagccgccgtcgattcgaccgctgggatcttcgccggacaatgccgccaccatccctggcgcacggttcacacagagccgccgccacagaattcgtctggcgattgcgcagaatctgcggctgagggaggcgattgtgcatagcgtgtggatgtcccagctaatggactcgaagacaagaaccaggactcgctcattctctatacctgacttacccgagttgggtaatcgactcggttggttaaatttgagccgtctattcgtgttcatctggacgacggagaatcttccctctagaagcatttgagtttttgcggtctaaacacgcgcgtcgtgatctatcgtatttatatcagttggtccggtgctcgagaataacacacgtggctttatgctagaataaaagatccatggagctccccgacgctaaatgtgtcgagctatcattggtagttgtgacgcgtgtccattggtgattgcgtgcgctgcaacagagaatcggaggtataaactgacgtctcgattggtattaaaggaaaaaattaaggaatgggagtgccacgtgtcgagcgagagacggaaacgcgaatccgaaacgtacttttctggaaccaaaaatatctcccggaacacgtgtcacgttcaattgcagtcgagaaacgtggcaaatacgaagtaatcttccaaactaagaagagccacaaagcagtcgcatgaaaggcagcataagctcccaaaaggtccgtccaacaggaagatttttttagtggtcaacgtcttggtcgagtttttcaagatcgggaactgatgctttttgctttttgtagtggtcaacacatgacaactacaaactactacgaaaatgtttgatggattggataacgaggttaagctaataatgggctgaatggactttattaaagcccatacattccgtttcaaatagaatgggcttagaggagtggttgaatcacgtggatttgttttttcttttttttaactctgatcgacgttttgtacataccagtcagattcgctcttttaaccttttaaaggaaataaagttaacctacgcgtgtaaggcgcacgttagacatcgcctttggaaattggcaaaccctacaccgaccgaacaaacgattaacaaaaatatacatactcctcatatcgagagcagcttccttttcattttcttctccctctcctgggtttcgtgtgtgaatgtttctcttccacaaaagcgatagaatccaccagaaatcttcgattgtctctctccctcatctcaattagggtttacgggaccgattttcttctgtcttgcgtgcctacatccgtcgattgggttgggaattttcaatgcctgcgagttctttagcggaatctgtctccgaaaaccctaggcactgccgagctgctaattttcgcctgtggttctggcttaacttcgagagttagaatccttaccttttccttttctgattttcgttgtttttttttcttctgaattccgatg

SEQ ID NO: 28383 - DNA, 3003 bp, Unknown
  misc_feature (1)..( 3003): 2750-1469P.txt file - cDNA_ID_2996496; gDNA_ID_2926259; Annot_ID_143198
acattgtacctggatctgtcccatgctatatacctatttgcatttatcaaatagttaattgcgagaacatgtcaaattgtcaataccaactttatgtattactacgaattagagaaacaccttatatatattgttttgtctactgattttaggatgctgtaggcatccagccactcttttcaagcaaaggactagggcaatccttattatcttatcttaccgttttaatgtggaaagggactttttgcacggtgcttttgtgtaatttataaaacactattttgcagacttttgtctaatgttgttaatgatgctctaagaatctctatgtctaaaattaggcgatggaaattctggcccacactttggaaagtgagtcaaatttacaaaggagggtggatttatttttccttgtggattctattgctcagtgctccaaaggtttgaatggtgagtatgctgtttttgcttagttgcatcattgatgttctcaatggcgagttaactttgtgaatactacctttctattcaggtgatgctggtggtgtttatctttcatccattcaggctatgctacctcgcctattaactgctgctgtcccagctggagctaccacacaagaaaaccgaaaacagtgcttgaaggtatgcgattttagttagatattctttttcttatgaatactaactctcaccctttctgctcttatataggttttgaggctttggcttgaaagacggatccttcctgaatctatagttcgtcaccatataagagaacttgattcgcttagtaatgttcctgcttgcctctattctcggcgatccgctcgaacagaaagggcgctggatgaccctgttagagatatggagggtatactggtggatgaatatggaaggtgagagttgagtctaatcagttttgggatcttgatttctttatctctagggtcataacttttttcacctttttgtttcagtaattcaactctccagcttcatggattctgcatacctccaatacttagggatgaagacgaaggaagtgactcggatgggggtgattttgagtctgtcacccctgaacacgagtcaagaagccttgaagaacatgtcacaccgtccattaccgaaaggcatacccgtatactggaagatgttgatggtgagcttgaaatggaagacgtggctccaccttgggaaggtggaagcagtgctagtgcgatcacagatcaagctgataatagagagtctgcaaattgtctgcttgtccctggaacttcacatcagaatgttacctcgtcatctccaccagctcgcccttcgcagaatgctcagttggcaatgtctaattcctactcaaatggctttgactaccgcagaaatcccagcatgcaggtgcgtcctttttcttcttttagaatcttttgcagttaacaaagtgaggattcagacatagttaataacttaatttgtggttaatattcaagggcgactatcatgccggtcctccaaggatgaatcccccaatgcattacggaagtcctgaaccatcttatagttcccgagtatctttgtcaaaaagcatgccacgtggggagggttctaacttccagcataggccatatccatcttctcatcccccacctcctccgccatcacatcattattcatatatggagccggaccaccatataaagtcgcggagagaaggtctatcataccctcacagatctcattacacactggaatttgacgaaaggaattatcaagacagctatgagagaatgaggcctgaaccatgcgagaatcgagacaattggagatatcatccgccctcttctcatggtggactccgataccttttttttttttttccttataattctcatgcatgctaataggcatatatgaatgcatatatgaatgcatatctgcgcacacaagcacttgctcatggatgctaataggcgtgaatgcttttcttttttttatattgcaggtccacgatatcatgacagacacaaaggacctcatcaatcgagctcatacagtgggcatcaccgtgactcaggaaggttgcagaacaataggtggagtgattctccgcgtgcatataacaatagacactcttatcactataagcagcattcggaaggtcctgttccagtaggaatgagaggtaatatggaaattcatacttgttccacgtcatgaatcagagccttttcttatactggaattgtttcctaggtttagaaactctgacattttcttttgactggggattttatatcattaggtctctgagattcgagattgttttgcttgtcctgtgggtatatcttgaatataaaaatgaacttggagtatgtttgtggatatgcagatccagggacgtggcatcaaaggtgagtgggagacaagagatgaagaagggcaaaggtgcagtctgctctaaatgaaagacatttgggctatagtcatggaaaagaagaaatagggagaaacaagtgtaggttggaaagacctgggccacttgagagagatgttaatatacaaaagaaaaaaggcacagttggtgtgtgtacatatgaccaaaaacgtcgtggagaaggctaaagaaacagtcgtgaaaagccatttgttgtagtagagagagagagatttgagttaggcaatactgtcactgatttaggcatttgatattttgtaaacaaaattttttggtttatttttggggagtggtggtaatacacactaatatgcatttctgtcacctggagagatgagatgtctctaaaaaatggtcaaagaggcgattaattagttaaatagcaaatggaaaaaacaattagggatgggtttgtttgttaccaaggaattaacataacagctgtaatgctgctgcgagataaaatgaacaatgaagaagcggagacctgttgacttcaaataattttaattagtttcttctgtgcgatagagatcgatcgagagatg

SEQ ID NO: 28384 - DNA, 3003 bp, Unknown; identical to SEQ ID NO: 28383
  misc_feature (1)..( 3003): 2750-1469P.txt file - cDNA_ID_2996496; gDNA_ID_2926259; Annot_ID_204676

SEQ ID NO: 28385 - DNA, 3000 bp, Unknown
  misc_feature (1)..( 3000): 2750-1469P.txt file - cDNA_ID_2996506; gDNA_ID_2926259; Annot_ID_143202
tattcataaccaaaagaccaacaacaattctggtttacacgaagataacaatttcgcttcaaggaaataaatctgaagacaatcttagatccttagatacctacttaactatgtttaccgaatccagaaagagagataacactgaacctacctacatagcaacaaaagcatcacatcattcctccccttgcttgattttcagacttccaagctttgattccaattcattgccatcttcgccttcctcctcttcgtcttcatcttcaaaatcttctccttcagggtcattgtcgtccaaaggaacaagcttgtccagacagtccttaaacatgtcatttacctcgtcaataccttcctcagatatgaagtttccattgatgttcagaagcttgaaagtatttttcttcacaacagtttgtgccaaggcccttgccccagctcttctgatcatgttggtgctcaggtcaacttcaactaactgatcatgaccttcaactgcctttgcaattaagatagtcccttcgtctttgagttcattctcagataaattcagctttgcaagagactgtttggaggcgatgcaagctgccaaatttccagtggattttacagtaatgtcgttaccagccaattctagaacttcaagagaaggggcggacttaagtagagcttcagaaagtgcctctgttccctcatcctccaagttcaggtaactcatatagatctcggttaaatgagtcaagactgataaagtcttggccagggcaattccaccttcgactccaaacatgttgtcacgaagatcaagtttcttcaagtggctacagtgttcaagtgcttcagctagtgcaacaccaccttctgaaccaatccttgtagatgaacaccggaaatcttccaaagatggacactccctgacaatctctgcaatggcagttgctccttcatctcctgtcatgttgttatgaaactgaagaaccctgattttgtcagtagaagggagaagctcacgaactgcacgtgcagcatcctcggaaatgccatcattcatcagatagagctcctccaagtcatgctgagaattgatgagagaagcaaatgccctaattcccttttctcccaaagcattgtccgagagattcagatacctaagcttagaaccctctaaagcagatgaaaacatattcatgacttcaagcgcttcagcctctggtcttcctgcaacaaaatccgagagatccacttccgtcagctgatccttgatggaagacaaaacgctcgcagcaaatttggctgcttcagacccaaaactcctgttgctaaaacggattttggtataggagttacgcgggtcagccagaggcctcaaaaggtcgcgtgcctcctcttcttcaataaaagctctgctcccaccagatatatcaaaaaagacatcaccatccttgctcacctcaacctcggattcttcctgtggaccacgtttgatgacatcaagcatgagcttgctggattctttagcatagacgtgaacagcagaagtgccatcaccatcaggctcgttctggaagtgtttgttggcagtagcaaaggccaaatcttcaatgcgcttggcgtcttgctcagcctcttcaacagacaaaagaccgtacttcctggagaagatggaaggggtggtaatgttcttggtcatccgctcaacaagcatgagacgggtactcttactcggtggccacatcttcactgacaaaacacggttctgtgtggttttcgctgaatgatccattctactactgcttggttttcttctgtaattcaatacaaggacaaccattactcaatctgacatagtattccaaggaaaaagagagagcataacatgtagatccaatcgaaaacgaagatggtgtcgaagaatctaactacatttctattgtaaatccattaattaaaaactgcattttttagacaaggaaaccctcaaaatcacactgcaaacgagaagaatatatttcgaaacaaaaagaaacccagaaacatgagagaacaatacgacggtaccttttttttctcagcggatggatcgaagaaatgggtctctctatactctctcggacggagaaaaagaaaggaatagaaaagtgaattcaaagaagaagcgtgaatgagaagcagagtgagagaatcattgatctgcgtgcgtgacgataatgggaggcaatgatgctttagtttatttttgaaaatcaaatttcaaaaatcaaaaagacaaacatcggagagcccatccatggagattagggtttattctatctccgaaatgacgattaagcccctacacaaccctaaccacgaaagcccaaagcccattaataactaatttagaaagcccagtcttcttcttgctaaaaattaataatggaaaaaagacagggcagcgcagcgatgattaaggtgacacggtgggctcccaccaccgccagctggactcgccgacggtgaactgtctctctctaccacacatcactccttccttctgtcctttcttttttgtatttattattattattcattttaaaatcaaaaacccttaaattattaaataaaataaaataaaaggcaataatggaaactttccttcttcttcacaattcttcgcggcttcttttagcttctaagcttcagagcagcaaaaaaaaaacaatggagaagcgccggagatagatctgctttcttccattctccggaccttctctagttcacgaaccaacttcttccactttattctcgtaagcttcttccactttattcctaattcttgactctcaagattcttggtacttggtaggtagggagacatatagagagggtttaggttcttgattaggaattagttcacctgcttgaaatttactctacatacgtcttctatttcaaaaccctattcaaagttaccatttttatgcacatcatcatcttcattgcagattcgttggagaaatg

SEQ ID NO: 28386 - DNA, 3000 bp, Unknown; identical to SEQ ID NO: 28385
  misc_feature (1)..( 3000): 2750-1469P.txt file - cDNA_ID_2996506; gDNA_ID_2926259; Annot_ID_204682

SEQ ID NO: 28387 - DNA, 3000 bp, Unknown
  misc_feature (1)..( 3000): 2750-1469P.txt file - cDNA_ID_2996508; gDNA_ID_2926259; Annot_ID_143205
tgaagaggctagtgaagctgcaagtgatatcaaagtaaacttattaagcagccaaatacagaatcagatgtgaagtccaacgatcaagccgaagctgaaatgtaagtgagtacctttgaagcaactcgtcattgtctgagccaccgaacttcttgagtctgtttccaacagactcttggaaagcattacgcacggatcggatgttgagtttgccgtagacaatctgtagccttatcgtcatcttaatatcggcttccatgagatcatccatgaatgacttgtttcccctgatctctgaagctggaagatttgcgtacttgtctcccacaagtttcttcacatcatcacaatcagcatacacgcctggccaatgccagaaaagctgaatcaatcaattgaatggttccaaagcataacttttttctattgctaaaatatcaaaaccaactactttttcactccagtcctatcctttaatgccgtaaactgttgatagcacttcgtaatgacaaaaagtgagatctgttacttagacttccgacaactaaaaatctattcaccaattccaattaaagaccaaccaatccgacaatttgcaagcttatgacggacaaggacaattcaactaacatgagtttcggaaatggattaaaaagttaccgaaggcgtagacatcgatgttcttcaatcccagtaagctcttcttcctcaggccgacgccgagtaatcgccgggaatctccgattgaagcgggaaacgagaaaccggtcttaggttcgacaacggattcgtctgctagagttatagatccccatggtgaaagagacgaacggtgagaggagaaggcccactctagaatcggatggctgggattccgggacgccgcgatcgcagctccggcggctgcggcgccaacggtgacggagacagcgacagcggaaatggagaatccggagaatgacgtggtggcacgcgggggctgagaaaacgagaaagggaagcgaaacgaaaccatcgtcgtctttttggtgtgagtgttgtttagtagttcactaacttttttgtttgtttgttacactctttcttcttcctaggcatattgataaacacttcacacgccattgatatgattcagcgacaataactcctgctttaattgacacgtgtattgcacgtgacctcgattcttccggacatgctatgtttgggctttcctcgttttactattccggacaggatctatttgggctttcttttgctcattttatagaaaggcccccgttgcttttttttttctggaaaaatattggggagatgaatgaatagaatattttaatcaaaatccaattaaaggatgtgtgtgtcatgatgagaggtccactatatttgcgtcttatcttccttggtcgattgagattcatttagatattagaaggaatcatccaaacttgtcttattcacgacaccaagatttgttttctagtaagaaacccaattcagcccatattaggcccaaatttaggaaaggttctcaccaaaatttgaccgtcaattattccatcgacggtctataacgtgaccagtcgagatattttgaaatgtatcgctgtttttagtttcttttaaagtagttgaagataattcagtctgaagacaaacggtgtgtaagtgaagaagaaaaataaggaagaagaagaagcagcagcaatggtggagaagtcaggaggagaagtcaatttcccaaaattggagaaaccaacaggcaagaaacagacagcgacggttgttgtgggagtgttggcggtgggatggctggcgatagagctcgtgtttaagccattgttcaagaagctgagctcctccaaggacaaatccgattccgacgatgccaccgtccctcccccgtcgggcgcctgaatatggtgagtgagaatttaacaaagcctctgcgggagacacgtgtgttgaagctcattttattagcaaatcttgtgtttctttttgtaatatcgttcggacttttacgtactgctttgatgatgtccttttttaatttatcccccctttcaaataaaatcccgacaaggataataaaatcaatgagagatacgatgtaattggtttttattttcttgtttgtcttgggttttgttggtaataaataaatcttgattaaaaaaaattcttcttttatgagtcatttcgtgttagttgttgttggtcgtatcagtttaatattcgatcttattattaaaagtttctaacctgtaacagtaaatcattttctatagaatgttatatactgattggcacttgtttaatttatgtggtaattataagaaaatatataaataatattgtgtgtaaagaataaaaagtaaattattgaccacaagaaagatgaaaagaaaacgaaaatttaaaaaataataaggaaacataaatttggctggctaattcccaagcgcaaagaataaacaaagtcgttgaaggaagtttaaatgaagttaccagtttagtaacacaggccaaattgagctccattgtttatgctctgcttaattatttatgttcctcaatatctacaagccagtgtgtaatctatcaatataaaatatggagataaatggcaataaaagatcatattagcataatgagaaaactgatttttttaaaaatggtaaggaaaattgtcattcatctattaaaattctaaaactaaaaacgacggcgtagaatgaaaagctactgagctacataatcacttgtggtgggttctagaaactgaaaataggaaggcccaattatgagaaatccgtgatggcgaagatagagatactacagtaataataagagctttgcggatcacgtgtcgggtcaacccggttagatatatggagcatccatcctcggccggcaagttacatcgttggtagatcgatcaatctcatctccgaaacaataaccgccaatttccttcctctctaaatctctccgatg

SEQ ID NO: 28388 - DNA, 3000 bp, Unknown
  misc_feature (1)..( 3000): 2750-1469P.txt file - cDNA_ID_2996512; gDNA_ID_2926260; Annot_ID_143207
ctttttgggagtgggaacaaatgaattggtcttaaacgtattaatttacttcttatgttcatttgttactaaatatacaatagaagataagaaaaaaaaagaacaagtcgtcagatttgtggcaacttttgttcttttcagtcgccaactagtagtatatgaccacgacatttttaagcctaacctgattattaggctaagcttgaagattcattatttttcacgcaagtcttttttcctttattttcatgtgtacctttttttttttttttgctttttgttttgaatgagtagagaatttttgaaaggttagttctacttgatcatggaagatatttagattactttgcatgtattattcttaaaaaaaaaaaaaaaatcgatagaaattagcttcaatcaattagatcagtctcacattcaatataaatccgccgacacttattgcactttctttatttccattttagtattgtatgtgtgatcattttaactctcaccatctgttttagaggtgttcttatatatatagagatgtgatctctcattagatcgacacaaaaagacaaggatgactgaatgagtataagcatctcaaccgggtcatgtctttgatcacgttgaagctctttgttagtcgttcaaacttctgtccacgaaataaaaactgtaaaacaattcttagattttttttcattatgtttgcaatatagaaagaacacatgagacaagaaaacatttttttttaaattaatttattgagtgaggtgtacatattttgaaatatggcttatgctttatcgatggtgcaaattactcttacaaaaaataaggtcaagtgcttagggatgtcagttaggttgtccacgtctaattcgtttttctggaaattaatgattaaagttttattgaaaattctatgtaaactgattgttttatcaatatcataaattaataattataaaagttcatcgtcaatcaacatttctataaattataaactaatttttatctaacaaatgatccattttaatttcatatactctatttttttgtttaggaaaaacacacatattaaagtaaatttaaaaatgacaattttaattaatcttgaattattaaaattttatttaataaaattataaatctgataaacatacgcaaaaaagaagaaaggcaggtatgggttatttttgtatttatgtatccatttcccatgtgtaagatccccatgcatttacaacaattattcttgtcaacatcgtcagcattattaacaaattctacacacttctacgttggttcaattactcacgtaaacttttttaaaaaactaaaatttggagccaaattttttagaaatctactccaattttgtttaccggcaaaactagtatgttttgtttaatcaaatggctatatatattctcaataattgaattgagtttggaagcttgttcaagtcgaattgatgatttactttagaatgatctccatgaattggttgaacaatttccaccatttctatgtcgtcgttaatctcatgaaacttgttcaaatcgaattcatgtttaactttgaaattgttaacatgaaaaccttcttccgtcttcatcttgttttgaaaatatttttttttttctaacatcaacatgaagctttattagagtgatgatgtgtaatcctcatggaggatttgtacaagaaaagttggtacataagaatgagatacataagaaacattgccattataatgagctttagctaggcgatcggctgccttattgcttgttctggttgaccattgaatgttttgaccattgccattattgcttgttttgaaaatattttatgaatttgaaaaaaacagatcaaaaagaattttgagtcaaagagaggaaaataagaaaaaacaatcaatagctggaataataagatgaagaaacgttaatcatggaagcaaagagaataaacgtaacaagaggaagatgatgaaaaaaaaacttgtgatgatcaaaatagcattcgtttttccacatatactctataaaacaatcaagataatagttatgtgaattaacattttgtttcatttagtgctgatttcgcgtaaacctaagcatcaaaataaaattcttcatattcttaatttattttattctaataaatttgaaaacaaatacaaagaataaagaaagatataataggaaatataaaggtatttatgcatagaaattaggaaaagatcaatctttttgaagcaaatttttttcctagaaaatcaaataaaaaggaacagagagaatagaatttttctaattttgttatgaaatcaagttaaatacaaaatagaaatgatatgttaaattctaattggatagactatgtcatactttccctttacatgatatactttccttttcattatataaccgaacttaaaccgaacaaataacatgagaaccggactaaaattaaccaaaaaagtagacgagcgtccggttctattataaccggatctatatcaagtgtctcgggttcgatgcaacgcaccgttaccagtttcaattaaaacgcgacagtattatatagcttcaaagggccctcatagcttcttctccttcctcactcatcgatactcaaagctcgtaatctccttctactctccaggttcgtgatcttcgttgcatttgctcttattcatcaccaaattgcgattactctcttgatctctcttaaaccttaatcgtttcaattcgaattcatcagatctgatcctatttcctctcattgtcacagatccgaggattctcttcgtttacaggtatttcgatttcttcaattttcgatttctgtatcactgatcgcttacggttatggaatttgatcttgttgttttgatgcatttgttgatgattgatgatcatgatttttcgattttcgtagatttgtaaacgttcgtgaaattggatttgttgatctctttggtaaacaagcatg

SEQ ID NO: 28389 - DNA, 3003 bp, Unknown
  misc_feature (1)..( 3003): 2750-1469P.txt file - cDNA_ID_2996542; gDNA_ID_2926261; Annot_ID_143221
aagaaactttgtttggtgtcaactgaatccgtaatgcttaacttgcttccgcggccctgtcggaaactcatcctcaatttccggctcacgaactttttgccacatgacaccttttatctgcacagagagagagagagatgggtcagatccaatccactgcagccagcgcaaaggtttcttctctcactcttttgtaagcaatttcgtgatccacaagtgactagacttgacctaaaccgtaagtgttttgctttttgtttttgttgttgcagacaatagaaaagcagcaatcatgttgccaaagttcgatccaacaaacccattagctaccatgtctgttcttgaggatgtgacgaccaacgtaaagaaaattcaagattccctcttggaagcaatactttcacgtaatagtcagaccgagtaccttagaggtttcctcaccggtcaactcgataagcagagcttcaagaagaacgtacccattgtgacctacgaagatattaagcctcatatcgatcgcatcgctaatggagagccgtctgatctcatttgtgatcgacccatcagtcttctcttggccacgtaacttcaaaaaaatactcttaattcctcttttttacaaaaggaagtttgtgaaattgaagtgtaaagaccttaggaagtgattgtttgtgcagcacgggaacttcaggaggtattccaaagttgattcctctgacagcagaggaattggaacagaggatattgtttgggtttctctatgtacctctagtcttcaagtaaagatttccaaactccaagttgtgtctcatttgttgataccatgaagagtaagtagtaaaacccaagtcactttgttattactgtttgcagacacatcgaagggctaacccaaggcaaatctctcatgttttattttgtgacccgagaaagcgagactgtctctggactgatggtcaggtttatgatcacttgtgttttgaaaagcgtgaacccaaccaactcatttctttggtacatcaataaaactgttgctttcacattacactacctagttccactgcaagtgtttcttcattgtgtttgtaatctgatttacagggatcgagtacaaataagcccgcatgcaattgcgatttgtgaagacactaatcagggcatgtactgccaattgctttgtggacttctccaacgagaacatgtagctcgcctaggtgcgccttatgcttcttccttcctcaaagtaataaagtttttggaagatcattggcctgagttatgctctaacataaggactggccgtctcagcgactggatcacagacgcccaatgtgtttcagggatcggtaacttcctcaccgctccagatccggacctagcaaacctgatcgaacaagaatgcagtaaaacctcatgggaggcaatattgagtagaatttggccaaaagcaaaatgtatagaagccgtcattaccggcaccatggcacagtacataccattgctggaattctatggcggtggtcttcctttggtttcatcatggtatggcagctccgaatgtttcatcggtatcaatctcaatcctctgtctaagcctagtgatgtgtcgtacaccatcattccaagtatggggtactttgagttcattgaggtcgtgaaagaccgtcaagaagctggccatgttcccgcagaccctgtggtggtcgacctcgtcgatgttaaaattggccatgattatgaacttcttgtcacaacgttttctggtaagtttcttgtactctacgtttcaaaataaatgtagttttagggttttgttttaaaaagtctttatattgcttgcttgagaaaactataaatgatagaattaaatattttcactcttttgttttcttaatgtatatgatatactaaaaatctatatgttggttttctcacaagatgcatgcgtgaattacaggtctgtataggtaccgtttaggggatgttttacgagtgactggtttccacaacaatgcgccacaattttacttcgtggggagacagaatgtagttctgagcatcgacttgagcaagacctacgaagaagaccttctcaaggcagtgaaaaacgcgagtctcctgcttgagccacatgacctgatgctcatggatttcactagccgtgtagatctatcctcgttgccaggacactacgtgctctattgggaacttggtaacaaattcaagaacgccaagctcgatcccaaatctaatgtcttggaggaatgttgcttaaccgttgaggagtctctcgactctatctacagagaaggacgaaaaaatgataagatcattggaccacttgagattaaggtagttaaacctggcgcttttgatgagctcatgaatttcttcttgtctcgaggctcttctgtgagtcagtacaagactccaaggtcagtgacgcatgaagaagccttgaatatattggagtcgaacgttgtttccgagtttcttagccggaaaactccgtcgtgggagctacatgagctacattccagccgttaaaaccaccgttacataagaataacaaagcccgtaacaaataaacacaaactaatgacactttaacatacacaatgtatttcctgatttatcatacaagttatcgaaatatcataagtgataagtccatggattatcgagtttttttgttggtccgacaatattctagctaggcacgaaaagtcgcgtttaaaatagtgacactcaaatgacgaaacgacagtaccactcgtcactccttccatacgacagcgtttggctagcttgagctactattcagtggacacagacctacgagagctaataagattagagggccccacaagaaagatccaagggctatcgctcatccggacacgtcactgtttccgcgaaatcaacacgcagatcctttcttcatcagtaaacggcgagattcgccatcaatctgaattccaaacaaaaattccggcgaccatg

SEQ ID NO: 28390 - DNA, 3000 bp, Unknown
  misc_feature (1)..( 3000): 2750-1469P.txt file - cDNA_ID_2996546; gDNA_ID_2926261; Annot_ID_143222
aatgagtcatcattatgtttttggttacgctaaaataaaaagaagaacctttggcttttgttcttcaatccttatgcatgctttctaaagtggttatgatggattttgcttgatgttccacattatgggttattctattttctttgttcttgtaagatgatgcttcagaagagtttgttactttttaccgtatttgtaatttacattttcactgaaaacaattggcgagtaaaaaagtgtccttgtcttcttctttgttcggattatatgaacaattgttcctagaagcctctctacataaaaagctgagactttatctctcatctctctttagacgtacaaaaaaatcagttttttaagtttcactctaatggcgtcaatttcgtcctttggctgcttccctcaatccacagcgctcgccggaacttcctccaccaccgtacgacgccgcaccatctctctgtttcttcttcttcttcctttttattcactgaatctctcattttgattctcagagatgccggacgactgtggctgctcgattagctgaccaatcagatgacttcgctcctcttcgttcttctggttggcttgcttctacagttttacttttctgtttcctcctcaacagtgaattgaattataacttcagttttgaaaacaggtgggaattgtggatgtgttaataattctggagagtttgatcgcagaaagttgttggtttcttctgttggtttgttgattggagcattgtcatacgattctaaagatggagactttgcatcagcttctcaatttgctgacagtaagaattttcaatttctttttggagggcagagaatctttctcagggttacatttcgattaagttgttgctttgtgccttattaagtaaagttattggcatttgtaatttggaacattgtttgattgtccactgttaagagtttggttgtgagagaaagatgtgttctttaggtgaagttaatttatccgtgcgtgattgttgaaatcatcgatatagcctcttttttttctaaagccacattcttttcttggtatattacttgcattcacagtgccagcgcttaaagggaaggattatggcaaaacaaaaatgaagtatccagattatacagaaacacagtctggtcttcagtataaggtcacccctcattagtcccatatcttatatctaatatagtttagactatgcggtgatcattaacttgaagatttgagatgctgcaggatttgcgagtaggaactgggcctatagcaaaaaagggagacaaagttgtggtaaggaaatttctgcatatctatggttttgtatccttggtctcaagtttatctagaagtttgctctggttagagagtttggagtttgctttgcttgtatctatgttagcaaattaatgtttcaaagaccataggttttgctagtagttataaataattgaagctgggtatgttaggttgactgggacggttacacaatagggtactatggacgcatatttgaagctcgcaataaaacaaaagggggttcttttgaggtataaacacgttttggctctttttttttttgtttcattagctacaatgatacagtccttaatctttgttttctttttgtgaatctgtagggcgatgataaggaatttttcaaatttaccttaggatccaatgaggtgggcgaaattccaagtccttctagttgctatatgggttttaccggtttaaagaatggattttgttactgattgtatgaattgtttctttctggatgctgcatgattttggtgttccaggtgatacctgcttttgaggaggctgtctctgggatggctctcggtggtatcagaaggttcaacatctttctaatatttctaactctacacatcctccatatgtttttcatatagaactcactcttcacacaaatggtagacggtagaatgaatcagtgtaaataattagcttggtattgcaggataattgtaccgccagaactaggatacccggataatgactacaacaagagtgggccgaggccgatgactttctctgtgagccttatgtttgttttatgtaaacatgtataagaaagacataagttttaaatgttgtctctttatgtttgcgcagggacaacgtgcattagattttgtgctgaggaaccaagggctcatagacaagacacttctctttgatgttgaactcctcaaaattgtacccaattgatgtaacatcgacagtcttaactcacgtacatatatatttatttatgatgtgtatactacattggcacatttgtgtaaattgagctcagtttatatcatataatgttagctctttttaggagtgttaaaaaaaaaaatagccatgcatcaccaactaactgttcatcatgttaattctgcttcctctttttagttatattatcccttatagtgaggtaagttattataacatttcatagaaagtttagaataaaatgaaatgtgaacacaaaaaccagtgtaagcagcttctgttgttttgactttattgagtagccaatgttggttcaatgtcagagtcatcattaatggagactgcaaaaataaaagaacaagttgcagtgacgcattgtagaagtccttcaatgagtttatgtctttcaaggacaaaacatatcaaatgaatccacatttctctaaataagtcctttcttgaacgttgaaactgtggacatcatgggagtccacgtgcaataaatgccagtcctatatctaccacttaccagctaagctccgtctatttaattccatcttcccattttaagctactgcatttatacatttctctaaccaatcctcatacatccttttctgcttacagattttgtttggctggattaattatttcatttattaacttaagctctcttgctgtttttggtcactctgatgctttcagtttccatggttttatgagaaaatatcattgattatg

SEQ ID NO: 28391 - DNA, 3000 bp, Unknown; identical to SEQ ID NO: 28390
  misc_feature (1)..( 3000): 2750-1469P.txt file - cDNA_ID_2996546; gDNA_ID_2926261; Annot_ID_204740

SEQ ID NO: 28392 - DNA, 3000 bp, Unknown
  misc_feature (1)..( 3000): 2750-1469P.txt file - cDNA_ID_2996550; gDNA_ID_2926261; Annot_ID_143225
aagtagcttattcatactcacgaatgaacattaagatgccacgaagctacataattatcatgttagaacaccgtcattgttctcttcagtattaatagtaaaaaaaccaaattgacgatttctcgaagactattaaaggaatatccgcaaagaagaaaaaaaaacatttttttggtaaaggactaatctttttgtttgcatcggccatctctaaccttacgattgtgtgttcttgctttgagcgaaaccctagaatcggtcttaacccatttgagcagagatgctgcgagtagcaggaaggaggcttttttctgtttcgcagagatcatcgacggcgacctccttcgtcctttcccgtgaccataccctttccgatggaggcaactcctcttccgcttctagatctgtcccctctgcagatctctcatctttcaattcttaccaccggagcgttataagaggtctgccgatctacaactctttctgtctctcgattgattttcatttctggtgttatccattgaatgattcataaatttttaaaagtcacctcttttgggcttgtataagtccggaaatgattgagattcctagtttcgtatctgcgagatgatctatgggaattaagtcatctgttttgaattcttatgatgtgtattagagcttgatgtaccatttcgtctcattcttctccttgctggaatagtgattgatcggatatgaattgaccagctttgagataatccttttttgatgagataatcgattttgacatgtagtttattcattattatggaaatggatgttttatcgtctttgggcacatcatataagatacttgcatcagtaaacgaatctggaattccatatctttaaccaaaagggctatgtttgcaatcttatcttaggagttttcttatgttttaagcatttatgatcattgaagttccttccttggatcttgcgttagatagattagtttagttttcactgaatttgatatcatggtagaaaattgtttggatgacaccttctgttatctcttggaatccgtttttataatcttatgttattctatgcattaatgttaaatgtttgctagtgttattcctttcttctgtgttatctcttgaaaatatttttgcttaatacttggtgttgttgaacacttgaccaagtataaagtttgcccttgatgtgaaatattaatgtttcatgctattttcaggttttgcttctcaagtcattactcagggaaatgagataggttttggttcggaagtcccagccacagtcgaagctgtcaaaacacctaactcaaagattgtctatgacgaccataaccatgagcgttacccacctggtgaccctagcaagcgggcattcgcctattttgtcttgtcgggtggaaggtttgtttatgcctctgttctccgcctgcttgttctgaagcttattgtgagcatgtctgcaagtaaagatgtccttgcccttgcatccctcgaggttgacctagggagcatagaaccaggaactaccgtgacagtcaagtggcgtggaaagcccgtcttcatcaggcgaagaacagaagatgacatcaagctggccaatagtgtggatgttggatccctgagggacccacaagaagactcggttagagtcaagaatccagaatggttgatcgtggttggagtatgcactcatttggggtgcatccccttgcctaatgctggtgattatggtggttggttttgtccgtgtcacggatcacattacgatatatctggaagaattaggaaaggtcctgcaccatacaacctggaagtaccgacctacagcttcttggaagagaataaattactcattggttaatgaataaagcacaacagtccgagtgtcatggtctggatgatcttaaatctgtttttgtttttatattttccggcattttagcgtgcaagttcgctttcctcacactttgggctcagcaaaaattggcttgttttgctgaataatacaaacttgtcattgtatgacttagtatctgtctcatctggtgaaaatacattgttcatacttcatagtctctgtttattatttgaaaagagttttgaatagtatcatccctatttttcttatgtttgtaattttgtaacatatcgtttgtaagagagtttcctttccttaaagtctgtagccattatcacaattgagacaaaaacttggtaaggttcaaggtgtgttataaaactttcgtgttcttactggagacgacatttcgaagaccttcaattctcaactaagccataaaccttctcttccatagtgagaaatccaattgtgaacctcgagactactactttgatgaaagatgtcatattctggttgtggatcttagcctaattttcttgttcagattgttttcatcgatgactacttctttgatgatgtccttctagctctttcttctagtattgaaaagttcacacagatgtaaaacagtctttttgttggaaatcttgtttaaacattacaacaacaaaatatatcctttaccaagtatagaccccctattattattattaaaaattacgatttttatacaaataaaataatttatcttacaaatacacacacacaaaaaaattatatcgtaaaaccaaaagattttattaattaaaattagaaaaaaaaccatgccatcaaaatcctgaagtaaaaaaatatcaagtaatacgcaaaaaccaaaaaaaacaaaacaaattgaccttttctcaaagacaatttttaagggacttactagtaagtagtctcttatgttttgttttgcatcggccgtcccaaacctgaggatttctctgttcagctagagcgaaaccctagattcacatttgagctgagagatgctgcgtgtagcagggaggaggcttttctctgtctcgcagagatcttcgactgcgacctccttcgtcgtctcccgtgaccataccctttccgatg

SEQ ID NO: 28393 - DNA, 3000 bp, Unknown
  misc_feature (1)..( 3000): 2750-1469P.txt file - cDNA_ID_2996554; gDNA_ID_2926261; Annot_ID_143226
gaacagtttatattcgtttttaaaaattcaaattatgacatatgcgaaaaaactctaattattttttttataatgatgatattatttttcggcaaaaatagaatcatataaagatgagaagtgaactataataattaataaaaaattaatatgataatttagatatcaaatctaatttgttgattttaattggttatttttttggaaattaataatgcattttatttttctaattaaattaaattaattaaaatttagatatcaaatcttatatgttgattttgattggttattatttttggaaattaataatgcattttatttttctaattaaattaaattaattaaaatttagatatcaaatcttatatgttgattttgattggttattatttttggaaattaataatatattccgtttttaaattaaatttaattaattaaattagtatttaactttttaatccttaaagagataaattaatttattctttaaaattttatttttaatggcatacctatgtaattacttacaaaaattaaggttacatttaaaaagtacttcccaaataatatagtaggatagaaaattgagaacaacatcttaattcgtaagaaaaatagtatttttttagaacatcaattattttgaaatagagaaaaatacattattgtagagttcaaatacacattaaaaatgatatttttcatatacacatatatacagttaaatttgaatatatatatatatatatatatcaacaataatacaaaataataatctacaagatcttgtttacaacaaaaaaacgagttaagttgtgtattacataacctcactataacatttgaaacttggtaaaacactaaaaacctgagcaaaacaaattaactatcataaatttgccactatctacaggtagtaataagcccaataaaataagtatgagcccagtgaagcccaatgcactaagttattttcttcctctgaccagtttcatctctttgctctcgacaaagcagctgagcgacttttgcacatttctagggttccaatcaaaatctatctgcaacaaaaatggctaatcgtttcagatcagggatctccttcttcaagaccatcgccgtaacagattctgtctcctccgttagatccaagtcgcttttcccagcggtaattcgcattcttaaaaatcgaatcttttcagtccaattttttgttcggagtcgattcttacgagatcagtcgatccaatcgcctaattggattgataacagtatagaatggggattatcgtgttttctcgcttacattgctcggctttagatgttttggaagtcttttaactctatctctgttattttcctgagaatgctatcaatcaatctttaaagtttgtatatttctatcgcagttgagaacttatgcaactgcttctgctcaaacaaccgctaatgttaaggtacacccttttatcaccatcgtattattttgtagatgcgagaatcgcgacaatggcttgaattgtttgattggcataaatgatgaaccgcggatagctggattttgtataatatgtaatggaagtgtatctagatttatacttgttgttgtttcaggtgcctattgctttagttggtgaaaatgggaactttgcttcatggctatacattgcagctgtgaaaatgaattccttggaaaagattgagacggatctttctgagatgattgaggcaatgaagacagctcctatttttgctcagtttacaaaggatccctctgttcctagagggacaagattggctgctattagggatgcttgtgatcaagcaaagtttgccgaacccactaagaacttcctctgtatgtaattcaagtttgaaactgtcttgtttttatgattttgattgaccttgttgtgctgatattaaaagttgtttgctttctgtaacagctttgttagctgagaatggaaagctgaagaacctagatgccattgtgaagaaatttatgcagctgacaaacgcacataggggagatgtcaaagttttggttaccacagtcattgtaagctttagtctcaatacttgttatctcttaaataaccataaactcagtattgtggatttaatcatatggtttggacagccgcttccccctgctgaggagaaagaactgactgagacgcttcaggagatcattggagcagggaagaaaatcactgtggaacaaaaggtatgtaatcagatatgcatcaaaggcttgtgattttctagtaacccataaaatggatataagcatctatgtcaatggtggtaatgtgtgtttgtagattgatccaagtatctacggtggactaatcgtagagttccaacaaaaggtgttggacatgtcaatcaggacaagggcacaacagatggagaggctcctccgtgaacctgttgacttcaacaacctctgaaaatcttgagagaaatttcccccaagaaaacatgcttgtgatgaatgccaccaattgacaaataaatatggaccctcctgggaaacaatataatagctggccacttctctccctttgaattttgtcatttgctttttacatattgttgtttgcttcgaaataaagcttttcgagacatcaaatttcaatgagattgtttttgtttagatttgaatcgttgggctaatttggtaaataaatctacaaactatgcccaagtagcttattcatactcacgaatgaacattaagatgccacgaagctacataattatcatgttagaacaccgtcattgttctcttcagtattaatagtaaaaaaaccaaattgacgatttctcgaagactattaaaggaatatccgcaaagaagaaaaaaaaacatttttttggtaaaggactaatctttttgtttgcatcggccatctctaaccttacgattgtgtgttcttgctttgagcgaaaccctagaatcggtcttaacccatttgagcagagatg

SEQ ID NO: 28394 - DNA, 3000 bp, Unknown; identical to SEQ ID NO: 28393
  misc_feature (1)..( 3000): 2750-1469P.txt file - cDNA_ID_2996554; gDNA_ID_2926261; Annot_ID_204744

SEQ ID NO: 28395 - DNA, 3003 bp, Unknown
  misc_feature (1)..( 3003): 2750-1469P.txt file - cDNA_ID_2996568; gDNA_ID_2926262; Annot_ID_143240
agaagacctgaagaactgggaaatccaggtataccatattcgcccatgtatgcaatatgctctaaacagaaaacttgcatactaaaacttgaatgattgaaacactacgaaaaatgaagtcttttaactcttaatccatccaaaaccacattgtcaaaatacattgattactcatctactggcgaaacatcacgacctatagaatgctaaagacatattgattccaacacatttataagttttttttttgtagaaactaacaaagatgaaacctcattctcattcgaatttaggctctgccaccacgaaatggtatgcaatgaccattatgaagatgaaaatccccagaaaattggcaaagaagccgaggtcttggtcgtcaaacatctgtaacaccacacacaattaacaatatgagaagcttggtatcagacttagacaaaacttgttaaaaatcacccaccaatctacactttcaacatcattttctatgaagatggagcacatagtccaacacaattaggttcatacgtcaggaacaagtttctttaccaaaatcactaaaagaaaataactttgacgaaatccagacatgagtataacatcaaaaacatggaatacacaaaaataaaaataaaaaattgattgaatctcatagcagtaaataaagaaagagttgcatcatcatcacatctataagtaattgatcatatgaaatagattcaagccttaagatctacaaattcgctaccatctgagaatgacgtatccaaggtaaagaccgaaaaaaacaaatcaaatctctgagtgtttttacctttggagagctcaaaagatacagacttccttctttgattcttccctctatcgactctacgaagcagatcgaaaaagaagaagaactgaagaatgactctggttaaagaggtggttgactcaaaaacaaatcgtttggtaatatggtaaacgacgtcgttttacttctcaaaaaaggaaaaaagaaagtgtggctgctgggattcgagcccaggtctccacggccacaacgtggaattcttaccactaaactacagccactttgttgtacagtctataatattaataattatattacaatatgtttaattgctcgtcgttgtctcttcctttcttcttcactgcaattgctcgacgttgtcgcttcctttcttcttcatcatccccgacgaataagagaaccaaatggtcaagctttggatcgccgattcgttcatctgaaaccgggtctggatccgatgacccggttgcatctttgatccatgtgttccctaccatggatcctgaggttcgttagatattgtgtcgtaaagtttccatttttgactgatgaacaatgctactacagtaattgctcttttcatatactttaagttcatcaatcttccatttaaaaagtgctaagttatattgatgtagttccttcatgaaatgaactaggtaacagttttgtgtagctattgattgatatgtcttcatctacagattaacattgtgataaccaaagccaaagccctgcattgcagagaaactttgatgcaacattagcctttgttacttctgtgttgtgaaaaactgaaaattggcgacagttttgtgtagccattgattgcatagaaacttgatgcaacattagtctttgttactttgtgacttgtgttatgaaaattggtgatcttggctgttatgttttgctacaaaagtctttgggagtttattgctaatgtagtctttgttttttggtgggatcttgaattagtttgtcagagaggttatgagcaacaagaattacgtgtttgaagaggcaaaagagagtttaagctcaattttgttcaatggggattctgatagaacagaagctggcttttttgatggatctgtggaaagttggaacgatgaggatatgatcgatggagctaaatgggttgatagacttgtatccgagatgacaaaagcgataaacattgatgacatgaggcgacgtgttgcagtgatcttagaagctttagagagtatcataaagaagaacaccaacgcctcgaagaaggtataaattgatgacattgataatgctcaggttttcttgggcctagataatataacaaatagagagctcccaattcattgcagcttgaatatgcgtcgatgaaggagagtctacagagtttgatcaatgataaccaaatattgaagcgggtcattgcgaatcaacatcagcgtagctctgaaaacgaagagaaggccaaacaagtactgcatttgagaggcgtggtggggcagtaccaagaacaagttcataagctagaggtataactaacttgcctactagaaattctcggaattatcaatcttataaatcagcggattactgattttcccttcgttttcgtttgtggatatcattcatcagcttagcaactacgccatgaaactccatcttcaaaggtcacaacaacaacagacttctttctcagggaatttgcctccagacatctactaaaactatatgattgtttactacatagtcatttatagtcattaggaccttaagaagtattattagtcaactgaatttcaagtcatgcaaattttaatactaaagactttacttgtatggtttgtttgcaaattgttttagggcaattctcattaataaaacaaaaataatttctgtttacaaatttataaccgaagaaaccgcacaaggattaaaccaaacctgttatttaaaccggagaatgtagaaaaccaggaaacgagaaccaaaatacacaagctttaaaccaaactggttatctaaaccggatcaagttttccccgccaaagcaattttcattcccattgttccaaacagtttaaaccctaaacttttccccaattttgctcactaaatctcacgaatctctcctctcgagaatctcctagggttccgattatttctcaattaagatagtatccagctcgatg

SEQ ID NO: 28396 - DNA, 3003 bp, Unknown
  misc_feature (1)..( 3003): 2750-1469P.txt file - cDNA_ID_2996575; gDNA_ID_2926262; Annot_ID_143242
ggctcctacgcggttagcaaaccgacgagacggaccggaattagaaccggaaccaccgcgaccaccggtgttattgccacctccaatgcctcctcggccgcgagatccagtaggttttcgattagatttgatgatatcatcaagtgacatatctaagccacctgacatcttcgccggatcttttctccgatatcgagaaatgtagctagggttttgttgctctgagatttcaaagatggaattacgcaccgcgagagtgagagagagagaaacagatattatcttctcggagaattacgataaacacctcagctttaatcaatattgttttgttgcccttaaactcttacgttttactaaatagacccctgagttcttaatgggccttttggactcataaaaatccagtggcccatcctcattgtccacttcaacttattatatttttttccctccggccattgtcataatcaaagatgtggacaagtacatgtgaagcacacgcattgcctgtatgggcacagtatgtgactgtatcacaacgtacatacacattcacgtattaatattagtaagtcaacccttttttttctttgtttatctcaatttggaaaacaaatcttgccttgctatttaacaaattacttgtaccatgagtgttaaagacatctttataacctgaccagaagattttatgtagaattctagacgaattatgaaatttttaatggttaagtggacttttttattatatgatatacagatttgtattcaaatgatgacacattaattactatacaaaatatttaaatatgttgataaaaacaaaatgtggttaacaaaaaattattgatatctttgatccatggaataataaccgttgcacaatagtattttttgagctgccttttttggcagtaatataatataaggaaataaatagtcaatatcgttagacgttatagtctcacatggtcacatcacttccccatacaaatgagccaatgagccggatgtcatgtgccagtcgccgctaaaaacatgatagatagagtaaatgccttcattattctacttacataattcgactatcctaatatataggtgctagatctagcaatataatctcttctgtttcttcttttttttttttttttttttactgaagcagttacaaatgtaggttggtccattctatttagatttgtttcgttgcatgccaaacaaaataatgttaaccggttatagagtactaaacaaacaaaataatcgctaaatataagttcagctttgaaaagaatatactctcagctaccacgacaagtttgttcaactatcagttttacatcataaagcattataggttttgattgtttaaatcacgaattagtatgttgaaacaataataacaataataaatatggcattaatctcgatagtggtgtgtgtgtgtacctttgtgtaaatctaccacctaacaatgtcattatgaggctctctcagcaatcaattttgcaaggcaaaaaaaagaaagatccaaatctcgtagttggattctctgaacttggaaacgggatgtgaaaggaacatcgatatctatgagcacgggctatgaattaattttatacattctgtattgtttctttatccaaataagtatatatctttctttatctgccggtcaaaaactctgtaaacgaccgatgaagtattcttgagtagagttttaatgattttctttagtataagatttatgctcttcagttgtttaaaatttgtacgagaccttgtttagttatgttaggttttcttctttattttctatcaagaacatccaatgcaggtttgaatatggatgacaaagtcaagtattttcgtctctacatgaaagaaacaaacccacaccactttgattttgttggtttagactatagtcatcggtttagttgcataataacctccctaagttttggggaaaaaatgaaactaattagatggttaattaaatgaaactcgcccctaaattaggagggatttgggtaagtggtaacacattcactggaaacatgtgaagaaaggaggatgtcaagtagctgaaaactcagtatagtaaccaacggcttctcaccaacctttcattaataatttggtcatccctatatttttattcaacattttgtttttcaatagcttagagcaccttaatacctttcagtgtttttttataaaaaaaaacaaaaattgggattaatcatcaatccccaaatgtaacgtttacttagattatgttcatttttctatacacacaaatcatattcttttgttttaatcttcgaaaaacgagaggacattaaatacccctaaaaaaggaggggacattactaccaacgtacattaacatgtttgatagcaaacgatttattttgttcgttttgaaaaggggaaagtaatgtgtaaattatgtaaagattaataaacttttatggtatagtaacattttcgaataataagagagggaaaacactcgccattgtcggcaatttagaaccaatattagaagggtttttttagagaaaaaggacttaaaagtttagagaccttaacaacaacttatttagaaatagacatgcttaagttgacaacagcgagtttattttctatatcgaagaaaaatacgaactttttcttaattagatttcgaatgcatgcactatcgagaatcgaccgtcacaagaaaaaactaatatacatactgtacatatctatattcaatattggtggggatgggtttaatgtgtatttataattcatggataaattcacacaataaggtccatgaaactagaaggtaccaaaaataagcattaatgactctttgccacttatatatatgattctctcatagtaccattttattctcccaaacctatcttcttcttcctctcttgtctctctcgctctctctcttctacattgtttcttgaggtcaatctattaaaaatg

SEQ ID NO: 28397 - DNA, 3003 bp, Unknown
  misc_feature (1)..( 3003): 2750-1469P.txt file - cDNA_ID_2996582; gDNA_ID_2926262; Annot_ID_143246
acttctgggcaatgaaagatgatttttgagggtttcggttttgaatttatacgtttcgtgtaatgatgtataattggatcctgaaatatgacatagatcgatgacgtgtcgttagatgaggaattgttgtcagactaatcaacggttaacgctaaagtcggcggttaatgtgggctttaatgggccttgactaatatatttacataaaataggtgaaaatattttaggcccgttgagaaagtcgccacgtgaatttggagtgttttcttcggaatttaattgattttggtgtttggaacattttaaactaaatacaattattttcttaattaattattcttggtatttaacgctttacgaaattccagtagtcttttccttttttttttttagataaaagttttattttgtcgttttccttttttacaaataactttctaccgtttaattaaccttttgaatatatattatcattatgtttaacataataacaagagtttaccaatcaattcctatgatcacttagcaaataaacttcgatgagtttttcttaggtatatatatgcatgaacaacaatgtaaaaaaaataaaatagaggaccagtaattcagtaccatatagttaatcaaatattttaaaagttaactttattcacatgcaaaagatacgttgaaagtggtaccagctgatggataagttttgtaagaagtataatgtatatttgacattatggtataagtgattttatgaacttttgatgatgtaaactttgtaccagctaatgtgtttccaagaaacacttctttcgacacatacagttaccaaacttggtggtccctaaaaatgttcgagaatccaaccaaagccttcccaaggatgtggggaaactcttaagtacatcgaactcattcctgccttacaaagtatatcaaaatgttaaatgttgttgaactcatattggctggttttggtttacttattctgattggtgatgtactaatgcaaagaaatagtaggatatatattgatagaatggaatggaacaacaggtttgagaaagaaatcatttgtagatatgggggctgaattccatttcatatacagtattaatgattcgattcacgctaggtcgctagctacatgcatggataaactattcgagcataattgttttacgacagtttttctgtctaaacgtcatttgacatatatatttttctccattaactgtttagtgctataaataagcggccatgatatatttttttccatcttcaacgcgattttcttatggcagtattccaattttaaatactgatttgttttgttttccatggataatgatttatttattttgtaggtcatggataatgattctatatgctatactaattacatttagagacaacaatatacattcaaatgtatatgaatagcctaatactgaaattatttgattcatatattcaaacggaaaaggttaaaaaaaaactctgaaggcctgaattggttagtggttacattacccgtccatatgcctggaaatattcgagatacccacacttactcgctcactcatgtgcataattgctctatctcccatgcatctgtgtgtcctcacttgttgtttacgggtggcttttgatataataatattagtataatctcgactaatattgttataactcgatatcattgatggtaatacattatctagccaaacaagttgtttaattgctcttgtaaataaactctcacaaaattttatttgttttgacattgtcactggctatttttggcgggatcactcgtttatttatattaaaaaacgaatgaaaaacattcacatattttgtaaattaagattattattaaagcatatacaggtcaattcttggtaggtggaagtaggtggcattactgaaaggaaaatacaagtaaaattatactactatctaacaattaataactgcattagtaaaaaatgctaaacgatgatgattattgatgatgacccatatgggtcattattacattactatacagattttaactacgtagtgtgggtcctacttcacgtgataaacgacccaaccgccacgtaagcaattgaaggatgcgttcccgtttcgtaaaatctattgcaatctcctctcagccaatcataagcatatgcccacgtgggataatgggccctatcacgagcccattgtacaagtcagcaactgatactagcagtagcacgccgtttagattaaagataacatattttaattattaaagtatttataaatttatcatattgatttaattattttttctcaaaaaaatatacacttttacattatttttttctctctttttggacaaaattaatgctctttttcttattctacttacttctaaatatcatttctcatggtattagcacaattaggcgattcctttgaatacagaaacacgtcaattttaacaaaaagcaaaaagtagcattcgtaaattgattcgattatttgaattattctgtaatcaactacacaaataaaacaaaccctgtccattttaggtcattccgtgactatagcatctatcatccttcaaagaaaaatatcatttccttgtgtttttcttttagatatttttttacttataaatattttaatacccctcttcctatttttcgggtcttgtagcgttttatatatattttcacctgcctttcttctcccatccatcatcatatctctctctaatttctctccgtataacacaaactactctttaataagtatttatgggtgatcataatagctcgcaagcttcttacatccatttggtacgactttatcaaactctttttttttttttccgtttcttgtcaaatcaatctctgatcttgatcgatattttatcacttaaccgatgctgatcatatcataatcatgtgtatatattggttgcaggtgcatcatttgatagaagaatgtatagtattcaacatg

SEQ ID NO: 28398 - DNA, 86 bp, Unknown; identical to SEQ ID NO: 207
  misc_feature (1)..( 86): 2750-1469P.txt file - cDNA_ID_2996582; gDNA_ID_28593; Annot_ID_146709

SEQ ID NO: 28399 - DNA, 3003 bp, Unknown
  misc_feature (1)..( 3003): 2750-1469P.txt file - cDNA_ID_2996582; gDNA_ID_2926262; Annot_ID_204783
tctggatgaacctgtttcaataccttgaaaatgtagatcttgtacgtctctgtgctcttcttcgtcttcttcttcttcttgacaatctcgctcgttcctccttctttcgcgatcttcttctccgcctttggtgctggtgctttctccgccggtttcttctctgccttcggcgccattaatccacgatacagcgattgtgatgaatacttctgggcaatgaaagatgatttttgagggtttcggttttgaatttatacgtttcgtgtaatgatgtataattggatcctgaaatatgacatagatcgatgacgtgtcgttagatgaggaattgttgtcagactaatcaacggttaacgctaaagtcggcggttaatgtgggctttaatgggccttgactaatatatttacataaaataggtgaaaatattttaggcccgttgagaaagtcgccacgtgaatttggagtgttttcttcggaatttaattgattttggtgtttggaacattttaaactaaatacaattattttcttaattaattattcttggtatttaacgctttacgaaattccagtagtcttttccttttttttttttagataaaagttttattttgtcgttttccttttttacaaataactttctaccgtttaattaaccttttgaatatatattatcattatgtttaacataataacaagagtttaccaatcaattcctatgatcacttagcaaataaacttcgatgagtttttcttaggtatatatatgcatgaacaacaatgtaaaaaaaataaaatagaggaccagtaattcagtaccatatagttaatcaaatattttaaaagttaactttattcacatgcaaaagatacgttgaaagtggtaccagctgatggataagttttgtaagaagtataatgtatatttgacattatggtataagtgattttatgaacttttgatgatgtaaactttgtaccagctaatgtgtttccaagaaacacttctttcgacacatacagttaccaaacttggtggtccctaaaaatgttcgagaatccaaccaaagccttcccaaggatgtggggaaactcttaagtacatcgaactcattcctgccttacaaagtatatcaaaatgttaaatgttgttgaactcatattggctggttttggtttacttattctgattggtgatgtactaatgcaaagaaatagtaggatatatattgatagaatggaatggaacaacaggtttgagaaagaaatcatttgtagatatgggggctgaattccatttcatatacagtattaatgattcgattcacgctaggtcgctagctacatgcatggataaactattcgagcataattgttttacgacagtttttctgtctaaacgtcatttgacatatatatttttctccattaactgtttagtgctataaataagcggccatgatatatttttttccatcttcaacgcgattttcttatggcagtattccaattttaaatactgatttgttttgttttccatggataatgatttatttattttgtaggtcatggataatgattctatatgctatactaattacatttagagacaacaatatacattcaaatgtatatgaatagcctaatactgaaattatttgattcatatattcaaacggaaaaggttaaaaaaaaactctgaaggcctgaattggttagtggttacattacccgtccatatgcctggaaatattcgagatacccacacttactcgctcactcatgtgcataattgctctatctcccatgcatctgtgtgtcctcacttgttgtttacgggtggcttttgatataataatattagtataatctcgactaatattgttataactcgatatcattgatggtaatacattatctagccaaacaagttgtttaattgctcttgtaaataaactctcacaaaattttatttgttttgacattgtcactggctatttttggcgggatcactcgtttatttatattaaaaaacgaatgaaaaacattcacatattttgtaaattaagattattattaaagcatatacaggtcaattcttggtaggtggaagtaggtggcattactgaaaggaaaatacaagtaaaattatactactatctaacaattaataactgcattagtaaaaaatgctaaacgatgatgattattgatgatgacccatatgggtcattattacattactatacagattttaactacgtagtgtgggtcctacttcacgtgataaacgacccaaccgccacgtaagcaattgaaggatgcgttcccgtttcgtaaaatctattgcaatctcctctcagccaatcataagcatatgcccacgtgggataatgggccctatcacgagcccattgtacaagtcagcaactgatactagcagtagcacgccgtttagattaaagataacatattttaattattaaagtatttataaatttatcatattgatttaattattttttctcaaaaaaatatacacttttacattatttttttctctctttttggacaaaattaatgctctttttcttattctacttacttctaaatatcatttctcatggtattagcacaattaggcgattcctttgaatacagaaacacgtcaattttaacaaaaagcaaaaagtagcattcgtaaattgattcgattatttgaattattctgtaatcaactacacaaataaaacaaaccctgtccattttaggtcattccgtgactatagcatctatcatccttcaaagaaaaatatcatttccttgtgtttttcttttagatatttttttacttataaatattttaatacccctcttcctatttttcgggtcttgtagcgttttatatatattttcacctgcctttcttctcccatccatcatcatatctctctctaatttctctccgtataacacaaactactctttaataagtatttatg

SEQ ID NO: 28400 - DNA, 3003 bp, Unknown
  misc_feature (1)..( 3003): 2750-1469P.txt file - cDNA_ID_2996586; gDNA_ID_2926262; Annot_ID_143247
gtatatattggttgcaggtgcatcatttgatagaagaatgtatagtattcaacatgggcaaagaagagtgtatggatgctctgttcaagcatgctaatattaagcctatcatcacttccacaggtacacatattatagatagatatatggtagtatggtacaatagtaatttatgaaagataagggttggagaattgattaaatttgcagtgtggaaagagctagcgaaagagaacaaagagttcttcgaggcatacgagagaagacgagaagaaataccgaccgagaaagagacagctcgaagaatccgtgatttgctttcacgaactacaatctaagatcatgacacctacttttacttacatatacatacactcatctatattaccataggcatgtgtgtgtatatgtatgatccgacgattctatatatactctttagacaatttgtattataatcttcattaggaaatgaataattcacctttggggaaatctctttttcagcttagtttaaaatcgttatgatttatttgctctttttcacgttatgatttatttgcgtattacttttctttacgttatgatttatttgtaagttaccaattggatcttaaccattttcaatgtctaaacaatgttattggagcataatatacctgtctttgtgttcatggttttatgtattcataattgagtaaatatttcagttgtctctttaattttgctctttgtactgaaaactaaaatgtagccaagaataactaatatagtttttcttttaggtcaatcaagcatctgtatctatctccatttatgaataactttagtattcaaattaaaataatgatcaaaactaaaacaaaattaagtttaaatatggctctctgtacacatattgagtagttattcatatacttaaaccctttagaatttaaatacataaattgttatcatatgaatataatccatcaacaattaattgtcattgaatatgacgattaccagtttaccaccatcattaagattagcggtagatcatttttactttaattagtatgagtcgtgttttaaaaaaatccaatgctggaaaacaaaagcgtaggacagagatcgaatggtgaagatgccacgtggaaggcacgtggaagcacgtggaaatgttggcgtcactacataggattgcgtgttacgatttggtgatgaccgctaaactgtggtggctatttttgttttcttatctttttcgatttttttggtcagtgttggagccaaagtttggtctgtttggtgaagacactcttcttctttagtaccgcattttcagttcttgattggaccgaccttaatggtccacttgtttttaggatatgtatagtggttttttaataattaggtagaagtgatcatgtactttttataagtattaaaaaaccatttactagaatgcatgattaagagttaaattcttataatcaaacatttatttgggtttcatatagataaaaaattataactaaaagtgaatcaacaaccactttgtaaatctctagttcaatttgttgatctcggacaactgcttgcaagacacctttggaataaaggatgccaaaaagatttcatttaaaccgctttgccaaattttaaggacaaacaagtacttatatgtgaaagccaatcaatcttgtttcttcaaaatatatagattggaatttggtggcttcttttatttcccaacgttgcaaaacgaacaaaaaagtaagaaaagagaagaaaaggaatgataaatgtcaacaacacgaatgaaaaaagagcaaacaagaaaacgaaatgtataaaacgacaatgtactttggaaataccaatgaaaacgtaatgtcatgcatgtagttccaagctctttggcattccgtttcaattctattattattttttgtttgttatacgaagaaaaaagagtttcgacggtccagtttatttgcgtaaccttcacatatacttctttgaacgttaacatctcaatttggtcaatcagactgtattcattagtgtagagggaatcaaaattttatagccacaagttcacgagtataagacgaagaagagtttcaatgaacaaatcaacaaatgatggaagggcttttgtattttagtttaatcaataatgacttttcttttgtatttgataaatgctgatatctaaaaagaaattgcattgtataaccaagaaaaaactatataattcatcaactaaaattttgtagccacaacgaagatgcgtttcaataaacaaatcaacaaatgatgggagaggttttggtcctgaatggatgctgattttctattcagtttttggatttagattttaatttttatattttatattttagtttaaatttttgataaatgctgatatcttaagagaaattgcgttgtataaccaacaaaaactataattcattaactaactatactaacctaaaattttgtagccacaagtttagagtataagactaagatgagtttcaatgaacaaaaatcaacagatgatgggagaagttttgtattttagttttatcactaaggacttttcttttgtatttgagaaatgcttatacagtatcttaaatcataaggaggaataactttttatacgtcacgacaattattattattagagtcgaaattaaaaagtatatgcagtttttttttaagatggattttgacatcataatgttttctttaaaagtttgacttgtatttaacattttataaacttaaaacagtcataattaaactcaataatctttaaaactattttatttaagtgtgtaacaaattatacaaagagcccagcccattaagcttacaaaacaacctctaagcccaataaataatacgacgacgtttaattctgtaaaaataaaattttcctcttcttcttcccttcttctatctatctcaatctcatcgccggcgttagggttgtttttctcaacaatg

SEQ ID NO: 28401 - DNA, 3000 bp, Unknown
  misc_feature (1)..( 3000): 2750-1469P.txt file - cDNA_ID_2996590; gDNA_ID_2926262; Annot_ID_143248
actctttcagctccacgccgtcgtgttctccgatcatctccaaaagaaggtccgttttgccttctctaaccgccgtgtgtaacggcgtgtcgtcacgtcttgccgtcatctgcttcgtcatcgtcttcttgatctctttcatgattgatgatgattctgtttaaagaatctttgggattaaaaaaagtttggcggaaatttagatcgagatagggaggtctacatgagtagatttgaggaagattcagacaagagtaacatgaattctctggacaagaaacaacaaaatatattattacctcttaactatgctcgtggttttggctgcttgtgttatatcacatagacatatcttaaaactatcttaatacaacaaacaacacatgatcaaaccttagtgtccactcgaagcattatttttgtttgtttttctatttgaaaacaaaaaacaatcagatttaggtcaacaaacaaatcatgagtatatttgaataaaatgtttatcaaaaccaacagaatcaactttaaatgttctccgtgccactaattcactaaaatgaaatttgcgatggatttagtcatttagacattttttcaaagaaaaccaaaaaacaattggcgatagaaagtgacatatgaagaaaataataaatgagtctccattattggggttttctgtgtgaacgtggtaaaatatccgacgattatgaatttatgataccaaccaaccatgaaaataacactggtccaaagtgaaaatagatttcacattcacaagctccaagtctcgaaatccaaatatgaatcaacaaatagtgtttgagacttgcatattcgtcttgaccgcatagcgcagtggattagcgcgtttgacttcggatcaaaaggtcgtgggttcgactcccactgtggtcgtttaagactttaagtacttgttcttttctttttcctgattttatctattttggccgatacgtatcagaaattctccgtataaatcaaccatgttcgtttacaatccttcattcaatcgtcccttaactctaaacaaccgaaaaatcaaaatttaccaaagagacaacaaaacccagaataaattcaatatttatgaaatactaatgattttagagaggttgtgtgataacaaaacttcagtacaactaaaattaataaggttggacaaaaagagaggagataacataagccgataatcaaaggctgaatcattcatttctagaagctagagctgggagaatgaaactacactttgatagcgtacttcctcactgggaaatacatctccttcttcttctcacgctctgtcttcaacgaagcctgttaccacaaacaccataagttattatgattgctaatttgctatccaattcaaaagaacattatataattggaaatggtaattcgggtaaagacctgatgcttggtgagacgtctacggatagctcgtgttttcttgggacggagatcaagaggcaagagcttcttgttcttgtatgcctctcttaaagcagatttctgcttctgggagatcactgtcaacacctgagcaatggatttcctcacaaccttgctggatatcaataacacacaactttcaatcaatgacttgtcaaaccgaatccgactaaaccaaaataaggtgttcatcaactacatacaaggcccaaatttgattgatctaagatacatattcgagtcataagctaaatccacatccattctactgatgatatcccaaatgatgatacaaatgcaaattccaaaacagagcaccatatgttctcttactccaaattcttcaattactctaaatctaagtgaaatgtctccaaattggaaagtaacactaaatcctaacaaatgaggatatatatacacacatttcatatatacgtataagtagatatataaaagacatacattttggagagcttgttgggagcgcctccggtgactttagcgacacggaggagagcgagttcagccttgaattccttcaactgattctgaagatcggtctttgatttatctctaagctcatgaaccttaattctcgctatacaacaaaatcaaaccaaaacaaaaacaaatccaatcagaatcacgcaattgaagaatcaaaagaaacgaacacgaattagattaaggattataaggatctgttcttcgtcatacccatcgtgagtgttgagaactgatgtgccgcctatttgctcttttctggctccaaaccctaattttgttgaagaagaaaatttatacgatgcctttgtgaaatcgatttgagttagaaaaccctcgtgattctcttggcaaatataatgggccgtgtaatagcccaatagttatttccacaaaacatgggctttttattaaagaacatttaattgggtcgtcgtatgccgaaaagagaaaaggtgtgaatagtgaaagctaatacgaataaattcgtcaataaaacccataagcatcagattctgattattttttgtttgtgagaatgagattcggaactatcattaagggttggcaaaaagaattggcctttctattttctttttggtgttttaaaaaaatatgattttctaacaaaatgattttttttttcttcttcttctatctaaaagagagtaaactacactgtatttatttgtagtagatggtccaaaaatcgtcagttcaatcgaatcaaaataatttcacacggtttctaggtctactagcaatcaatctctcacacattggtttgataagaatacgaataaacttacttttttctaaagtcgattccatcacccaaaaaaatatctttaactcgaacctaaaaatatgtacatttttaattgattttatatgtgactatagaaatctctccacattttcattgcaaacactaaagactttttcttaaatttcttgtaaaccatacaaaacatgttgtgtgcttctcaagcatcaacaacaaccctttgctcaaccatg

SEQ ID NO: 28402 - DNA, 3003 bp, Unknown
  misc_feature (1)..( 3003): 2750-1469P.txt file - cDNA_ID_2996594; gDNA_ID_2926262; Annot_ID_143250
ttggggaaggtggaggagtgagtctccgaccgtcacgtatgattgggttatgacggtcaatggctcgaccaccgagccggatcgtggctgaagaagaagaagaaggttgtgaggtttgatccatggttgagcaaagggttgttgttgatgcttgagaagcacacaacatgttttgtatggtttacaagaaatttaagaaaaagtctttagtgtttgcaatgaaaatgtggagagatttctatagtcacatataaaatcaattaaaaatgtacatatttttaggttcgagttaaagatatttttttgggtgatggaatcgactttagaaaaaagtaagtttattcgtattcttatcaaaccaatgtgtgagagattgattgctagtagacctagaaaccgtgtgaaattattttgattcgattgaactgacgatttttggaccatctactacaaataaatacagtgtagtttactctcttttagatagaagaagaagaaaaaaaaaatcattttgttagaaaatcatatttttttaaaacaccaaaaagaaaatagaaaggccaattctttttgccaacccttaatgatagttccgaatctcattctcacaaacaaaaaataatcagaatctgatgcttatgggttttattgacgaatttattcgtattagctttcactattcacaccttttctcttttcggcatacgacgacccaattaaatgttctttaataaaaagcccatgttttgtggaaataactattgggctattacacggcccattatatttgccaagagaatcacgagggttttctaactcaaatcgatttcacaaaggcatcgtataaattttcttcttcaacaaaattagggtttggagccagaaaagagcaaataggcggcacatcagttctcaacactcacgatgggtatgacgaagaacagatccttataatccttaatctaattcgtgttcgtttcttttgattcttcaattgcgtgattctgattggatttgtttttgttttggtttgattttgttgtatagcgagaattaaggttcatgagcttagagataaatcaaagaccgatcttcagaatcagttgaaggaattcaaggctgaactcgctctcctccgtgtcgctaaagtcaccggaggcgctcccaacaagctctccaaaatgtatgtcttttatatatctacttatacgtatatatgaaatgtgtgtatatatatcctcatttgttaggatttagtgttactttccaatttggagacatttcacttagatttagagtaattgaagaatttggagtaagagaacatatggtgctctgttttggaatttgcatttgtatcatcatttgggatatcatcagtagaatggatgtggatttagcttatgactcgaatatgtatcttagatcaatcaaatttgggccttgtatgtagttgatgaacaccttattttggtttagtcggattcggtttgacaagtcattgattgaaagttgtgtgttattgatatccagcaaggttgtgaggaaatccattgctcaggtgttgacagtgatctcccagaagcagaaatctgctttaagagaggcatacaagaacaagaagctcttgcctcttgatctccgtcccaagaaaacacgagctatccgtagacgtctcaccaagcatcaggtctttacccgaattaccatttccaattatataatgttcttttgaattggatagcaaattagcaatcataataacttatggtgtttgtggtaacaggcttcgttgaagacagagcgtgagaagaagaaggagatgtatttcccagtgaggaagtacgctatcaaagtgtagtttcattctcccagctctagcttctagaaatgaatgattcagcctttgattatcggcttatgttatctcctctctttttgtccaaccttattaattttagttgtactgaagttttgttatcacacaacctctctaaaatcattagtatttcataaatattgaatttattctgggttttgttgtctctttggtaaattttgatttttcggttgtttagagttaagggacgattgaatgaaggattgtaaacgaacatggttgatttatacggagaatttctgatacgtatcggccaaaatagataaaatcaggaaaaagaaaagaacaagtacttaaagtcttaaacgaccacagtgggagtcgaacccacgaccttttgatccgaagtcaaacgcgctaatccactgcgctatgcggtcaagacgaatatgcaagtctcaaacactatttgttgattcatatttggatttcgagacttggagcttgtgaatgtgaaatctattttcactttggaccagtgttattttcatggttggttggtatcataaattcataatcgtcggatattttaccacgttcacacagaaaaccccaataatggagactcatttattattttcttcatatgtcactttctatcgccaattgttttttggttttctttgaaaaaatgtctaaatgactaaatccatcgcaaatttcattttagtgaattagtggcacggagaacatttaaagttgattctgttggttttgataaacattttattcaaatatactcatgatttgtttgttgacctaaatctgattgttttttgttttcaaatagaaaaacaaacaaaaataatgcttcgagtggacactaaggtttgatcatgtgttgtttgttgtattaagatagttttaagatatgtctatgtgatataacacaagcagccaaaaccacgagcatagttaagaggtaataatatattttgttgtttcttgtccagagaattcatgttactcttgtctgaatcttcctcaaatctactcatgtagacctccctatctcgatctaaatttccgccaaactttttttaatcccaaagattctttaaacagaatcatcatcaatcatgaaagagatcaagaagacgatg

SEQ ID NO: 28403 - DNA, 3003 bp, Unknown
  misc_feature (1)..( 3003): 2750-1469P.txt file - cDNA_ID_2996601; gDNA_ID_2926262; Annot_ID_143253
aactatcattactactaacagggccggtccaaaatgttttgatccctaaagcccaataaaaattgcttgctttaacacaacctaacattaaaccccatacaacataacttggcaaatgctgctctgatgaagatattaatttctctcgtttaggaataagcgaatcctgaccgttttgtatgaaacaaaatatttgtgtcaaaatgacgaagatgaaaaagataaacggaattctggaaaataataaaatattgattatcattgagaatttcgtatcaccggtcaaaaaaagagtttagtttctaactaaaaccctttttaaaatttacaaaatatgtagtagaattgattattttcttaactctttgagtacattattttgtcgtagaactgtactgattgtgaacattattcttaactctctgagaactctatgttgggttttgtttttcttagaaaaaattggcaatggattgggcctccacttgaaactacaaatcagtcgtttcaagacaaagagatctttatcgtataagtgtatcatatgtataaccaaacaagaatcaacaataaaataaagatcaaactgttgctacatataaaattgtaaaatacacatcttattgcatcatctggttcttatttcaatatttcatatccaatgaacaccattccgtatcagatgtttttttcacaattttgtgactgaacccaataaagaaaggtttgcgtctgaaccataagcatctttagaatttgcggttgaaccggcttacgcaatttgggttgtaatcttatcttgagaacatttcttggatataatttgcggcaaaagaaaaaatggatatttcgttcgcattatcgacaacacaaatgagtaggacgttatcgacggcatcaataagcgttgaacatcttttctgacaagttgtagacaaaatgaaggctaagattatgagaacattttttctagaaagaatattaacatttttcgtaagatttttacggataacattaatttgttttataatcaaagcaatatatgtaattaatgagtatgagtttttatgatatattaagatttaaatgtttctggctgttcttgttcctacaaaagccttagtcaagtgtatagatatgttaataaaaggaatagcataaccgaagtgtgccttagtcaagtggttgtttccgatctgcaagataatgtctggtctcaggtttgatgattcaaaattgatatttagcataaatgaacttttttttactttagataataaaatctattgggccggccctggactcaggctctaataatcaaccaggctataaaacgctttacatgtcattttattgctcttattgtgagagccgtgtctgaagacagtgtgagacaccttacgtgtcagcactgtattggtcggtgtgataatgtaaaagctaaaccttcgatgaatccgaatatcttcctgtcgccgatgaagctgaatcgatctcgatgtatctactgctgacgagctacttcgtctagaatcgagtcttcgacgagtctctcttgctacggctaacagacctgtcgctgcttctcttttcggagaactacacaggcgagcttctctcatttcatcctcttgtctctggttgatactgagattataatgattatactattgaagcaaattgtttctccagtgaagtctttgttgagttataaacgaaagatgtgaagtgtgtcaattataatggcggattgtttttgtttctctgttatgttacttcgattagttgatcgttttttttttttttcggatattacacaacaggtgtctcaaattggtgtcaatcttcaaaagcgtggtgtttggacaagtagtaataggtcctcctggatcgggcaagaccacttactgcaatggcatgtctcagtgtcagtgcatctctctaatgggcaggtttcatcttctttctctttttggatcaaagaaagaagcttgcttacttgtgtacctgtgaatctctttgtattgattgttttgctgtcccttgctttgtaaagtttaaaaagttgcaagttcagttaaaaattagttgtgaaatgtttgttgccttgtctttatttttgctagagatatttgcagattcgtgagaacttctctgtaagtataatctcgttgtgttactttttgttgttgttgttgcaggagatcctgcaaatgatgcattaccgtatccatttttaagccaactcttacaaaatggtaaaaagaaatcaggtgtatattgtttcttgacattgatcttagtttgtcttggtttgtctcatcttatgactatgatgtggtagcttgcatgttgtatacggttgatacacacaagcttgatttctctatgtgcacttcttgtagttgcgtatgaagaagaacagtgctatctatctagattctagagtaatttgtatataataatagagtactaccaattgatactgagccttaatgggagcatctacttgtcttgtgttgttttctttttctcttcaatcattgttctgttatcgtcattagtgtaccttccttgttaaagccggattgtagatatcactgaatccatgtttcttatatatatggctttattgctgcagtgtcttttattatgataataatcacttgatacgtggtaatatctatctataggatgttttcacttcttgtctaatgtctacttactatttattacgtggggttttcttgcaggaacttgcggctacttgtgccactgcggttaagtcaagtaagcatgtagatggaagaatagtgaccagccgttgagtcaagagtgcagacaggtagatccttgcgctctcttggtcaactgcagctacttactatcttggatccttgccctccaaaactgctctgctaaaacgttggtagctctctgggaagatgaggaactaaagtcattggctcctctggctccctcagctatacatggaagaccatg

SEQ ID NO: 28404 - DNA, 3003 bp, Unknown
  misc_feature (1)..( 3003): 2750-1469P.txt file - cDNA_ID_2996616; gDNA_ID_2926263; Annot_ID_143259
atggggatatttcttgcggatttgaggaatctttggttgaagaggatgcagagaacttgcagtttcattgcttcttctacgttgtccagaagcttctattttgtgagaatcattcagaaacttgtgctcagaactcttcaatacctctgtagttctgttatacggtttaagcccggtggatgcttcttgagatgcaagaaacgtttcattttcagcacttttagtcgtatcattggattttctgaattcagaaatagtgctgtttccaggtgaaacaatagatagtagtactggagagagctcaaaatactgaaggcctgaaacgaaggcaacaaccagaaccatgagaagaacaactctacaggtttccacttggcctataaaccgcaaaacccgactttgatccatcaaaacctggaaacaaattattaccttagatttccagtgatataaatgtatctcttcttcctgaaataagttgcagaaacagaacttgatcacttacagagatatcaggtaagagcttgagatgatgtttgttgatatatagaactgtcgaatctgagcgtttctttgaagttacttggagtgatcatcaggagaggaagattcagacaaataattaacaggcaaagagacaagacaaggcaatcgatggctttaaattttgttcaatcaaagtcttgactaattatgtatttttgtagatattttgtattggactgataagccaacaaggtatgataataacttttctcaaattatcagaagacaccccttaattatctatgtttgatcaattatgacccatagttttatttttttaagagcagcctctgttttttttttcctactattatttttgcaacatttaaaccatacctatgaacctataataatatatatattaagagcatctccatcgggagtttctggatcagaatgtctattaaaacagaataaaaaattcgaaaaaggtggagagagagtaaaaacgtttctcatttgagaaactcaaagaaacctatttttgcttttgttttgttttgattggttcaaaaaataataaaaaaattaaataataaaataataataaaatttatattattttataaaattgggtttctcaccgatggagatggtctaaccactctgttaacaaagtactaaactttgttagtggttaagttgacctgattagtatacattatatctgaatgtagtaactacacaatccaagaaaaacaatgaatgtataatttaacgttcgatatgtatatatgaatttcagtgtcagcgtttgcgtcccgcactctcctctgcaacgtgatccaagcatcggaagttgcgaatttctgtgtttcccacaagagaaattaaatcctcagcatcatggtttttttttttgtaaatttaatattcttgtattagtataaaaatattgttgttgttaaatgtacagtaccttgtttaaaattatagtattaacaattaatcaatcacataacaatcaatcctttaattaacatcctcaacatggccgttggctcgtgccaaccccatcctccacttcctcatcaacgtaaggagctaaattcaaataacaattaccgtggcagttctcgttattatcaccaacattaggattcttactcgatctatttgctggccaccgtgcacggcataccacacagatggccggccgccgtccacgactctttctccacgccagcatgcattcatcatgaaccttgttcttgcatactctgcacttcaccaccgcggtttccttctccttccctccaccatttccaccgtctacgttttctattgcgataatatcgtctagacatattggacatgttgccggctcttcatccacctcattttcctattcaatataacaaatgatatatgcatgtaagatctatttatatcccctaaaagtaaagtaaaattttatttaaaacattggttatttaggagtatttgtttagcggtgtaaaacaatacatgtagtttagatatatttttatgtaaaacgacgtaataaatttttttaacaaccatttcccattacaacgacgacaattatattcgtacagggtaaaagaagattaccattttactggtggaggaggatgagttagtagtatagccgggttgagaagtggtggctgggaaaagctgaagaaaccgttgttggaggcggaaactggcgaggcagtcaggccgtgtcggggcagagaagaggtggaagaggaggcatgtccggagtctccgttgcctgagacacttatcgtcgagaggaattccaagaactcggattaagacaaacaagatgtgtttgcacggcttcttacggtcgggacaagtgcaagtaggtgtggccattagcgtcactgtgtagacgttacacgttgcaccaagaacgtgaaaagttcctgcattaggacggtggagaagacggatccggtgacggagagctcgaagtatcctatctgccaccggttgagccaagaaatgccgttggtcacggttacttacgtacggggatatttgattggatccgacagattccatgatttttgagaattccgttacggcagttggagaatttatgcgagatatatatattcgtgttaagtatataggtacagttacttatacatacacgtcatgtaatctgtgcggagattctttgtatgaaacgttggcacacgtgtggaataacggcgacgtgtaggagatcacaaagacggcgttacacggaaggtaaagtttacttggtttactggatcgaaaattaaacaattttagacgtcgtgtggtttttggtatgactgtgggacatcatgccgtttgtctgtcattgactttttgtttgataacgtcgtcgtttttggttaaacctcgaaaaacccctctctctctttcttgctcttgttaacctagaaatcaaaatctcagcttcaccattcgtttcgtttttccggcaaaatg

SEQ ID NO: 28405 - DNA, 3003 bp, Unknown
  misc_feature (1)..( 3003): 2750-1469P.txt file - cDNA_ID_2996619; gDNA_ID_2926263; Annot_ID_143261
acttcctccatttcatggcctttttctcttacctcccgattcgtagctccgccgcaccgtacacttctcatcgactcttcgacagagaaatccaagcatttctagcgtttcttatgttttccgccattaaggtttgaattttgcttaaatctctaacttcattgtttcctgtttcaccgatttcgtttttgtagatggtgagggaggaaacatgggaagctttcgttgctgatagtttactctatgctaaggtaactctagctgatttcagattctttgtcagtcacttttatgattcatgtgaaatctactgattacacattttctttgcctagatctttcttattgcggtttcgttgattatggattatcgagtggcggtctggtttagtatcatattttcaggtcagctcaatttctatatcttgattaaatatatctgaaaatatatgggagatgcagatttgaagtttgattgatttgaatgtttccttttgcagttatatatctattagctcaacaaccagcatttagtaaactaggtatgggaagattcttcaagttcttgctttaagttgtgtttttgtaaaatgcttaaacgttttgcaggaactgcgaagaagctaacacctatgcagttggaggatttgttatcagatggtaacacaacaaaatactggttggtatgtggctacttggctttattcttctacttgataatgttgttgatcttttcaagttagtgagcttgtgatagcagatgatacagttgataaaccaaggactagtttttttggtagctaaaatgatttgattatgtttagcagtgcttacactcagattctagtaaagcataaggtctatgaagctagatttatatagcctccccttactattttgacatcaaattttgtcccttttttttggttaggtgtcaaaccaattaagaaacagaactgatctgcaacatcttaattagtgaaagctcaaaagggtactgttgtaactattatttatgatgatgtgctttcacaccttttgcagatagaattctttgcatgtagttcatccaagtgtgttcgttctagccgttgctttcctgagctctccatcacgtaagctttgtgtaaagaaaaaatatcccaatttcactgtttgtctaaagatacacgctcactcaccttccatttcttcaggtactcgaataatcttttgtcttttggaactgtcgatcttggacttttccctaatactgcggcaaagtttggaatatctcttgctggtaacagtccttggcgaactcaattatttgcacaaatttagaacacattgagtctttgttatgggaagcaactgatatcagtgttgtgtaacatatgtaggtggaatgtctcagcttcccacatacatattgtttgaaaagggtgtcgaagtttctcggttcccagacttttatgttgacgctgcaccttctttacccataaccaaggtttgcttcgacccacttgccaagaaatcaaatttgcaacggctgcaaggctttaatgtaatcccttaatgttgatattgcagaaacttttgtgtcaacattttgagcttgatcggcttctgctcgactatataaacggaacatagctggagaaaacgagtaaacggatatacgactatctggcttctcctgcaagagcagtatgaacacatcaacacaccattggactaccacattcgtatgtttattctcttttagtggggatatttggtgaggctctgccagagaaaaaaggacagattatattttagtgctatagagagatagaaagattctgttgaaattttatggggattgagtttcgacaaagaattcttgaatacgatggtaaaatgaaatctcaatttctgactttgaaatttaatgcctttcgttttcatgacttttaagacttgtcggcactcccacgtctctaatgtacttcctatatatccatgtgtggactaaaactaacatcaatcaaatgagaaaaaatcgaacacaaaaaaaaagttattttgatgataggaattaatgatggatcgtgcggcgacaacgttttccaaacattgtgtgtatacctaccatttattttcgtaaaacattccaaaattgttatgcagtgaaaggaacaataaacaagtagtatgtgataaaaagcatcgttatctttaaaagacgtgtgattaagagttgatgaacaagaaaattatacacttggtaaaggtgttgcctagtggcagagtctggtcaacatgttccaatgcttacaaattcccagttaagccattaattaatgattgattaaaaatcccttggctctgcttatttctacactttctcgtctctatcgttttatttacatatataagcatataataaatacaccatcatatgaagatttgtataataaatatgagattagtacaattcattaaaaaatataagaatgtgtcaaaatcttactaatcaaatcatcatataaggcatacaagtctccatttaaggaaataatataatttttgttataaagaaaatcagtttctcaaaacgcggtttttgagccgagtcgcaagtaaattaatttaaatcattaaatgttggaagtaacggaccatatatccaacttaccaacggttcccgaccgaactcacgcagaaacaccgtatctgcaccgtccaaatctctgacttaatcgctcaacaacattactacatgatctcgttagttcaacaaccaatgagatatagccacgtagtcactcacacgatcatccgccactgcatcagattaatgaaaacttctgatttttgtcgtctttcttctaactcattgaagtattcacccctataaattgagtcccaccatttcccccaaatttctgacatttttctctgttacacgctttccttcttcttctctttctccgatttttattttttttactatttgtgattttgaattttccggcgatg

SEQ ID NO: 28406 - DNA, 3003 bp, Unknown; identical to SEQ ID NO: 28405
  misc_feature (1)..( 3003): 2750-1469P.txt file - cDNA_ID_2996619; gDNA_ID_2926263; Annot_ID_204822

SEQ ID NO: 28407 - DNA, 3003 bp, Unknown
  misc_feature (1)..( 3003): 2750-1469P.txt file - cDNA_ID_2996623; gDNA_ID_2926263; Annot_ID_143263
aaaaacatgcgtcaatttaaaaggaatttattgggaggaaatcttcccaaaagagcgatgatcgcctaaaaactgatgcgattttggtttggatacgtagttggcacgagcatacgatccaagacgagtctcaataacttacatcacgcgaagtcactgaaaccgttcaaagcagtgatcgctgtggaacttgttttaatttgtatttaccatcatgccgctatcaaacttgtgcaccattctagagaagataatgagtaatgacaaacaagtagagtattgttacatgaatgttgtttgatttccagtacagaaatcatggcgtttatttaggttcaattgttataggttttgctcacaaattgcttgaaagtatcacatgaacttgtcctcctcctttgatcataactttgttgtaaagtctaagtttgatagcgggccatgccattaaatacacggacgcaggggtttggtgtcattaaagtaaatcctcgtattgttttatgtcttgttcgtttaagtttctaatttgtgatcagaagaaaaaataaaaactcataacagggaactataattaaaactaaagaagatttaacgtacattgattttacacagtagatttagttttcttttgtaaatacacattatatatttttattcaacgaaaacaatatcaattgtctctacaaaaaccaacggccagtactcttttgccctaaaaagaccgtaaccctaattttcacacagagaatctaacgattcaaaacaggaaaaagagttagtgatcacgaaatggagagagagagagatatatagtcagacatgttttatttaactgtgttttagagctgaactggatctcagctaaacacaaaaaatttcaagaaagtttaatcttaatcgtataatcgaaacaaattcctttccggtattaccgaaacaaagaagccatcatagcactcaacttgacaacatatcgcttacgaaatcttcccatggtctcaaacacatcctcggaagcatacgctaaatctctagattcacttgacaacaaagacggcaaaagcttcatcgcaatggctatggatcttcttcctcagtttctgcatactgacatgtcatgcatcggtatgtgaggatttctcatgagggactctttcattggttggtgataggctgatagctagggtcgattctagatgatggatttattattagtaatataggttttatttaattgtgtcttctttaccaaactcgaaatttaaaaaaatctcagataagagctaagctgaactggatctcagctaaacacaaaaatcttcaagaaccttttgtctaagtacagttctagatatgtagatttatgatttacaatttctagattcataaattaagcttctacaaaacgggcgcttgtacattttctaactatttttcttataacttgcttatgttttccatatattttgcatagtttttttcaacttgttttcttttaatcttatttcaaaaaattaaacatatcattagatataagctttttccacttagaatgtcgcataactacttactttttagaaatatttctactaaacccaaatagggtaaaaggggataacgctgataccactttaaatttctaatctaaaggtgacgttttattatgacagagaaaatacgaaatagacgatattatgttatatagcaagccttttgactttatagaagtgagaagcgaggattaaggggtcaaaaaaatgaaacatatatagaaagtaaactttgaaaaatataggagttggtgaagaaaatgaacatgttggagtcgaggattccctaatatgttctagaaaatatgagcttttagcaactataaacgcgtcttggtccatcttagcttactttttgtatgaacgcaagacaaatattggaatgactgcaaaataaaaaaaaagcgaaaaccaaatattggtcaatcgaaaagtaagtggagacaataaaaggcgagcaagaaaacctcaatgctttcttattttaaaactattgaaattcactgcaaaacaaaaacaaaaaaaatgcttatttcaaatcggacatatgtgcttacgactaatgaataattaattcaatccatgcactagcagcaatccttatccatgatcgttaaattaaattattactaatagactttaagcattccttacactaataatgacagtttggtacctatttgaggtgggtttttactattacatacactaaaaatgacagttcggtacctatttgaggtgggtttattctctgtaatagtttatttgaaaatttcactcttcttaaattagtattaaaaaaaatcttgttgacttatataaattcaagttggggggtccaatatggctgccaagtttgatcctccgacaacattcccgcagcctcaaatacaattatttgttttttttttccctttgatttgtgacattgtacaattattatgatttgtttctattatcatcgtatattcgtacatttaaaaaaataaaaaaaaggggaaaagaatcatttacataaataacaattcataatgtaatatcgcaccgagttttatagaagtctacacatatctaatctcaaaatgaaagtggcttacatgtttcttaaacttttattaaatttgttatatgtttggtgggaaaaaataaccaataatgaaaaagtgaaagttgtctacacgaggtaatggatgaagagagggacctacgacgaaggatgactccgtccacgttcttcttcactgtttgacaataagctccaattttcagacttttcatttcaaacttgtgggtctcattttcctctggcctatataaatccactatcctccacttctgtctttcatcatcattccacataaacaaaatatcttcttgctcattattcatcatcaatctactactccgtaaactttgcttcctctgtttgtattagctcagaagagatatg

SEQ ID NO: 28408 - DNA, 3000 bp, Unknown
  misc_feature (1)..( 3000): 2750-1469P.txt file - cDNA_ID_2996634; gDNA_ID_2926263; Annot_ID_143266
ctttctcacgttgattcccacatctttcccatttggttcaacatactcaaaacttgtgagtgactacatggatgacaaagatctagtcagtaaaaaaaacacaatcttagagagaactgcatatcaatatgtaaagagaaataaactgacagatatttggtaagtatgctcaataatctcatcaaccgctcgttctgatccattcgaaatcagataatcaataacagccaatgcctggcaggaaatgaaatagaaaaacctcaggacacaacaaaactataaacttccaaatacagtaggaaaacgtcaagaagatactcaccttgtagacatatcgccaatcttttcctgtctcacttagtctagtccacaaaacactcataaccatctggcactccgagctaaacatatggcaagtgcacatgttaagcaatagcaaatcaaaaaaatatttccaagtagaatcacgaaaatgaagccagagattacaatttcttcgtggcctgagctatctctgccaatgcagtaccatggggaccccaaggctcattatctgtagcatccaatacctgtactaaacatagccatatataattatgaaagggtatcacataatactgaatttgaagagatgatcaaactcaaaatccatgaaacattgccgccaatttaagtttacatgacggctcaagcttatcttctatagaaatatgaactcgatatttgtgagtcccaaagatggatctaatctctaggaaatagcaactgtgaagaaactcagcatccgaacacagaaacataacaaatccagctcaaatattcaggattagtgtcgattttcgatctagcaatttttattttcgtgcaatagctaaatctatagaaagttttcgatcattttgcctagtaatcatggatacaatttgcacatatggatacgaatcaaataaattcaccttttgctccatctcagggaccttcaaaactttcagattcacctccctttttctgtaattgaaaacgaatcgagatcaatcgaaaaaatatataaaaccaaagatctacggatttggatcgatagagaaaacggaaaacccacatctctcgaacagtttgatcgaagaccttcatgaaatccatttggaatccgcgaaaatgttatgaacaaaggaacgaaaactggcaaaattttggtgcgaggagaagtgtagatctaatcagagatggctcgtctttgtattatgagttttttttttttcaatgaaaggcaacaacaaataaaaagttagcagctagaaccgattttctcgcgtaattagtttttaaaggcgtcaaatgactgtaaattcgacctgaccgtagcctgatccgcagtctccgatagtcacggctattggtgggttgttcaataacctacatgtatacaacaaaaaaaaattgaatccatttcgtttcagtaaataacacaacgagttttaagacctaaggtaaattcttcgaaatattatccaaatataatttatccgaaccacttcacgaaataatttagttgaatactttaaagcacttcaacgaaatggctccgaatggattatatatataatttttccagtaatgaatgttgttagtgaagatcatattactctcttctataccttactttgtaaacgttttaagtttaatgcaataaaatccttttctgggggaaaaaatataatccagttgaatattgttggtcagataagattaagtttataacattatatacccatttttctatattaaatatatctactacaattgtcttattgaagaagtcagcatgatgagtcatatacgagtcaaattgcatttgtttttaactctggtaccaaccaataaaccacgtaatatcagattatacatcacgtatcccactagtttaaattagtttttgctgaccatgcacaatctcttactttgaacatagagtgtccccaatacatgtagtctaatcactaaaatctaattttggatttcatatgctttgaagctataaagttgtttagaaattagcatacacaacagtaccttatcattttgggtgaaccatacattgacattagaaaaaaaataccattttgcatttagaacgtgaaaatcgaagtgattgaaagattggtgtgatggattaaaatgttggtgttgataatgctgctagttttctattgggccagccagatttgtttaatttttgtttttacttcgtccaggtcacacgcattctgtttctcaatatcaaacaaaaaacactcacgctcaaatcttggcgcgtccatatcaaactccttcacaaacagggcccatcaaagcccaattcttaacacctttcaatgtccgaacgtaactcctgacgttttaaaaattttaaaaaccaagtcattaaccccttaatatccaacagcaaagcgagtaattaaacgtagttagacacgtgtcctaatttaattcgatgtcaaaataaattaggataccgctgccacatccagttccatgtgaaccacgatgcacagtagtatttccttttagagcaatctaaagaatgacgtggcgtagtatgatttgttaagatttacctgattacggtgaacttgcacgtaccagatcgtaactactctccgttccaacctgtgttttcttttcttcttggaagctcccttccctctctttctctctcctccgagaaaggaaaagcaccacttctctctctaagaccccatttttcggtgaaggtttatgcgcttttcttcttcaacgagacgactaaaatacgtatacatgcgtatgttgatgtatgcataagtgttgttgtgtgttggagatttagaagagaaggtttgtttgtgaatttgtgtctctgaggttggtttttccagtttattcttctcaatgatccgaattggggttgaatcgaaaaccttagtagacttcgtctgtgatgactcttgatactagtggatg

SEQ ID NO: 28409 - DNA, 3003 bp, Unknown
  misc_feature (1)..( 3003): 2750-1469P.txt file - cDNA_ID_2996638; gDNA_ID_2926263; Annot_ID_143267
caagatctaaattctttcgaaatatatattgtcataaataagattcatgcttaatcacatacttccaattgagaacagaaactcacatttctagaatattattatgaaacgaaagtgcaattttgtatcatttctagaaactcaacttgtcctaaggtaagattatgatcttaagaaaatatcaggaccaagcaagtactgtaaattttgcattccctgctgactataagtaatttaaaatatatgcatttaatctaattaacagctagtgaaagagagcatagaaacgaaagttgattacatcttgtatgccttgatgtagatgctgccaccagatccaccaccgcctttggctcctccatagcctccgtttgccaaaaggcttccgttaacatccagaagctgcagaatatccatcttcactttcccacctcctcctcctccataatcaatctctctactagttgaccctcctttactaccatagctccacggcttctgcagagtcgaccaagagtatgcatcacctccccacacatcttcaggtagcttcttagtgtcagtcaaacaacaagcgcctctaccaccatgtccaccaccagcaccatcaatcccctgcggtgtcccactggtctgtggcggagggctcccagctaaccccgtcgtgttcaccgccgacccattagcaaagctagcattaccagctgtaagctccaatgtcccagcgacaattgtagattccgctcccaaagagaagtttccagaaacattgatagctatagaacaaccagggatcgggcagtgaaacctaacaccaggcaggatgataaaattccccttcccagctatatacacatcgtgcgtaaggttcaaatcggcgacaatcttacaagtagtatccaaaaacccaacgccgccgagatcctcgctacaagataccgacggtccatgcggtggtggcggtggcggagcaggcggagagtagtcctgatggaaaagtaacgactctgaatctgagtccaaatcggaatcagaacccgatttcggttccacaatggtaaatcgatagcttgaactagggtttacggccaaaaccgcaagagcgaccaagacgaagacgcagcaaaattgaaatcgagccatccactagtatcaagagtcatcacagacgaagtctactaaggttttcgattcaaccccaattcggatcattgagaagaataaactggaaaaaccaacctcagagacacaaattcacaaacaaaccttctcttctaaatctccaacacacaacaacacttatgcatacatcaacatacgcatgtatacgtattttagtcgtctcgttgaagaagaaaagcgcataaaccttcaccgaaaaatggggtcttagagagagaagtggtgcttttcctttctcggaggagagagaaagagagggaagggagcttccaagaagaaaagaaaacacaggttggaacggagagtagttacgatctggtacgtgcaagttcaccgtaatcaggtaaatcttaacaaatcatactacgccacgtcattctttagattgctctaaaaggaaatactactgtgcatcgtggttcacatggaactggatgtggcagcggtatcctaatttattttgacatcgaattaaattaggacacgtgtctaactacgtttaattactcgctttgctgttggatattaaggggttaatgacttggtttttaaaatttttaaaacgtcaggagttacgttcggacattgaaaggtgttaagaattgggctttgatgggccctgtttgtgaaggagtttgatatggacgcgccaagatttgagcgtgagtgttttttgtttgatattgagaaacagaatgcgtgtgacctggacgaagtaaaaacaaaaattaaacaaatctggctggcccaatagaaaactagcagcattatcaacaccaacattttaatccatcacaccaatctttcaatcacttcgattttcacgttctaaatgcaaaatggtattttttttctaatgtcaatgtatggttcacccaaaatgataaggtactgttgtgtatgctaatttctaaacaactttatagcttcaaagcatatgaaatccaaaattagattttagtgattagactacatgtattggggacactctatgttcaaagtaagagattgtgcatggtcagcaaaaactaatttaaactagtgggatacgtgatgtataatctgatattacgtggtttattggttggtaccagagttaaaaacaaatgcaatttgactcgtatatgactcatcatgctgacttcttcaataagacaattgtagtagatatatttaatatagaaaaatgggtatataatgttataaacttaatcttatctgaccaacaatattcaactggattatattttttcccccagaaaaggattttattgcattaaacttaaaacgtttacaaagtaaggtatagaagagagtaatatgatcttcactaacaacattcattactggaaaaattatatatataatccattcggagccatttcgttgaagtgctttaaagtattcaactaaattatttcgtgaagtggttcggataaattatatttggataatatttcgaagaatttaccttaggtcttaaaactcgttgtgttatttactgaaacgaaatggattcaatttttttttgttgtatacatgtaggttattgaacaacccaccaatagccgtgactatcggagactgcggatcaggctacggtcaggtcgaatttacagtcatttgacgcctttaaaaactaattacgcgagaaaatcggttctagctgctaactttttatttgttgttgcctttcattgaaaaaaaaaaaactcataatacaaagacgagccatctctgattagatctacacttctcctcgcaccaaaattttgccagttttcgttcctttgttcataacattttcgcggattccaaatg

SEQ ID NO: 28410 - DNA, 3003 bp, Unknown
  misc_feature (1)..( 3003): 2750-1469P.txt file - cDNA_ID_2996642; gDNA_ID_2926263; Annot_ID_143269
agatcatatacttgtttgtgtgaactgagatgtgtgttttgctttgattttgtgaaggatttcaccaatgtagatatgggtacaagaatgtatcagaccttgaatatgtagttgatggatatgcaaaagctggaatacctcttgaggtgatgtggactgacattgattacatggatgggtacaaagacttcactttggatcctgtaaatttcccggaggacaagatgcaatcatttgtcgatacacttcacaagaatggtcagaaatacgtgctgatcttggatcccggtaaacattcgtatactatctctagtctctagtgtcttcatcaatttgattcaagccattaattctataggtattggtgtggatagctcttatgggacatataatagaggaatggaagctgatgttttcataaaaagaaatggtgagccttatcttggtgaggtttggcccggaaaagtatacttccccgacttcttgaatccagctgctgcaactttctggagcaacgaaatcaagatgttccaggagattctccctttggatggtctgtggattgacatgaatgagttatcaaatttcataacttcgcctctatcctctggatcttcactcgatgatcctccttacaagatcaacaattcaggggataaaaggccgataaacaataagacagtacccgcaacatctatccattttggaaacattagtgaatacgatgcgcataacttgtatgggctcttggaagctaaagccactcaccaagctgtggtggatataacgggaaagagaccgtttattttgtcaagatccacgtttgtaagctcggggaaatacacggctcactggactggtgataatgctgcaaaatgggaggatttggcttactcaatccccggaatcctcaactttggcctgtttgggattccaatggttggagctgatatttgcggtttctcacatgataccaccgaggaattatgccgtcgatggatccaggtagagtgattaattctcagacataacctgtagatttcttcatgagttcatgatctaactctggatcttagattatcagcttggagctttttacccttttgcaagagaccattcgtcccttggtaccgccagacaagaactatacctctgggattcagttgcttcttctgcaagaaaggttctcggcctcagaatgagactgctcccacatctctacacattgatgtatgaggctcatgtcagcggcaacccaatcgcgcgcccgctcttcttctcatttcctcaagacactaaaacctatgagattgattcccagttcttgattggtaaaagcataatggtttctccagcgctgaagcaaggggcggtagcagtggatgcatatttccctgctggaaattggttcgatctttttaactattcctttgccgttggtggagattctggcaagcacgttagacttgatactcccgctgatcacgtcaacgttcatgttcgagaaggtaaatagtatattctttgatagccagtttttaatagccagagttgagcttgaaccgcgtgattttggtttaacattgtgaataggtagcattgtggctatgcaaggagaggcattgacgactagggacgccagaaagacaccgtatcagcttctagttgtagccagccggcttgagaacatctccggcgaactgtttcttgatgacggagaaaatttacggatgggagctggaggaggaaaccgtgattggacccttgttaagttccggtgctatgtgaccggaaaatccgttgtactgagatcagaagtggtgaacccagagtatgcgtcgaaaatgaaatggagcatcgggaaagtgacgtttgttgggttcgagaacgtggagaacgtgaaaacgtacgaggttaggacaagtgagagattgaggagtcctagaatctctcttataaagacggtttcggacaatgatgatccgaggtttctaagtgtggaggtttctaaactgtcgttacttgttgggaagaagttcgaaatgagactgagattgacttgaagaagtatataaagtataaaacaatattgatgggaaattgtggatgcttaatgaataaggagtgaagaagaacatttagtaaagaaaagatttcatgatttttataaactccaaatcacatagatttgattttttttttttctatttttgagaaacaaatgtgacacaattaatactagtggattaaatttctaaattatggtcaaatcctttatcaatgtaataaaattttaaaggaaaccaaatcagaaagaaaaaaatgaacgtcagatatgattccgatataacccaaaaagtctacgctacaacagagcagcggtctagtctaacgcaaaatccgtttcgtcgtcttcctcgctttacttttcaatctcctccttctccattaatcatctctttctctctctcacggattcgtaagttaatctcagtgcttctccgtcatcttcgcattattggttcttcctttttccctgtaagctcgacacgtggattattcctctgctttttttgttttcccttttcgtgaagattcgtttcctgtatctccgtgaagacttgatggagttagtttcttaaagtagctccttcttagatccgagtttcgatttgcttcactggtgaagaattagtgattgattcaactagatactatcgatttcgttggatttgtactgaaaacttggctgattttgttgattctgtcttgctggtgaagtctcaagctacttcgtgattagaggaggagatctggatttctagttttagcaattcatttgacttccgagttttccagaatcattgaagtgttaggcttacttgattcagattcagaacatagctttagataacgttagaagcagaatcagaatctgcaaatcggctctttagattgctgctactagaaatttgaaattagcttttggtagtgttaaggatg

SEQ ID NO: 28411 - DNA, 3003 bp, Unknown; identical to SEQ ID NO: 28410
  misc_feature (1)..( 3003): 2750-1469P.txt file - cDNA_ID_2996642; gDNA_ID_2926263; Annot_ID_204831

SEQ ID NO: 28412 - DNA, 3003 bp, Unknown
  misc_feature (1)..( 3003): 2750-1469P.txt file - cDNA_ID_2996646; gDNA_ID_2926263; Annot_ID_143271
ttgttctcatgatggtgattatctccgtcgttgcatcggcacaatctgaggcaccagcaccaagtcctacttctggatctagtgcgatctcagcgtctttcgtgtcagctggagttgcagcagtcgcggctcttgtttttggctcagctcttcggatctaagttactgtgatggtgatttcgtacagagattgtttttgcggtataggccattcatcattattcgtcgtctcgtgtgtattccgaagcagcttatagatctcattttctatttgtccctcttcttcttcgttttctatcttaatcttcatatctgtatgaggatattactatttctttttagagtatttgtggttttgtgattttctagacgatttcttagttatgcgatatggtttttgatatgatatgaatcttattctatttatttatatggatttctcttgagatttctcttttttccttatgctaaatcatttctcaagcatctggttctgctacgattcatagttcctggagaatcagaataaattccaaccgatctaaatcgaatgaatccaactaaaattgaactgtaatccaaaagcgaactttaaatttattcaaaacaattatatttgagaaccattctaaacaaattgatccaaattagaaattacacaatcggcactaagtttcgaaatttgttcaaccagtgcgtggttcaatttcactttccagctacattttgattttcttggtatgaactatgaagataatgatctgcatcgtttgagagtttcaaaattgatcagtaaaatcagagtcccaagtgtgaatttctcttgctatgttaaagctcaagtgaaactcatatccaatgtagaccttgacgttcgttgttttggatgattgcggtcagacttgtagaatcagctgaagaattagagaaccggtacaaaaagcttgagctttcgttatcaggtaaggaagaataaatatgatgctattaagtcgtcgtaccttgaataaaggaattaagttttcttacggacgccaattcttggtcaagattgataaaaaagttggggacttatttcgatgacttttgttggcagaaattacaagttgtggaagcttttttagacgttgaagaataatcaacggttgattattatgatagtatcgacatatgtaacgtgttgtgagatacgtgtagctacctttgattttcatagctcaactaatcctactttagaagtgacttttgattaggtttaggtcatttatgtgtttacttccatcaatgcatcattatcaaaacactctaatcaattttgcactatggggcacccaaattctacaaacctggctaagtacgatttcaacttctcggatcttaaaagctaataagtacaaatttagatgcaatcattctatgttcacatgattcacagtttggttttgaggtttctatgtatttggcttatcatggtttctttactttgtggaccaccttttatatttgtaaaatgtaaaataaagttatatttttaaataaaaccagaaaagatttgggctttatcagccgtttattgagacccattgggtatatactataatctaactcaattacccaatgttatatcaaccatagatattaattaaataaaattcgttggttatatatctcaacacatctctatacaataacggtttttctttctgaacaaacatataataacggttttagaaattgcatctggcagagaatagaaagaaaaaagtaaaggaatcgccatgaaaatggttggttaagcaggagagcaatacacagatataagaatcaattaatcttcctcaagatctaatcatagagattctcgcgaagttgccgtcgaaatccctagccaaactcatcgtcgtctcgaatctatggtcttctacattccgcagcaaatatttcatcgatctgtacttgaaacgatctctgactcgtccatgttttcttttctcaataattcaaagcaacatctggttctttcactcaatctctcaagaggcaatttttgaggaagcatcactgttttcttacacaactacatcaagctttcctcttagtcttgatatacggacctttccactaagttacaatgtttgcccaccggtactcggctttatttgctgcaagatttagataaggtggtggttatgaatccaagcataggccaattcttttttactaaaactcaaaactaagagaaaacgaatatcaagattcttaggatacgatcccattaaagataaatgcaaagtcttgtgcatgacggtattgcaagttccttccaagaaagagatcgccagaagagttgaggttaaagagatcccgttctatgagagttttcttgaatcatgttgagtgtccaatatttctctaaaggaagtcttatagtatgttctgtttttataagatctgtctttcgaattgaaacttctcctctcccatttgcgtgtagtctctttgatctaatacaatgattctagttaaattagacaacactcagtttctttcatggtcgctttttcattatcgacaaggttaccaaattggtatattgattacccttggcacataatttgatattagctccttttgttaatattgtcagcgagtttctcagaagatatgacaaatactagaatctatttcattactcctgactcttgggtcttgattgtttaatcaaaagagaaagggtatgttttgatataaccataaaaaggaagggtatgtatggaattatgaaagaagaaaaaagaggatgtatttgatgtaagcataaaacatcaggggtttatatgcaattaccaggaagaaaagaaaaaaagaatccttcaacgagggttttgtaggagagttcacattttttttttttttgtctcagactccgccaattctctggaaacttaatttggatattgttaatttgttctcgcatagatcgattcctcttacggagaaatg

SEQ ID NO: 28413 - DNA, 3000 bp, Unknown
  misc_feature (1)..( 3000): 2750-1469P.txt file - cDNA_ID_2996653; gDNA_ID_2926263; Annot_ID_143273
gacaaaaggttgaaacttggagttctcttgaaggttgctatgtctatgtttgaagagcttcactttcgtttctccctccttattatgcctctcttctttacgctttcttgtgtttctgctgagaattgagatagatgacacattttgttcatcagccatgtctgtatcttgatcaaactcctcttcttgtttctgcaatgtggtcccgatactgagatctggtcttgacctgtgaatcacagatttggcgtagtttttggaatggtcacagttaaacacccttggtccttgctcttccagtgatacaagccattctggagatcagattttgtacaatgggttagtcaagtgatcataacagctccagagaacagatgggaacaaatcactcacgaaaacaatcatcatgacctatatattaacgatagggaagcaatttaccaatgaaggatgcgggggtcaaatttcttagtgtgtctgcatctctaatcacttcaccttgactgattacccaattgatcaaatgataaggaataagtgaattggagaacatgttcgtgtacatgctgattttttcttgatctttgtttctcctgtgtaatcgtttggagtatcaagcaaaacaatcaagcaaatgaagcaattaattctatagaacttataggcataccttagagaagccatagtcttgtcaaaaagaaacaaccagttgatagcaatgttcttcaagtgtaaacttctttgtgaagttccatttccagggttgaggaatagcttctccactgacttaatcaccgcttctgttatgatttccgttaaaaatgcttcatcttctggaacctgaaagattaaacagccatgaaaaacaactcaattccatgttacatacaatgtgattcggttaagaaaccacagactttattggacttccgactgaatacacatatagaaagcacaggccactagtttcaaactttcaagtcacccagagagaaaagactaaatagattatacatagtttagtcaaagaaccaaccactcccattaatgaagttagatgcagatatggctccagcagcatcttgagaatgacatctgtcacaagaacaagaacacatgattgaaaacaaaaccaattgagacatctggaagcttatgaaaaaggagtcactagtcacataatgcttctctatttcccacagaatgcaaagtagctaaagaaaaagtaacactcaccaaaaaagaagcaactgtggaacccagatatcatctgaagcacagattcctgcagatctttatctagctcggatctacctaagtccaaatcaaacctcgagcacaaactgagcaagaaaacctgagaagctacgattccagctaagtaaccaacgccacaggactcagaatcgatctctttacgcaaaatttcactagcaaatggcatgaacacctccaaacaatcctcaactctacaattatcttccacttcatccacaacccaaactcgactcaaatcagcaaaactaaacccagagaccatcaacacatcatcatcttcatttccaggttcatcgacacagtacatgctaatatagctcacaatcccttctaacaagctcaaagcatctctcctcctagaaataactaaacgactcaactggtaaacaacgggagataacagcgataccttcttaacaccggaaaacgaatcggaaaacgaaactatcagctggaagaaacacgaagttaacctaacggaatcatcccggaaagctaacttggaagagtagaatctgatggcggagtagaaccagacgagctcgagaggtggtggttcgggaagatcgttaagaatacgagtgaaaatggagtcgaaatcggagaaattggttcgtccgcctcggtactgtaacaagagctgcttgatcgagtcattgagaagcggtttcagaaattcgaggtgactctgaggtctgggtttacaaatcggaggttgcattttgggaattttccggtgacagagaagggattttgaattttgggaagttggaaggaaacagagaaaccctattgaaattcaaagaaaagggaacgaataaagagagggaatcccaatgttaaacataaaaaaaaaatgtgtacattacattttcaaattgagttcactccaaaaacgtacaagactactagtatatttgttttattttcattatggcaaatacgataaatgatttataagtgtggattaacgaaaattgctagttactaaatgatttatgaagtaaggataaatgcaaatttcgaaaattggctaatcagctaatttgcctaaaagaaataaagagaaaatgctatgacttgatccatttttagcctttctacttcttttctttttggtcatatgaaactttatcaatacaacttatgtagaatcatcttaaaatacaacttctaatcaagagaaacttaaaccgacagacaaaataaagttttcgtaattacgaaaaagtgatttctccagaatctaaaccctatgaacaaaagacttaaaacgtcgtaaatacgaacatgaatttttaaaacaaatagaaagatttttcctaattatactgttatacatcatgtgatttctccaattcatatcaaaatacaattggctctacacattccatataaattttctatctatttttttttcttccttttcttgatatcacgagtcatacaaccacaatcaaaaacttaatacttttaaagatttgataaattttctgtctaaatagtttttgtaatgagaaagttacaagagtaaattattattgccaagtcattgttttatgaaataaatgaaatactgtacaaaaggtgaaaaaaaatgatacgattacgagtcatataaatacttcgccacctgcgtttagtaaatggttagagactcgtttggttatcacaactccacgacgagaggaaaaaaaaaactcagagagacaaatctaaatg

SEQ ID NO: 28414 - DNA, 3000 bp, Unknown; identical to SEQ ID NO: 28413
  misc_feature (1)..( 3000): 2750-1469P.txt file - cDNA_ID_2996653; gDNA_ID_2926263; Annot_ID_204834

SEQ ID NO: 28415 - DNA, 3003 bp, Unknown
  misc_feature (1)..( 3003): 2750-1469P.txt file - cDNA_ID_2996657; gDNA_ID_2926263; Annot_ID_143274
ggtagagagagatatataataaaagagcccataaaagaactcagacaacaaacatcttaagtttattaagtttccacaacaaacttagaaacacactcctttacatggcatctccaccacaaagaaatatgcaatgaaacgtccacgatttattatccccaaactttggtaaaaatgtctgaaaaaagtccctttcacgattggaggacgggttcgaagctcacttgttccaccaatgcaagaaatccttgcgcctgttgattttcttctgaagctggagtagtccatagagcaaagcctcagcggttggtgggcaccccgggacgtatatgtcgactgggacaattctgtcacatcctcgaaccaccgagtaggagtagtgatagtatccacctccattggcacaacttcccattgaaatcacccaccttggctcaggcatctggtcataaaccctgtgattgtattcaaacattagaagttggaatttcacacaggataaagaagaacagaaccataaatcatttgagttgatccgcatatacaacttctctcaatcttaccagatcaagactgatttctgcacatatctctatatactagtttctgactaatagttaaattcagtataagaactaatctaaaccaacttagaaagcagttaatcatctcccgaatgcatctaaaatgtgctcgtcttattggttgatgtttacacaacctctagctattaagattgacttgggatattttctaagtgtctgggcctaaagttatcattaatataagcacagcagccattggcatacgtttcttaacaacaggattctcatctaaagaacataagttctacacttgaatgaagacttcatacatcaaacaaaaaaaagaggaatctcttaagtgtgccggatatcaatttcctataaaacacacaccaagcagaaaatatgtgcatcaagtctcagattctaactaagcaaaatcatcacgcaagattctaatcagtcaacagacggaactacaaaacaagataatgaaaacatcataacaatgaacctccaacctcttactagtaagacactaacacatgtttccctaatgaacaccaagctagaaaatctgaaattcctaactcccctcaaaagacgggcacagagctcacataaaaagagatataactccaccatatttgttcatcccttaattaaaacgctcccaatttcatgaaattcgaacaaaaaacttgacgaaacactagttaaatctgcgctagacaatgaatacgaactgtatagcttcccaagtcattcttatatccatacagcaattctcaatttgtcacagacctagcaatacaatcagaatacatgaaccctaaaatcgccggaaaagaataaattccaatagaaacccccaaattatatcctccgaaaacctaattcagaggcctctaaagcagaaaacgcacaaagtgaaattagaagaaatcttcccacgacaaaactatatccgagatccaaagatataaatcagccgttaattccatgaataagggagatagagaaagataagcgtacttgcgaagagccggagccatcttattggtaagagtaccggcgacaatcatacaatcagactggcgaggactaggcctgaagatgataccgaatcgatcgagatcgtagcgagcagcaccggtatgcatcatttcgacggcgcagcaagcgagaccaaaggtcataggccagatcgatccggtacgagcccagttcatgagatcatcgaccttggagatcacaaattcggccgctttagagagaccaggaggaggaggggaggtcgaaggaggaccaggtctggtgtaggaagtcggtgatgtggagggagagagagcgggaagggatgtgtggaggtgagagaccgaggcagcggcgacggcgcgttgagattggaggaggagagggaggcgcgtggcggtgttgcgcgtaatcatcgccatttagatttgtctctctgagttttttttttcctctcgtcgtggagttgtgataaccaaacgagtctctaaccatttactaaacgcaggtggcgaagtatttatatgactcgtaatcgtatcattttttttcaccttttgtacagtatttcatttatttcataaaacaatgacttggcaataataatttactcttgtaactttctcattacaaaaactatttagacagaaaatttatcaaatctttaaaagtattaagtttttgattgtggttgtatgactcgtgatatcaagaaaaggaagaaaaaaaaatagatagaaaatttatatggaatgtgtagagccaattgtattttgatatgaattggagaaatcacatgatgtataacagtataattaggaaaaatctttctatttgttttaaaaattcatgttcgtatttacgacgttttaagtcttttgttcatagggtttagattctggagaaatcactttttcgtaattacgaaaactttattttgtctgtcggtttaagtttctcttgattagaagttgtattttaagatgattctacataagttgtattgataaagtttcatatgaccaaaaagaaaagaagtagaaaggctaaaaatggatcaagtcatagcattttctctttatttcttttaggcaaattagctgattagccaattttcgaaatttgcatttatccttacttcataaatcatttagtaactagcaattttcgttaatccacacttataaatcatttatcgtatttgccataatgaaaataaaacaaatatactagtagtcttgtacgtttttggagtgaactcaatttgaaaatgtaatgtacacattttttttttatgtttaacattgggattccctctctttattcgttcccttttctttgaatttcaatagggtttctctgtttccttccaacttcccaaaattcaaaatcccttctctgtcaccggaaaattcccaaaatg

SEQ ID NO: 28416 - DNA, 3003 bp, Unknown
  misc_feature (1)..( 3003): 2750-1469P.txt file - cDNA_ID_2996661; gDNA_ID_2926263; Annot_ID_143275
aaagccttaacccaagcttcttttgcttaagactttatttgaaatgaatttgaacttttagatggttttaatgacttgggtgaattgagagaagctgctacaatttgtatttttgaaaaactcccaaataaaacttaaaaccatgaaatttaacttaaaaatcaccttaaacagtaaacacacacaaaacagaaaataattagactaactctttgtttacgtcttaaagaaaaaagtctaccccaagaatgttctaaaattagaatcgttggattcaatttgaactagctagagtaggaatgtttataaacttcattttctttagccttgaagtaatggaagtttctgcaaacggacacgtagttattaatatgtgcaacaacttccatataagccaagagccatgatctcatgaattggattaaaagcaaagaaatgtctctctagctagctagataatgcaagcaacaaaactaatgtaactttaaaatatatttgtatactttttttgatgctacataattacaaaattacgaagtatgattctttcaacgtgtgggacgtatctatattacataccagtactaaatattgtcggcggagattaaaccgttttaacaaaaaaatattgtcggcgaagattcgtgtatagtcatttctatataaaatgtgagattgattcttagattagatttgatgagtgatggtggcgagatggagacagcaactaataaattagtgttactcatctttttagattaaccaaatggtaagctttaatgttgagtaatggcgtcacacgtgcctttccttttatcagaaattagggaaacatttactgttttcacgtacatttgagcaaacaaccactgcatgctttcacttacaaaactacacatagtcttaaaatagttaaatgggagtaaatatctgaattttttcattattcgctcatatcattccatgaaagcctttaattcgtaagtataaacggttgttccatttttatatattatattacttctcataaatatacttattgataatggaatggatggacctttaaatataaaagatcagtattttgtttcgaaaaaaaaatcattatttccacaagaccaggttcagttgatattttaaaatcatttataaataacaatatagtattataaaaggtgaaaatgtactggaaaatacaaaattgcaaagtctgctaagggtcactattatttgattgatatgaacaaaagtttataaaacaaattccgaaaatcaagaggcatacaatattgaaactatggtatcctaaatgtaaagattaagaaacgtggttggtgggttaatcattaaaaaaacttccatgaaaaacataggataaaaaagaactagatataaaaacaaaagctggtgacaagagctaagaatgtaatggtactaatatgtaatcattactttgtgaattagtactcaaaaacaaatttgtaggtacatttattcggtgagttgtttgagcattccttttgattaattcagccccttttaagtgtcactatgttgttgcattgcgatcaatcaataatgagaaaggaagatatatcaaatgtaataagcactattgctcatctaattgggaatattccatcgtgtttgttctatattaccattcaagttaattcagagctgttaccatgattatataaagttgaaatattatttactgtatataatagcatgttatgatatatatatatatatatatatatattttatattcgtcgaacgaagctaatatacatgtttaaaagctggaaaccataagattaaaagtttaaacaggtacgataattaaaaacctgatataaatgtctttgtttgttttgatatttttttttgtcacggtcaacttattaatatttttttgtcatatggtagaaatggttatcaatttatttatgatgctcagatatcgagcaaataataaacatttggtttaaataaaaaatgaaattcgaaagatttggacggattaataattaagcaaaagggacttacggtttaacgctcttgttgggtgccaatgacacataccaactcgacaagaaaacgacatgtgtgttctcactctcacgcaatgggccctgtttttcgccattgaaaaccacagggtgttcatattttaaaacgggagaagactaatcataaaaggcaaataacgacaaaaataagttaaaatccaacggctgaggatcctccatctccgcccaggattcaccgtggcccgtctcaccaatcggtcaaaaagtcaacagtacgtggacctttttatttcaatgaaaaagaaaattctttgttttggcccctgtacttttatatgtatcactattccccctctatttatttcagatttaaattggatcctcaggatataaacgagtagtatgaatttgtattcacattttaatcaggaaataattgtttcaggtttaggataatgtttttggtagaaaattaaaataaatttatttgaaaaatgaagaaattttgatttatttggtcagcataaaaaagaaaagaaaagtgggaatttatggtgccgacacgttatggggacgaaattgataattaagaaaataaaggggtgagaatgtaaaggttaggaaaataaaaagctgtcggtcccttaaccaaggttaggtatttgatcagggtatatagttaagccctgtgattttatttttatgcaaggtcctacattaaaccgagtcgaccgtcggtgactcagttacgagtctcgcgttaacgagttcttctctccctggttttttgtttttatattttattttagtctcacaagtcttctctatttataaacacaaaaaaacgaagatagccatcgttttggtgagagaagagagaagagagaagaagaaggccatggaaagataatactctgctttttttttagaaatatacagaggaaataaagagagagagaaggagatg

SEQ ID NO: 28417 - DNA, 3000 bp, Unknown
  misc_feature (1)..( 3000): 2750-1469P.txt file - cDNA_ID_2996665; gDNA_ID_2926263; Annot_ID_143276
cgaggtaagaaacgagatctccatatacccaggacggaatcgtagcctcgcgattaactgttggtcgtcgaataacaaattgggcacgcatgctctcaaaccaggccaatccaaaagctggtcgttcaagccaatatttattaagataccgtttttctacacatactttgagtgcacgttcttcaccgcgtttggctcgccatttggtcagacagcaacggtttttgccggggagagattattcaggtggcaatgtgataatccggatgaggaagagtgcatttgggtggttaagagagacgggctatatctaaggaggatcaaaagagacaataaaggccaaaggctctatggagatgaattgagaatggtttggatcggcggtactaattaccaccctgtaaaagaggatccataatctttacacttccatgaccacttcaggatatatgttatatctctatttttgtgtgtatgaaatggataacacgatacataatctagaagaaacagaacagcttttgtgtctttcctttatgtaaaggtagcaaatttgagatcaatccacaaacaacttcaacagcggaaagagaatgaattcatccggactagatgattacttttgcttaagctccatattttggggctttccaaagtttgaaagcaacttcgtggatgaaccgatcagccggtataacaagatttccacagagctatgatgaaaagagagaaacaacaaaaaaattaaccttgagacaagaagccgtgacgtttattatagcagaacttgcattaaacagaaaccatacctttttgagagcttcaaatgataaggtatcaactaagtctttccgggtcaccccatgctgccactgagctaccaacataggacagtagtgcctgtaggttgcaagaatgaccaaacccgtcaagaacgaaatgatgatttcagaaaagttcaaatcaaattcttttggttttgacaaaaattcatcgaatctcttaccgaacatcatcccgtgtcttttcacctcgcatggtgtagctctgacgcgggacaagtcctataaatgccgggttaatgtcttcttgtggagtcttgattggaaaaactgaaacatctttgtctgtgacagaaccatagctaagaacgacagacagatgcaaccgcgatagaatctctgaacctggttgagccattcccataatactgccaatcaaagagtcgagaattcccatgttgttcccgttattatattcatcaaccccgaaatgaacaaaaaccaagtcatataggttcacatccaagcactttcctccttcaaatccaagcagctttagtagtttagatgatgtggcatcagaaggaaaggaatcactctcttggcatatttcactaagctgtaatacatctaagccaatcagttttccgaaagaagtcagagtagaactgtccgtaactaaagcagctttgagtcccataaacctggcattaaagtaaatactagcatcaacatatggatataccagctattgattatcaaagagagtataaaactatagagataagtgaaaagtataacctttcagccaaagttgagatatcatttccatttccctttggttttagtccactctattaagaaatcagatcatggttcgttaatctctaattcgtgaataactatgtaaacacactgagattgttaaatattttgccacaaaactcggctcacatagaaattaatatagtagagagtaaagtatctcacagctatggaataagcttcggatgcatccagcaagtgggagaattctcgaactattctttcattctcagtttctgcaatattgaaacagcagagtgagttagatcaatagcaaaatgtcaaagcaagggcaatgtaacacaagtgatctcaaatctttgtttcttaagcaattgggtcaattgacactgaacaagaactctaagttggccagttagatcaattgtatactggagtttcatattggactattaaaaaagtcacaatcgaatccaaacgatatggttcaattctgatcaacactaagaaatcctaacaagtgaaaacccttaaagtagcgattttgactgaaattcaagacgaatcaaacgaaagtaaccaaatttatgaagagatagcgagggagagagaaagagagacctggaggtgcattaggaaggctcaagaagccacaagtagcgacggaagcaagagaatggatgttggtatttgacggatcgacaaatcgagccaagccgtctccgtacaatatcagtgatctgcttgatttgtccgccattgttgtcaaaagacgaattgtccgagaagaaaaaaacagaagcgaatatatatatttttttgtcgtgaggggaatatatatatatatatatataatataatttttctttttttttgtttttaattttttaattgacagcgattttttggataatttttggggaccatgaactaaaaaaacacgtttacaaatttcacagaattataaatacagtgaaatctatttttattggatttaaatgattacatgaaaaagagtcgcattgagtaataataagtatggcgtagacattgagctaaagttttatagaaatggaagatgttttgtcctaatcgaaaatcaaataaccaagaaagacccattccattcattaatctaccacatggacatggtgcagttgctgtatattacaaagaaacaacacaacattaaaaagaaaaaaatccgataattaattttaatacagatatgtcgtaaattgtacagtatagtcttgttatatgtagagagcctatgtatggactgtttgttgaccattgcaacaatctcactttccctctctccccacttgcccactcctcgtcctcgatcgagagactcgcgacggttccggttcttctgctagaccgttgctccagtccggtttaatccagaaccagttgttctgccatg

SEQ ID NO: 28418 - DNA, 3000 bp, Unknown
  misc_feature (1)..( 3000): 2750-1469P.txt file - cDNA_ID_2996672; gDNA_ID_2926264; Annot_ID_143286
gcttcagcggcttcttgaagagcggaaacagcaccggtctggaaccttagatctgccttgagactctgagctatctctttcaccagtctttggaaagggagttttcttataactaagtctgtggtcttctggtacttcctgatctccctgagtgccactgttcctggcttgtatctatatggtttcttaagcggcggagttgagtgttgccatactctcatggcgaagtgtggagccttacctcctgttgccttacgagctgtctggttcgaacgagccatagtgagcaaatcaactttgatatgtaaaaaagttttgatggtgaaagatatgtattgagagtttgtgggtggagacatttatttatttgtggagaatctaaatgaaaattaggaagaaactatgattaaaaggaattttaagattttcttatccgcatgaataatgatttaacaactatatatagaccataggtttgctgtcatctttcaaaactaagataaccgtctataagtttgagcaccaacgctcgataaatatagatcattgatttgctttcacctttcaaaactaaaacaaccgtcgattagtctcaaaatcaacgcttgagatctttttttccgttgcgactgtgtcaactgaccttgaaaatatatgggctacaataaataaaacatattgggcctatgaaataatcaactaattaaaaattcagacgttaaaaaaaaaaaaaaaaaatcgactaaaagacaaaagtaagaaatgaggtaaatgtgagattccaacactagagtactttcacgtatacaattatgtacactatcttacctaaaggatattttgtgaaaaatggaccgagaacttacttatactacagaggcaaacacatgctttatttgcttgccctcaagacgggctctgtaagactataactaccaatcaaaatgcaaactactttgatagaattactaaaactaacccatcgtcagtttgcaccaataagcattcataaatacttaccaataaagtttctatcttttgtccaaaagaaaaagtttctatatatctaggttttgaaaaaacctatcctcgaaactataatgcttcaatagatctttaatagcatgtatggcccggtagatagaacaatgatgtaaaagcccatagtataataggtctatactagtgctggatctcaatggaagtgaaacaggtgattcttaagtagagattatacaaatctttttcagtaatcgtatatttaaaaaattattttggtttaaacgtgcttaacacctgaaacaacccaattatgtgttggaaatatagtagctatatcaattcttataaatttttgtacttgtaacatcatctataagaatctagaatactatggataagaagtcaaaacccaactgattacattttgagactgttgaaagaaatatgtttaaaaacgatcaaccttatagaaatggtaacaaagaagtgtagtaaaaaacaaatgcccggttcattcgcaagaaaaggcaaaaaggctataaggcattacatactttaacgcatgtggaagttttttttcaaaacgctttattaggtttaggctatttgtactttatatatgggtttggtgggtttggttttgaaagttaagcacaattacttaacaatgattttctcatcattaaataaataaaacagtgtaatccttttttcttagtttcttgacttcttcttctcttgctgatgtaaacaactcgactttacaacattattgtaaaacaactcttaagacatggtcagtcccacacggaattctatcttctactaaacaaaattcattttgtcagaaagtcatcctagctttttttaactaaggtatggcctatttctttttgtaatttacccattcttctaagatatatatgacctactaatattatcaaattgatgttgacttgaatatacaccataatcatttaattttgcttgaggtctctaagtggttgctatagattttgaaacagttgagttgatccttgttatattttccaatgacatgtgtgttacactgttactattgaaagacattttaatcatttatataaaattcattttagactatgacttttcttttgtcaacaaactacagtatatgattctttgaagtatacagattttgaaaatctttataatatacaaatttacaatgtataacgggatagcatttctctttgtttttgtgttcctacataataatatcaatgctgacttgtatatatttatcataaatagatattatccctagttttagtttttcctattttcttagtataataatctttgattttctagagcttttaaatgaataacacatatctctttagtaatagaattccctagaacaaaccacatactcttgtttttcttttaataatagatgtttggatggaaaaaaatccagtaatctatatccaacaattgtcttacccatttatccgaaagatacaacaaagcttatagaaaatcatgtctcagataaacattttgatttacaattaataacatcataaaacagtggaaatgtgtttagcagtagataagataacaattatgtaaaaaaactggaattagcttttgtaaactgttcaataattctgatatgttaccatattaaccaaaaaacaaaatgagaaaagtgagaaaaaaaatgaaaagaaacaaaaaaggagggtattatcgtaaacataaaaaatggtctctgcccttcacatgcgttctttctatcagtccttttaagagaagggagacagaacattctttggattttctatctctctctctctctctctctctctcttcttcacacacacagagacatcatcctcttcacacccttttcttttgcacaatcgcattcactatctcttctctctcttttgtgtcacatccttctcttctcttctaagttctaatcttgtactatcttgttctaccatg

SEQ ID NO: 28419 - DNA, 3000 bp, Unknown
  misc_feature (1)..( 3000): 2750-1469P.txt file - cDNA_ID_2996684; gDNA_ID_2926264; Annot_ID_143294
aaaatcccttgtcaactcaggtttatggagtatcatggctggtgattttcttgatattgtttgtgatgaaggtgggtttacttgatacatcaatctctttttaattccccagaacgtcatggtcaataaccaagttttttgttgtttgtttgtctcagactgtttcggttggaaggcggagattcagcgcgagttttcagctgatgttccggttgataaaggggctgatattcatgacgtttatcgcaattattgtgatattgatcacactggctcacatgacgatacaagacataattgtgtgtatccttgcctttatgcccacaggttgggggatgctcttggtaagtaaaaaaaaaagcttttcactggagtcctattaaaatggaaatgttgtgcgtgtgtggataaaaacaagactaacacttggtgtgtgtttgcagattgcgcaagcgtgtaagccggtggttcatagagcaggattctggggatcagtgaggaccctagctcgtggatacgagatagtaatgggactgttgctgttcacgccagtggcgttcttggcatggtttccatttgtgtcagagttccaaacgcgtatgctctttaatcaagctttcagtagaggtcttcagatctctcgtatccttggaggtcatcgtaaggatcgctcttctcgaaacaaggaatgattcatctcttcattgtaatgacagggaagggatcttaatttatcccttttttatcttcatggatgattagggttaatgtaatttagttttcaatatatcgcttaggtaaaaacattgtagtattcatctataaattagacgttatctatcatttaatgactgtttaattatttagttgaagacctccattggtccatgtcgaggaagataaggaacttactaacaacttttgcttggcctataagatacagcgacaacaaagctttcaaaaattccctagttaccaactgggttcattaatgggccgataaggaaagcccacgatcttctaagaaggattagccctagtttcctctgcttcgttgaaagacaacttaaaaaatggcgggaagttgtgacaatgtttggttcgacaaataagcggagacgtggcggcgatacgtggcaccacgacatttgtacgagaatgataatttgtcttggttcgagccagcctgtaaacggtaatctgtgtccgtacagcttaaatctcatcccaaaaagaacaaccaaaatgacggatttggccccaacaaagctgtaaaacgaggttaaaacccggaactttcaccttattagacgacgacacacctctcgtcactcttgtcgagactcttaccacaaagaggtttttgaaatggcggcgatgaaatacaaaggaagcgtttttatcatattagtcatccttcttctttcgtcctcactacttgctcactcttcttctacaaaatgtaagtgtcatgtgatatgtttaataatattctcatctttattcatcgtttgggttcaaaacatgatgaatcaatcctctttgttctttttgtttctagccttcttttggttaggagaaacacaagatacgaaagccatgaaaaaggtaagaaaatctcttcctagaaacacaacgcgactgttttgaaggaaatgaacaattcgtttcttatttttacaataaaaagtatgaaactttttgttttctagctagctctttgcatttgatattcgtttgtatttttctatatgattttgatgcaaagatgattaattttttgttttggtactgaaaacaggagaagaagattgatggaggaacagctaatgaagttgaagaaagacaagttccaactggatccgaccctcttcatcataaacacattccttttactccatagattcattccttatatcttttttctgtatcttctgtttcccattgttgacatattagtttgtaatgcttttcacattctagttttgagttttgtttatccgaatgttaaatttctatttcaggttgaaaatgattaacttcgttatttactatagagtatttcaattacttcagccaagattttgtggatgctttggaaagatgccaaagcgtaacaacttccaattcaatttttgtgatgagttagttctcaagatgaagtcggaagcattcgtgacatcaattgtatatataaattttgggtttagagtgttttaagttggtatcaaatcacaattaattattctgtgacatttgtttctagaagaaacttgggaaaaccgatcttttggatgtgaagtggtagattggttgtctaaggttttgtactagaattttgtctgattttagttttaaaacggtaagatatattttctttataaggacaatatggtgtatctagttctaattttgtgactgtatatagatttgttgatgctagattgtttgtcaataaaattattgcattgaccttaattagtttcggtagccaatcgaccactacttgttgagttttggagccacatattccccttgcatgttacaccgagtgacacgacaaattcatgttaaacaaaaataaaaggatatacggttaaactatttattgtaccgcaataaataaagatattaaatcagtttattttggcgccacaaacaaagtagatatagtgtgtgtttttttggcttgttgatatcaaaatacctatgtttttttattgtcttctacattagctaagtcataatgtgaatcatgtaaatcttataatctatctttcagaatcttaagttgtgtgaggcacgggagagtcacgtgagagtttttttttttttttcacaagtcacgtgagatttagatttgaacaaatcccgtaacggagcaagcgaggcacgtgacatacacgccccccttaggtcctataaatacatctcctcctttcactgtcacaagtagcgattctctctgcggcgcgtgtaaacggtgacggggctctaatg

SEQ ID NO: 28420 - DNA, 3000 bp, Unknown
  misc_feature (1)..( 3000): 2750-1469P.txt file - cDNA_ID_2996688; gDNA_ID_2926264; Annot_ID_143296
aatattaaaattaaaacacaacatactagttgaacgtggtgtatccagccacggggaggctaaacgagcatcaggtgaagctgcagctaacatgggtgatggagaaggttgaggtcgcctgctgtaactagagcctctgtctccgtgaggactacgttcccattcgtcctgtccatcatcccagtctgacctacctacactccatcaaaaaggccaaataagtgttgtgtttgcaacactcatcacacttatgggaacaaaaaattgaaaatagacaaaattgtatagagataaatgtagtgacatttatgtcaataagctcataaattgatagctttatgagcttcaacaatctttagcatacctggagtcctccaatcgctattgtatctcctacgcttttctccgtgatagtctcggtcagattggcgataagattccctccgtcggtagtgatccatctcatcataagtgtttctctgtcttgaccgcggagtttcacttctgtcacgcctatgttcttctcgatgcctattgctaccacctctttcataactagatgtgcaagataaagtccttggagttatggagatcttcattccaacaggtgaaaaatatgtcagaatactaaaagtcaagttgcatgtactcttaaaaatcagttaagtaagtagaaaagatagataacccagggcaaaataatgatttcattattaggatggaattgacttacatctgaagttccagcattctctgtagtcacggtactttctgcaatacaaaaaaataaataaatcacaaatgtcataagtcataagcacaggagttcagaaaaacgaatgaaggtggtatttcaacatcgtacttatgctcacaaagaaggatcaaagtctagggctgaaaactacatattgatgagaaaaaaataccttgtgcagactgagatcttgaagacttctctctatatcgcctgctggaatggacaggtcgagtgttttctgttccaaaatctaatcctgatacatcagatttatcttcttcatccaacgatgatgtaacagatattgctgacttcttcggaaccttaaactcgccctcagtcttggcattatcctttttctcaattgcccttgcatccaaacctacaaatgtattatccccatgggttcaatacggttccaaaacaagtaatcaaaatgcaaaagctcacaaatcccaactcatacctaaacgggactttctctcaggagctttaaaagtcaatttatccttcacagggacaccaccattggtttccttgtcggcttctaacgtttccgtagttttgaatggatcaacctatatcataaacaatacaattattgcttgtacacataatcaagttcctcaagcgcaaaacaacttaaaaaatccgaaaatttggcaaaatcagcaaatcggaacttacccccattactcagtcgacgatttgagctcaaaaccgaatcttcaatcccggaaatcgaagacagcttcgtccttcgttccttatcggcgagacaacgactccggcgaggatagattactttccctagtttattagggctttggttccttcaactcctcttgagtgattgattccaggtgcttttttctgaattatccaatttcaacaacgtgaaacaccttctttggatcaacctttgatatctcctcagagagagagatatctggaagctgagaaagttagcaacacgatcggaacaaaggatcaccgccggttaggttacacacgctttaacgcgattcagtatgtgcgtgggattattttttataagttttgaatcagaaaaaaagttttacatatgggccgatttattttacatatgggccttttagcattaacgcattgttatgttttttacgccgacgtatgcttttttgtttgggctcaacataactttattgataaagagtatgaccggcctatgtatgaggctgctacttatcgacagcaacatgacttgagtgaaagtgaaagtgaaagtgatgctatcggagttgttgttgttgttcaggactaggactggtatatctttgataaatggttggccagcaggccatgcttgcacttgcatcaaagcttgaataacatctttggtatcctgactcataaattacatgtttaaagcccatgtttaggataaaaacttacatcaaattaaacacttgaaacatataatttggaataagatctaacgaaaacttattggttataaaacaatcaaaggttattagttatctaattactttaaacactgcgccaaatcctctaatcttgttggacaaacgcaacggtaaaaacaacgtcaaacaaaacggtaaaaaaatattgaaaaaagtaatgacgagtcatatgaggtcaaagaagccattcaagtttttaaaaaaccgctaacactttttttattggaatcttcgacttttttgaaattccaaatccccttacaaaaataccctttcggttcataagtattacgttatttgtctcagtgaatagattggaggtacctttttttgcttgctccaagacaaaaccgacattgccacagtttaaacttggtggtgttactgtaattaaatggaaggtagagcctttttctggacacgaccttcgaaagtgtcctttttaaaatttctttttatttttgtgtctattaaagcggtgcttaaaaaaggaagataaatacaaaaaaacattcatttcagactgctctctctctctccctttcactttgcgtacttagcagctaagtagcttaaaaagttgtggctcctttgctccgccattgttagggtttctggatctccgtttctctgtatgttcttctcaatgttgcatctctgttcgtcactgttgatttttaaccatcttcgtctaatgacttttgtttgttttcagggaggctgaggaaaccttaaaacgatttaaaacctggaggttatagggtagacaaaatg

SEQ ID NO: 28421 - DNA, 3003 bp, Unknown
  misc_feature (1)..( 3003): 2750-1469P.txt file - cDNA_ID_2996692; gDNA_ID_2926264; Annot_ID_143297
tgtcttatatgcacattagcaagtaataagatcagatgctccctttgattagccacattgtctttctgcagaaccatagcataaacaagaaaaattgcatgttagcaagtaataagattaagtgctcctaagattagctgcattgtctttccgccaaaccattaaagaatttatagattactctcaacaaaagcttaatgacaattggcaagcatcacgaactagaaaaattacctgaaatccaaacatttcttgaagccaatcaagcatgtcttcatctttctttttcttgtgaccttctggccaaggaagacctctagtattgcggagagcaagaacagcagcttggatctgcagtaaggattacatcacccgctgataacatattacaaataataacaatgcccaacaagaagaggactaacctcaggatatctcataatcgcttgattggcactatcaggatcgagaggtaggatattataggggacatacaactgtgtcttttctgcaaccttatcttgagcttccagaatctggaaccattcaacttcattgtaaagttgcacaagagatggaaaaaaaaaagagacaggactagaaggtcacaatgccttacctcccggtcaacctcaatggactgtgtcagattaacagccttcaacacctcaaacaaaacattggcagtttggtatgcctttgtcagctgggcactgaaaattaacagcacttcaaagtatcattaagagaatttagtgctctcaaacactggcaaaacacaaattagcatcttaaaaagacaatttaagtaagttagacataccggtcagccttatcagcagcattgtgcaaagcttgaatatacttcttatagtagtgttgataaaagctttgcatttcacgggcatcacttttcttaaccctgcccatcagtgttggatcatgttcctgcaaaaaaatcaaagcaacagtagaccacatttgtcaaagaaaagtactaaaaccaagattccttctaatagctatccaaatctgccacatgcaagaatcaagcagagtataaagaatgctcactctttcaagacgctgtagaagtgcagtcttaaactgccgaacacctcttccactggaggtaggatccaatctatgtgctttctcaaatgcataaaaccgacctaagggagaaagcagaaccaaaaaccagataaacaaccaaatgacagagaaccaaattaagaaataagttttagaagaacttacagagatacgcaaccctaggattactagattcaacttcattagcaacccgaagaatgggggcaatctcaacaagagatgatggaacaacttcactatcgaatgactctccaagattaccagcagtctgagttcgtataatccgccgctgctgaggctgagacggcccttgatcaggacctcctctcgtagcagacattttgtctaccctataacctccaggttttaaatcgttttaaggtttcctcagcctccctgaaaacaaacaaaagtcattagacgaagatggttaaaaatcaacagtgacgaacagagatgcaacattgagaagaacatacagagaaacggagatccagaaaccctaacaatggcggagcaaaggagccacaactttttaagctacttagctgctaagtacgcaaagtgaaagggagagagagagagcagtctgaaatgaatgtttttttgtatttatcttccttttttaagcaccgctttaatagacacaaaaataaaaagaaattttaaaaaggacactttcgaaggtcgtgtccagaaaaaggctctaccttccatttaattacagtaacaccaccaagtttaaactgtggcaatgtcggttttgtcttggagcaagcaaaaaaaggtacctccaatctattcactgagacaaataacgtaatacttatgaaccgaaagggtatttttgtaaggggatttggaatttcaaaaaagtcgaagattccaataaaaaaagtgttagcggttttttaaaaacttgaatggcttctttgacctcatatgactcgtcattacttttttcaatatttttttaccgttttgtttgacgttgtttttaccgttgcgtttgtccaacaagattagaggatttggcgcagtgtttaaagtaattagataactaataacctttgattgttttataaccaataagttttcgttagatcttattccaaattatatgtttcaagtgtttaatttgatgtaagtttttatcctaaacatgggctttaaacatgtaatttatgagtcaggataccaaagatgttattcaagctttgatgcaagtgcaagcatggcctgctggccaaccatttatcaaagatataccagtcctagtcctgaacaacaacaacaactccgatagcatcactttcactttcactttcactcaagtcatgttgctgtcgataagtagcagcctcatacataggccggtcatactctttatcaataaagttatgttgagcccaaacaaaaaagcatacgtcggcgtaaaaaacataacaatgcgttaatgctaaaaggcccatatgtaaaataaatcggcccatatgtaaaactttttttctgattcaaaacttataaaaaataatcccacgcacatactgaatcgcgttaaagcgtgtgtaacctaaccggcggtgatcctttgttccgatcgtgttgctaactttctcagcttccagatatctctctctctgaggagatatcaaaggttgatccaaagaaggtgtttcacgttgttgaaattggataattcagaaaaaagcacctggaatcaatcactcaagaggagttgaaggaaccaaagccctaataaactagggaaagtaatctatcctcgccggagtcgttgtctcgccgataaggaacgaaggacgaagctgtcttcgatttccgggattgaagattcggttttgagctcaaatcgtcgactgagtaatg

SEQ ID NO: 28422 - DNA, 3000 bp, Unknown
  misc_feature (1)..( 3000): 2750-1469P.txt file - cDNA_ID_2996713; gDNA_ID_2926266; Annot_ID_143318
tgggtgagaaagacgctaattctggacttttgatctaaaaaaacgttataggagtggtccacgatcatttcatctagacatggacattgacgggccagctaagaactccgttaagattcatctagagaagcagagacttccacctggaaaatcaaggagaaagagttacttgaaggtcaagaaatatgtagcctgcaggactgataaagatgctcagataaagttgagcctgtacgacccttacgagttccatcttgtgaaccctaaccggcagtcttagttaaggaacttggccggttacaagctcttacctagtggtaatgctgcaagtttactcgataatgatgatccgccacatattagaggggctttcacaaacaatcaggaactcggtttaagctcggttggtttgacaggttcaacaaacttgatgtataatcgatgaaagtttttggtttaaatataggtgactcggtataaccggtcagagaaatgggctggagggcttttgatgtaccagaaccgtggtgaagatacgccacaggtttggtcagacaggtacccacttaagtagtaaattgctactgaattggttaattgactaaaagcttttacaagtcatgttactttgtatacttaaacaagctaaaattaaatttctttttcatccttctggaaccaccataaggtcattatggccagaaatgtatgatctttggtgatttttatttatccagcgttataaattatccacccattaagaaagaacaaattgattcacatgaaatcgttagacaataataaggatagatcaaagccatccttcgactaaaaaaccctttataccttcaacatacctataacgaagggaagtcaatcataacaaaaagaacagaatgatccataccaaaaagaagctctatgatataatactaagaaaaagcaaacaccttaacctcaacgcaataatctaccatcaaaacaataacgggaacaaacaatagatcaaagctatatatccggcaagtcaaaattcctctgcatttctcgcatttcacacatacctattcaaaaagagctaccatcacaaacataaaaaaaagtcagagaagcctccaacaataagaagtcagaatacaaagggaaacatataactgcactgtttattaacaattgtcttgtgaattcgtgttataccgttacttaataacaattataaactataaaatataatttttctttaaatagatacaagttgtaaaccttaatatatactaacgttaaaatcgcctagaccaacgtttggacatcaatatagaatatcaggttacatcaatgtatcaaattcaatatgaaatatcaagataccataacaataatacagaaatatcaaattcaatatgaaaatctgatttttgctttactattagcagaaaattcatgatctggacataagtagttagtagattagcctaagttagtaaaaattaagttacaaacctaaaaaacaaatttgtcacaaaactagaatttttttattttttggaatacgggttaaatctttaatttattatttttagcaccacttatcaaatcagtctgattagaaaagattatataaaatcaaaaaatattttgtggtatagtgctacttaataataattgtaaactataaaaataattgatgacaattatataaattttttaaaaatcgtaaaatcaacgcaattggcgggaaatttttctacaaaaattttctactaaattacggaaaaaccgtaaaatcattctcaatcgtctactaatatttattgtctaaccattttctttcttgtgttataattttgaaatgtgataaaataaagagaatttataataaatgattatagatttgaaaagaatgtacaaactaaccttgagtcacagtagcttgtcggaaacatattggagaacacatgtaattacataaatatcctttgtaacatgttttttttccgaaatacatgcgataacataatatctctttttatcttgttattttctcttattacatagtatttataaaaagcacatggtattttatggaaaaaacattctattcagtttaatatctctttttatcatgatattttgtagtaatacacattttttattaagatcacacgtgatttctttaaaaatatattcttattttttagtaatacacggttttattaaaatcacatataaattttttttaaggattatgttcatgtaagaaaatttcataataatgttttttcttaaaaattcatgacgtttttttaaatagcatgttttaaaactaaatataacatgtgaaattttaatgttacatgttattttgaaaaattacacgaatgtgtttcgtttacagttcatcttacaacaaatgaaaggtagctttgttatttcatttcttccgacaacatgggtccatggttattttgtaacaaaaaactttctctctactagtttcttaatttgtatgttttatttggttatctaatattaccctaaaataaacttagcaaatagaaaatgaattttatcaaattgcctacaccaatgtttggatatcaatgtataatatcaggttacatcaatatatatcataccaagataccataacaataatacaaaaatatcaaattcaaaactattagcagaaagttcatgatctggacataagtagttagtagattagcctaaaatagtaaaaactaagttgcaaacctaaaaaacaaatttctcccaaaactagaatttcttaattttttggtctgagaaattaaaagagaaagacgtttaggagggcaaaatcgtcaattcaaaaatacctcattttacctgtagctggtgagatctcattttataaaggagaaggaacattcactctcacgcgcttcaactttctccagaaacaagaaaatatcacagcaaaaattttctcgagaaaatccgaagaagacaaaaaaaatg

SEQ ID NO: 28423 - DNA, 3000 bp, Unknown; identical to SEQ ID NO: 28422
  misc_feature (1)..( 3000): 2750-1469P.txt file - cDNA_ID_2996713; gDNA_ID_2926266; Annot_ID_204932

SEQ ID NO: 28424 - DNA, 3000 bp, Unknown
  misc_feature (1)..( 3000): 2750-1469P.txt file - cDNA_ID_2996723; gDNA_ID_2926267; Annot_ID_143329
tgtctgtatttgggttgaagttaccaacacctgtcccaactacgtagaactcgtagccatggagatgcattgggtgattctcagtggtcacgatgctcgtgtcttgcaatataatctgcacttgcgaattgaactttagtttgtaggcctttgttccgcgagtaggctgccatagccctctgctcacgtttcctgtatagtcaaatgtgacaggaggcgttggagggaagtctgtggtgaaaacacctgtgggagtgccttggtaataggcttgcattatggagttttgtttggggaagacgaaagagacattgttgatgcttgcggtgaagcgtgttccgttagggccttgacacctttgtgtgttgggggttgggcagttgaatagtcccaatcccactgtgaaaaacaagttctcatcaatctccaggggcacttttactttcgaaggactcttcatctgcgctgtgaaggctgctgctgttgctgtgtcgttgaatcctggtagttgtgcgggtattgcccgtgcctgtgatttagcttgaagagtaacacaggaggcgtctttgtacttgaggattgcggtggttgtggtgttgtcaaaggcagcattggcactgttgtaggcatgtgctgccatgtagtagtgtgctggcggttggtctgcagttagaagcacatcagttgtctgaccaggacctaacattatgacattggtcgagaatggtttggtgtaggaggcatccgccgcaaccactgtgagtttgtgattcgcgacaccaaagaagagttcttggttcaaagcagagttgatgaccctgaggaggactatctctcctgaccccactagaaatcttaaagtttctgcaacatgacaagcacataatattaaccaactaagatgtagctgcttgtggcgcatgggaaacataaactaaatctgtaccttggctggagcatctgtagagatcaccaggctgaccattgatggtaaaggcgtctgagatgtttggtgctgctccagtgaactgggctaagttgaggacatccatgggatttctgtcccaccactctcctaagaggagggtaatctctctcttgggaataactggaaaagggtaatgaggagaagagagcggagggcggataatgagagcaccatacacggtggctcgcagccatctactgtgggcatgccaccacaatgtaccttcttggtcttccatggtaaacctgtaggtgtaactccctcctggttggattgggcactgggttatgtattctggtccatccgcccatggattcctcatctgccgtatcccatgcctgcacatggtctgattagcagactatctagcgataaaacattgattgatttgatgcaaggaaagagtgagtttaccagtgaaggctgatgttgtaccgagctttgtttatggctgtaatgacaagggaatcgccgttcctcacctccaaggttggccctggaaactgtccattcaccgtgatcgagttatggactctgcacagcctcttcaccggcgtttcttggatctaaccaaacacaaaaagaataaactaagttgagcatcttttgtaagtaacaaggaagaaaacaaaaaagatttcgaagtagtaaacacacaacaaactcatgaaagtgaacttctgcattgacaagtgaagctacaaaaatagccaacaacagaaagaagggtcgaagttgctccattgcgctcacttactcgaagagaaagagaaagttgatactttttataggcaggagacagagagcttatagtctaaccagcacacaccatttggtgtaacaactaaacaacaaaacaaacagtttctactttctagttttaaatatgattcttgttccagaagatgtaggtgaacccctaccagcctactttagtaccttttctttgattttttctcatcctcggacaccaaatctctaaaagcttttggatcctctccttaaaccagaatctttactatttcccaattaagattactgcatcagaaatcttaataaactatcccaaaatctataaaccgaatctattgctgcgtgcgtcatcaatcatcatcaacttgtccccaagttgagtttgattttctcagtcatcaatgtgttttaaaaaacgaagaataagaatgaaaacagctaccttttttagacatgagacatctgctgcctcagcttctccagaaatttcagtgactttgagtgcttcaaagacattactgaaagtgataaaaattctctaaaacctcgagaactgtttactcttctctcatatgacgaaagaagtgtctccgtatcataatcatgcgttttgctcttctccaatagaaaacagagctttaagcttctcgccattggaaactccatgagactactacattctcatttccgaagaatacagaagagcataaggtgaagatagaatcgatagtttcccaaatggctcggacccggtaaccccaatttcgagtccctgagttcatcggaaatcttattacagtagttgactcgatacggtcgtggaagaaagaaccaagtagacctatagtcaggtcgtttggatgcagagatatctctaccacatttaagtataagaataatttgcatattgggctgggctgggctgctacgggtcgggtcaaaacccagctaaacactttaacgtgacccgaaagatattactctttccatctcatcttccccaattagttattgacgagacttgacgctactacattcaatatctggagccaacaccgccgtgacttagccactccgcttatttattgcagttcacgaccaccgtatcctcgtaatctccgttatctcgaaccgaatcgaaaaatccctaaattcctgtgaatttattactaaaattagctcaccttatagatttaccagagatgatgggctcagagaatgacgaagagtcccatctccactcatccaaagaagagatg

SEQ ID NO: 28425 - DNA, 3000 bp, Unknown
  misc_feature (1)..( 3000): 2750-1469P.txt file - cDNA_ID_2996723; gDNA_ID_2926267; Annot_ID_204956
gaggtgttccgattgtgtttcttcgtggtgggtcgatgaggttaaaggaggatgtgtctgtatttgggttgaagttaccaacacctgtcccaactacgtagaactcgtagccatggagatgcattgggtgattctcagtggtcacgatgctcgtgtcttgcaatataatctgcacttgcgaattgaactttagtttgtaggcctttgttccgcgagtaggctgccatagccctctgctcacgtttcctgtatagtcaaatgtgacaggaggcgttggagggaagtctgtggtgaaaacacctgtgggagtgccttggtaataggcttgcattatggagttttgtttggggaagacgaaagagacattgttgatgcttgcggtgaagcgtgttccgttagggccttgacacctttgtgtgttgggggttgggcagttgaatagtcccaatcccactgtgaaaaacaagttctcatcaatctccaggggcacttttactttcgaaggactcttcatctgcgctgtgaaggctgctgctgttgctgtgtcgttgaatcctggtagttgtgcgggtattgcccgtgcctgtgatttagcttgaagagtaacacaggaggcgtctttgtacttgaggattgcggtggttgtggtgttgtcaaaggcagcattggcactgttgtaggcatgtgctgccatgtagtagtgtgctggcggttggtctgcagttagaagcacatcagttgtctgaccaggacctaacattatgacattggtcgagaatggtttggtgtaggaggcatccgccgcaaccactgtgagtttgtgattcgcgacaccaaagaagagttcttggttcaaagcagagttgatgaccctgaggaggactatctctcctgaccccactagaaatcttaaagtttctgcaacatgacaagcacataatattaaccaactaagatgtagctgcttgtggcgcatgggaaacataaactaaatctgtaccttggctggagcatctgtagagatcaccaggctgaccattgatggtaaaggcgtctgagatgtttggtgctgctccagtgaactgggctaagttgaggacatccatgggatttctgtcccaccactctcctaagaggagggtaatctctctcttgggaataactggaaaagggtaatgaggagaagagagcggagggcggataatgagagcaccatacacggtggctcgcagccatctactgtgggcatgccaccacaatgtaccttcttggtcttccatggtaaacctgtaggtgtaactccctcctggttggattgggcactgggttatgtattctggtccatccgcccatggattcctcatctgccgtatcccatgcctgcacatggtctgattagcagactatctagcgataaaacattgattgatttgatgcaaggaaagagtgagtttaccagtgaaggctgatgttgtaccgagctttgtttatggctgtaatgacaagggaatcgccgttcctcacctccaaggttggccctggaaactgtccattcaccgtgatcgagttatggactctgcacagcctcttcaccggcgtttcttggatctaaccaaacacaaaaagaataaactaagttgagcatcttttgtaagtaacaaggaagaaaacaaaaaagatttcgaagtagtaaacacacaacaaactcatgaaagtgaacttctgcattgacaagtgaagctacaaaaatagccaacaacagaaagaagggtcgaagttgctccattgcgctcacttactcgaagagaaagagaaagttgatactttttataggcaggagacagagagcttatagtctaaccagcacacaccatttggtgtaacaactaaacaacaaaacaaacagtttctactttctagttttaaatatgattcttgttccagaagatgtaggtgaacccctaccagcctactttagtaccttttctttgattttttctcatcctcggacaccaaatctctaaaagcttttggatcctctccttaaaccagaatctttactatttcccaattaagattactgcatcagaaatcttaataaactatcccaaaatctataaaccgaatctattgctgcgtgcgtcatcaatcatcatcaacttgtccccaagttgagtttgattttctcagtcatcaatgtgttttaaaaaacgaagaataagaatgaaaacagctaccttttttagacatgagacatctgctgcctcagcttctccagaaatttcagtgactttgagtgcttcaaagacattactgaaagtgataaaaattctctaaaacctcgagaactgtttactcttctctcatatgacgaaagaagtgtctccgtatcataatcatgcgttttgctcttctccaatagaaaacagagctttaagcttctcgccattggaaactccatgagactactacattctcatttccgaagaatacagaagagcataaggtgaagatagaatcgatagtttcccaaatggctcggacccggtaaccccaatttcgagtccctgagttcatcggaaatcttattacagtagttgactcgatacggtcgtggaagaaagaaccaagtagacctatagtcaggtcgtttggatgcagagatatctctaccacatttaagtataagaataatttgcatattgggctgggctgggctgctacgggtcgggtcaaaacccagctaaacactttaacgtgacccgaaagatattactctttccatctcatcttccccaattagttattgacgagacttgacgctactacattcaatatctggagccaacaccgccgtgacttagccactccgcttatttattgcagttcacgaccaccgtatcctcgtaatctccgttatctcgaaccgaatcgaaaaatccctaaattcctgtgaatttattactaaaattagctcaccttatagatttaccagagatg

SEQ ID NO: 28426 - DNA, 3000 bp, Unknown
  misc_feature (1)..( 3000): 2750-1469P.txt file - cDNA_ID_2996742; gDNA_ID_2926267; Annot_ID_143339
ctcttaccagttaataaacctttaatatacgtttgcagaacacttggaagatgaatcaaaccaacattcactcgatgtaaggaatatccaaaacgatcataatatttttcaagtatcattttctcgcctgaaattttaatattaactctcaccgttatgtctagaccgaaactggtccaatatttattttactatatatatatattattcttattgtatcacaggaaataatagagcggatagaagagcgtgaaagaggaaacacaagtgtaggtgaaggattaacagagggacaaatttctcaattacctaccatcaagtttaaaccttctctagaagataaaatgtaagtacatgactatctttatatatctcccttccttacataaatgtttttctgattttacaattacaaagtatagacttcacccatattaaatctaaaattaattgaaagaaagaaaaaaagtgtacatgacgtagaaaatagatagaaccagtgaataacatatacaattaaatttatatatgctgctaaattttttttttttttttttgtgcgaaatgctgctaaaatttaataacaataaaaatggggaaaacaggtgtatgatatgccattcagattatgttcgcggagataaattaacaattttaccctgtactcacaaataccacaaagattgcattagtcattggctccaaaacagtaaggttagtatcgtcttcttgcgattttcttcttctattactgacatgatcaacatatgctaaatagattattattatttttggacgaaaacatgttggtttttcaagttcttacatttattctagaaaaggaaagcaaataaattcgatatgaagacgtatgattgaacaatatattgtttggtaaaatatcagttgtcttagtactacccaaagctataccatatcaatatatcatcagtaatttcgtgaaatgttattctttagatgctatataaattttagtgatactaacgctatccccttttatcccccttactatttttcagctttgctgcgtttgccaaagagaagtgattgtataacattagctttgatcaacagaagaatcagcaaaatattgaaattaagttactcgattttattgaaacattcaaacgtttttcaaatttaatcaaacgaatatgtaaaaaaggaaagaaagctaaaataatgaaaaaaatagttatcgtttggtattttatctggattattcaaacgacggcgggatctgttaacaaaaatagtatcctaagattagttttcatatcaatttgttaaatttagtatatatattgatgatatttgtggatgagaatccgcttcagcttgagccttgaggggtgcatgcaactcccaagaagagtagtgacttgcttacaatgatgttggtttttccagtgtcgatttgtccccatcttgcttgttaactggttagcttctagtaagaagaatatgagtttgtcagattgatgacatacatgaaaacacacacatggttggtattgctagctactctgttctatttcaaagacttctgaaggagttttaactttaaaaatcagatattaaaaaccaaaaatgtgagactaatcgtattaagtatgatgaatggagagaattaaacaattatctgagaacttgagttgaaaacaagagaggagtcatggcaatatggcatattaaaggcaaagaagccattgtcattgaaatgaacatttctctggctttgtgattcaaaagaatcaaaaccactgttgtcttaaacaaaacaaaaaaaaacattgcccttgaattatgtatagccagagtgggttaggtagaggtgtccagacctcagaggcccagacccatatgatccaactaaaaagttctctccaaaagaaaatttcccatgaaaaataaatattgggccggacctgtattgaaatgtttgttggatgtcttgtccgtaagctgttgttctgagtctgacactgaaactcatgcggtcaccagaaagtgacacttgttatgaatttgcctagtggctagtggtttagatactgaaatttgccattttgtcgctacatagtctgttttcacaaaataagaggaagatacagagagttccatcgtacttggtacattctgtttcattagcaataagatttgccaactgaaccaattctcacgacaccaaattctagtaaacacgaaatttgtactttggttgtgtgtgaaatcagtaagtgggccaaaaaaacttgtcagaattttcatgattctgttaacctgagaaatctataacaattaaagtaagagaaccaatgaattacaaaactaaatctaacaaaacttccccaaaaacataagtagttgagtaaacgccaaatttactatatttttttgaatctatacgcaaaatatgaccatgatacattgtctagtagtagtgtaagaaaaaccattataatcacccagattacttactatcagttgtttgagcataactattttggaatttctcagaaagaaataatcagtaacaacaataggtttgatttttccccattgacattgacacagatggattatctgtatctagaatagagacaaccaaactgataaagaacaaagaaaaaaatacaaagaaaatgtgggaatcatataataaaatatatatgtgtgattactgatgatgagacataacaacaataccattagctgtcactctttttatttatttatttcataatattaaaatttagagttgcagaaaaaataacaatttacttccctttgttcagacgtttctttattcttcttccttccttcttctccttcttcttgatcgtgttcagaaatcatattcatcacctctctctctctatgtctctatatttggattctttataacatgtgagatcgatctatttttgatcagagacagagagaagactagaagaagcaaagaatatttcaagaatg

SEQ ID NO: 28427 - DNA, 3000 bp, Unknown; identical to SEQ ID NO: 28426
  misc_feature (1)..( 3000): 2750-1469P.txt file - cDNA_ID_2996742; gDNA_ID_2926267; Annot_ID_204968

SEQ ID NO: 28428 - DNA, 3003 bp, Unknown
  misc_feature (1)..( 3003): 2750-1469P.txt file - cDNA_ID_2996746; gDNA_ID_2926267; Annot_ID_143340
tattgccatgactcctctcttgttttcaactcaagttctcagataattgtttaattctctccattcatcatacttaatacgattagtctcacatttttggtttttaatatctgatttttaaagttaaaactccttcagaagtctttgaaatagaacagagtagctagcaataccaaccatgtgtgtgttttcatgtatgtcatcaatctgacaaactcatattcttcttactagaagctaaccagttaacaagcaagatggggacaaatcgacactggaaaaaccaacatcattgtaagcaagtcactactcttcttgggagttgcatgcacccctcaaggctcaagctgaagcggattctcatccacaaatatcatcaatatatatactaaatttaacaaattgatatgaaaactaatcttaggatactatttttgttaacagatcccgccgtcgtttgaataatccagataaaataccaaacgataactatttttttcattattttagctttctttccttttttacatattcgtttgattaaatttgaaaaacgtttgaatgtttcaataaaatcgagtaacttaatttcaatattttgctgattcttctgttgatcaaagctaatgttatacaatcacttctctttggcaaacgcagcaaagctgaaaaatagtaagggggataaaaggggatagcgttagtatcactaaaatttatatagcatctaaagaataacatttcacgaaattactgatgatatattgatatggtatagctttgggtagtactaagacaactgatattttaccaaacaatatattgttcaatcatacgtcttcatatcgaatttatttgctttccttttctagaataaatgtaagaacttgaaaaaccaacatgttttcgtccaaaaataataataatctatttagcatatgttgatcatgtcagtaatagaagaagaaaatcgcaagaagacgatactaaccttactgttttggagccaatgactaatgcaatctttgtggtatttgtgagtacagggtaaaattgttaatttatctccgcgaacataatctgaatggcatatcatacacctgttttccccatttttattgttattaaattttagcagcatttcgcacaaaaaaaaaaaaaaaaaatttagcagcatatataaatttaattgtatatgttattcactggttctatctattttctacgtcatgtacactttttttctttctttcaattaattttagatttaatatgggtgaagtctatactttgtaattgtaaaatcagaaaaacatttatgtaaggaagggagatatataaagatagtcatgtacttacattttatcttctagagaaggtttaaacttgatggtaggtaattgagaaatttgtccctctgttaatccttcacctacacttgtgtttcctctttcacgctcttctatccgctctattatttcctgtgatacaataagaataatatatatatatagtaaaataaatattggaccagtttcggtctagacataacggtgagagttaatattaaaatttcaggcgagaaaatgatacttgaaaaatattatgatcgttttggatattccttacatcgagtgaatgttggtttgattcatcttccaagtgttctgcaaacgtatattaaaggtttattaactggtaagagattaaccgggttttggttcagcatataccatgattgactaactgatcaaatagtctttacttattatataaagacgatactattggtcatgctacaaaatcaagtcataccatatcctgagaatgaatgtggagaatcgttataaggcataagtgtgggtattgatcgtggtacgaacaaccgccttggcatcaacattagccacgatatccaacatttgaagcattgcctatggcgagtgtttggttggttttgaaactgatgatgataaccagaacgagaaatgtcttgtgaagtataatgttccgatgaattgggattataataatgtgtagacattgtaggttggttttgatgatgataagtaatcattggagaattgtctaacacatgcactggagaattattgactctaccacgttctctttgatattcctcgattttcctcgtgatttcatcagcctctccgaaaaagtaattgtatccactagaactttgggaatctcccatctaatttatgtattagagaagttataatattttggggaaatagattttctctactgattttgttgtgtgacattatatttttataagtacatgtttctgtttcgttatattgttgtcgtggttgagtctttattagagcatgtaaatatgtttatgaaataagcgagaaaggaattaattaaacgtatcgagtgataaatgctttaatggattcgagatttagtattcttaaatttttgtttcattatcattgattataaaactaagttatgttgatctcaaatccttaattatgttctcctaagaagagtacaagtggtgggaacgaaagatgagtaaaatactaaaaatcttttctcaaaagtcaaatcgcattagttaacaaaaacaaaccatgtgttaccgtcaaatcaatgtgtttaaaagatgttaaccactaatcaagcatttacgtgtaaccggatcaaccggatttgggttttgaatatgttgtggagatgtatataaatgataaattaattgaatatcttaattaatctgtgaaagaaactacatcacacactttgttatttcccctagcttttagttttttttatcatgcaaaacttatgaagtaactagatcaagatcataaaaaaaaagcatcacttcacttcatgacctaattattctcgaagcccaaaactatttacttacacttctattctataaatatagatgatggaattcaccaatccaaaagtgaataaaaaacagaagtacaaacaatatagtatctaattagaatg

SEQ ID NO: 28429 - DNA, 3003 bp, Unknown; identical to SEQ ID NO: 28428
  misc_feature (1)..( 3003): 2750-1469P.txt file - cDNA_ID_2996746; gDNA_ID_2926267; Annot_ID_204970

SEQ ID NO: 28430 - DNA, 3003 bp, Unknown
  misc_feature (1)..( 3003): 2750-1469P.txt file - cDNA_ID_2996750; gDNA_ID_2926267; Annot_ID_143341
aatgcaatctttgtggtatttgtgagtacagggtaaaattgttaatttatctccgcgaacataatctgaatggcatatcatacacctgttttccccatttttattgttattaaattttagcagcatttcgcacaaaaaaaaaaaaaaaaaatttagcagcatatataaatttaattgtatatgttattcactggttctatctattttctacgtcatgtacactttttttctttctttcaattaattttagatttaatatgggtgaagtctatactttgtaattgtaaaatcagaaaaacatttatgtaaggaagggagatatataaagatagtcatgtacttacattttatcttctagagaaggtttaaacttgatggtaggtaattgagaaatttgtccctctgttaatccttcacctacacttgtgtttcctctttcacgctcttctatccgctctattatttcctgtgatacaataagaataatatatatatatagtaaaataaatattggaccagtttcggtctagacataacggtgagagttaatattaaaatttcaggcgagaaaatgatacttgaaaaatattatgatcgttttggatattccttacatcgagtgaatgttggtttgattcatcttccaagtgttctgcaaacgtatattaaaggtttattaactggtaagagattaaccgggttttggttcagcatataccatgattgactaactgatcaaatagtctttacttattatataaagacgatactattggtcatgctacaaaatcaagtcataccatatcctgagaatgaatgtggagaatcgttataaggcataagtgtgggtattgatcgtggtacgaacaaccgccttggcatcaacattagccacgatatccaacatttgaagcattgcctatggcgagtgtttggttggttttgaaactgatgatgataaccagaacgagaaatgtcttgtgaagtataatgttccgatgaattgggattataataatgtgtagacattgtaggttggttttgatgatgataagtaatcattggagaattgtctaacacatgcactggagaattattgactctaccacgttctctttgatattcctcgattttcctcgtgatttcatcagcctctccgaaaaagtaattgtatccactagaactttgggaatctcccatctaatttatgtattagagaagttataatattttggggaaatagattttctctactgattttgttgtgtgacattatatttttataagtacatgtttctgtttcgttatattgttgtcgtggttgagtctttattagagcatgtaaatatgtttatgaaataagcgagaaaggaattaattaaacgtatcgagtgataaatgctttaatggattcgagatttagtattcttaaatttttgtttcattatcattgattataaaactaagttatgttgatctcaaatccttaattatgttctcctaagaagagtacaagtggtgggaacgaaagatgagtaaaatactaaaaatcttttctcaaaagtcaaatcgcattagttaacaaaaacaaaccatgtgttaccgtcaaatcaatgtgtttaaaagatgttaaccactaatcaagcatttacgtgtaaccggatcaaccggatttgggttttgaatatgttgtggagatgtatataaatgataaattaattgaatatcttaattaatctgtgaaagaaactacatcacacactttgttatttcccctagcttttagttttttttatcatgcaaaacttatgaagtaactagatcaagatcataaaaaaaaagcatcacttcacttcatgacctaattattctcgaagcccaaaactatttacttacacttctattctataaatatagatgatggaattcaccaatccaaaagtgaataaaaaacagaagtacaaacaatatagtatctaattagaatggtatctctaaagtcccttgctgctattctcgttgccatgtttcttgccaccggacctacggttctagcccagcagtgcagagacgaactgagcaatgtgcaggtgtgcgcgccgctgcttctgcccggtgcggtcaatcctgccgcgaactcaaattgctgcgctgccctccaagcaactaacaaagattgtctatgtaacgctcttcgagcagccaccacacttacctctctttgtaacctcccctcttttgattgtggtaagatgatccatcgattaaaaccttttttactagatttttataaattattccatcaatagtgtttgttttatatttgttctcatgattttttggacttatgttttgtgaactgtgcaggcataagtgcctagttgaacaacattcagttccgaggatttggggagtttggtctgcaaacgacaagacgaataaaataaaataatgagaaatacactatttagtgttttgttttgaatttggtttgttcaatacttatgacagatctattgaatatcgttttcaccattattacggaatattttctataattggcatcattgtagtcttgcttttacaataggcgtgttaggttaacatatgcaacttcaggcaaaactcaattcaaattttaaaccaggtttcaaaagtaaaaactaccagagagattcacattgacaaaatcaaatgatgtaaaaaggaatcgttggtttgaagtttgaaccaaaccagagatttggtttggagtagaccggaaccactgacctattgactaaaagagtcaaaggatgcaatcttgtgacgcgtgtaatcaacgcgcatgacctatggtccgtattaaaaaggttactctatatgtatcacactttagcttctccattcccaattgtctcttcttttctttttgtacttgtcaaaaacaaaaagaacaacaaaaaaaatctcaaccgtagaaaattccgacaagagttcagttcatacaatgaactaagtatg

SEQ ID NO: 28431 - DNA, 3003 bp, Unknown; identical to SEQ ID NO: 28430
  misc_feature (1)..( 3003): 2750-1469P.txt file - cDNA_ID_2996750; gDNA_ID_2926267; Annot_ID_204971

SEQ ID NO: 28432 - DNA, 3003 bp, Unknown
  misc_feature (1)..( 3003): 2750-1469P.txt file - cDNA_ID_2996754; gDNA_ID_2926267; Annot_ID_143343
caaaattatcaacgtgaggcagaatcccaattgccaagtttatcaagatgacaaacaaaagcgtcaggagtgcagcaatctggtacatatgctcagatcagaaacatgagccaacatgatggagtgatttgtatgtttgaaatgaaaagcagattggtattaaccttgttagagtagattgtccagttggtgaaaagttcagagagcattgagccaaggaggccaaaaagagcaccagaagctccaacagagatactgtttctgataaacaacgacgacaatacactccctccaattcctgataataggtatataactccgattctaactgaaaatttcaagaaaccaagattcagatttctagcaacagaataacacaactagaagaatgaagactaaatccacccaaattgcataccaaaaccaaattgctgctcgagacgaataccaatgaaaacaaggcttaacatattggctccgagatgaataacacccgcgtgtaaccatatacatgtcaagagacgccaaccttccttcttctccacaactttgctccactcaagtgctcctaacttctccaatcttcaagtatatatcaaccaaaacacaatcatatcaaaatcttgtatctcaaactctcaatcacataacttcatcatttcaacatctcaagatccagtaaatttcgatttagtaaccgacaaacttgagaaacagaaccaaaacgtgattctctagtatttagaaccctaaatcaacatcgatacaaaatttagaaaacgtacgtgtgagaagatggaccaaagagaggattagttcggagaggctcaaaggagagtctaccgagaaacttggcgacacagtgacctctgagacggtgagactcgaaatgattcggacagttattaacgaacatcgccacgacgaaaaccgcaacgttagccacaacgaacatcggaacaagccacgacgtccaccgcgacgacaacgcgttatcgccaaattcagtagacgacgacaaggctaccggcagaggcggtggtccgattcgattccgatcaccgcctctgcttccgattcctcgatctttcgccgacattctgttctccagatcatcatctccgacagccatagtgatctctctcttctctgtctgtaatttgtttattgttttttttgttttggttggtttttttttttttttggattgaaggcggtaagaagagttaaaccttgagagtgggtgagaaagtgggtttctgttaaccaattaaatctttccacgtgtaaatgtataataccggtttttgtggtacgtgttacggtgtaccgtggtctattgcacactgtatcgtaacggagctaacgtgcgctggatttccaaatttgctttaagagcatctccatcggcaaaagtggtagagagtatctcaaaaaataaataattaatattttaattaaattaatatattttaattagtttaaagtaaatgaaccattaattgaatgacaattctgaataaatgctcagaatcttctttcttgccagaaacatttctccacttttctctcttctttcatattttttctctttttaattattatttaattgatgagtatctcaatcagatactccgatagtataaagctgtgatgtatgatactttgctcttgtttcctttgtctttgggggttcttaagaaagtttcgttggctcgtgtaaatgtctaaacttctggacttgataccctatcaattaataatatcggaaaaacaacatatatttgttatgttgaggactctctaacgtttaaattaatatgaacaacattattaaatgaataatcgggttccgaaaatatagtaatgagtaaagttttaggtcttagtcgaaaatcgttgaagacctaatatgatatttggtggaatgatatcaaagagatttttttccggaagagatgattataatgttttattcgaatgtgtggaccattaggaatattagtttagagatatagaatgttatttgtgggagatgggtaaaatccctcttagaaaaaggatcataataaccatgccggtaatatgtgtcttattgatcgtggaataaatgtatggaattgcatggtggatcaagatgtggtcaccgcgtaccaagcgcatcttgatatttgttttaaaagattttcgtcgcttcttcttaaggtatatattgaacgttaaagttaaacttaggatgctagtcgagatgaccataatgaaatctctagacttatttaatccagttgaaaactcatcacataatagttgtcgtatgacattttcgaaacattgttcctttgggtttagtgttgatgtagcagctagaggtgtgccattactctttgaatgcctacggaacactcatacgatgttatatggtctgtggtcacacagagtagatggaaactatcttatgtgtgatgtgccgtcttaatctattaaagggcctttggtaaaaccaaaataaattaacctttttactaaaaaactttttttttctaaaatttgggatcattttctttactaatatttttttagaatgactttgcacccttggcaaatatctatgttgtctaaaggtagagacggataaatggacacgaggaccggaaaagatggcttaatctttcggaagtttagagctacatctttaactttgttttggtttcatgtcaacgtatcatacatagataggttgtaaaaaagcgttacgagaataagtattttctgaataaccgtaacgcctttttatatatctttaagaataaaaaagtcattaactacaaaataagaaggaaatttattggcagagaatccactttgaattacaataaataatgatgaacatttgtctcattttagtcaaaaaaatatgaatctcgtgagcctttcatttattaacctacacataatagtttttcttgtttatatatatatatggttaatggttttcagagaatg

SEQ ID NO: 28433 - DNA, 3003 bp, Unknown
  misc_feature (1)..( 3003): 2750-1469P.txt file - cDNA_ID_2996758; gDNA_ID_2926267; Annot_ID_143344
cataactagcagaagttttttctctacagattcatcgtttgaggagttctgtgagtttatcaaggtaggtatggtttcttaaatcttcgactaaagtttcaattcttttcaatttaggttttctgttaaacaaacgaggttttattttttaaacaacatatcacaaattcacaatagttgtttaacttttttgttttttgtttttttctatgactataacacatgaaaaggtcagatatgtatcatcatcttcaaacgaggatttttctccaccaacaaaatgatttgctgagagcagaaaacagagctaggattcatgctatgacctctccatcaatctgcagatcttgtgaggagcccatcatttcaaccgaagagagggagctatggttggagaatgctcgtcttcggtccgagattgatacattgacttgtttcatatggagattaaattcgttcaggaacctatatcccgcatttgctacgtctttgactgaagtgggttacggagtggcggttatgacgtcactttcgctgaaagaagttgtttttcttgcgaggcaaagaactccgatgtggacaagtaacgggagattgaatctcgacgaatactactctaaattatttccttggtacgcaagaaacgcacccgggtttgtacatgaggtatcaagagcttctgcttttgtcccatgtgatgcttcatcgctcgtggcaaatcttatgaatcatgtaagtgtgtgacaaactacatgaaatcataataatatacacatttatccttttttcttatattgtttatctattcaggtaagttggcaaaaaatctttccgtcaatcatcgcggatgtgtctgtggaatcacaacaacggggattgcaaaaggtaccaaacatttatttattttccgtacaaaaattagaactagtgataattttatatctttataattgtagattaatgtgaattttatgccacaaatctctcctctcattcaaactcggaatgtgaaacttcttcgacgctcgaggcatatagaggatgatacatgggctattgcagaaatttctatgtatttcagctcatatgcgcaacatttacgtcctgaatatatgagatttccttctggatatcttatccaacatatagccaatggtatctctaaggtatatttcaatttcaatagagtttaaatatatataatggtagctttgttctgattttgttattatttgtaggtaaccattctcgaccattgggtttacaaggaagaagaaggcatgaacactttcaattcaaactctgaatttggtgcacagagatggctcactgctctccaaaagcattactacaacacctgccccgtttctattccttcaattggtcacaatattcaaagtagtgaaaattctgttttttaaagtttttattgttctattcatcaattttagtttgattttacactaaccatgttttttaacgtttgtacttgtttagtattcgaccagatctgtcgcaagaacttgcttaacctatcttcatttatggttaacgtattttgttcgggagtttgcgggataactggacaaaggtggaatcggttgaatacagttggagtttcggctaataacattagaatgttcacgcaagaaagtcgaggcatgagtgggatcccttgcgttttggttagcgctaccggtttagctagaatgcacactaaaccagaagtaatgtttggattaatcaacggtgcagaaaaacaagaaatatggagttatttagagtctgctaaagatatgaaagaactaattcgtatcggaagacatcctaattcatggaatgaagtctctgttttcagcattgaggtacgtaaaaaaattcatttggtttagtaataccaatcgattattgagcatttgatttatgaatagagaacaattaaatatattgcagtggaagggttcgaaggagtggtatctgattcaagaaacatactacgatgaatcaggagcaatgataatccacacttgcgtagaagcgccatattttgcagctgcaataaacggtggggatttgtctggcgtcgaactgttacccagtggattcaccataataccatgcgaatcacaagaatgtttcgtgacagctagttgttatgttaaggctgaccaaactatggtcacgagtccaaatgagctggggagttatatggagaacatggtcactaacattctaggaaatgtccaaaatgctcttccagtccaccgttgaagttttatggcttatgaagtttttaccgttcttgttgtcgtcgtcgtcgttattgctattgctgcatgttgttgttgttgttgttgttgtcgttgtcgttgtatgagagtttgaatttggaactttatttctatgaactttattatacacctatcattaagaaataacaaataaatggtgattatggttttatctaagtttttgaaatatttcatatgttggtaatggatttgggatagtaaaccaactaaccataataaattagatcatataacagttttttatatggtgattaagaagaacaagcaaccttatgttttaatcaaaaataaaaatatgaatcaagcaagcaaactcgaagatgaactacaaagacgccacgtggacgagtggggcaagtgaaagtggaagccgacgaatcaaaatggcaaagacgaattagatgtaggggcaaaataggaaaatcaggtttatgtttcgcctgcatcttcctctggtctttctttttgtctcagacggacaaaaccagagagagagagagagaaagagaaaagagagttcgcgtgctgtttgagtatcatatctaatcccagattctttcttccttctctgtatatttccacgacggttgacctaattttcgtcaccatccaattggatttgagaagagagaaaagtattctcatcatctgaagaagaagaaagatagattgatagatagagagagaaatg

SEQ ID NO: 28434 - DNA, 3000 bp, Unknown
  misc_feature (1)..( 3000): 2750-1469P.txt file - cDNA_ID_2996766; gDNA_ID_2926268; Annot_ID_143349
gcatttctatgattctatatatataagatgcctaggtcaactggtcaagtagtatttgatgcaatggcgtagagtgggaacatgcggtggatcgcaatacccgttgattcagcgacctcggtctgatcttctgtagattcgactgataatctccaatcaaaccgatgcactaagttagccaaaacaacctcattcaacaccacagcgaatgatattgctggacaaatccttcttcctgatccgaatggaatcagttcaaaagcctgaccccggtaatcaacagacgaatctaaatgcctctctggtctaaactcctccacgtctggtccccacgtcgcagcctctctcccgattgcccatgcattgatcaatacctgtgtaccggctggtatgtggtgatctcctaatctgacatcttgtgttgattcgtgaggaaccatcaatggaagtggaggatggagcctgagtgcctctttgattacagcttttaagtagctcatgttttgaatttcttcttctgacacacttgatttatccttgcaaatcgtgcggacttcttcttggagtcttttcagacactttggatgacgtagaagctctgtcattgcccattccataagtgtagacgatgtatccgtaccacccacaaaaacattctgaaaagttaaaaccaaaacaagaactactgttatatacttactaacacatcatgttgtaaaaaaaaaaaaacattacacaataaaacatcataaatctgaattggtatcattcaaaagtgtgtttcctcaccatgacaattgcctttatgctaacacggttgatttcaaacccgacggtcttatctctttgaatagcgagcaatacatccacaaaatcagtcatatctctgtttccatcgacatgatcttgcacaactctctcaaagaacttatcaacatcgtttgccgtcttttctagttgacagtctaaaccgcggatccaatcaatccacgcaagccaaggtacataactccccacactaaacgtccccaatagtttatttagtctctccattaactccttaaaatccgtttcaccaccgtatttccgtcccaaagcaactttacatatcacatcgttagttaaactcaccaagatcttgcttagatttaccggcaaagaaatcgatttcctgatcttttccatcatcagactgatctcttcttctctcacttctcgaaaggatcgtaccattttgttgctgaatagatggaggacgcacacacttttcatttgcctccagtactctccataaggagctgaggccacatcatgcttatcgtaaagaagtttctcgaagatttttgaccgtggccggcttgcgaaaacacggtcatgcgtcttcaaaacgtctctagccaattcagctgaagatactacaagaacggggacacggccaaagtgaagaagcataagaggaccgtaccggtggctgagagagcatagtgatcggtgagggtggcggccgagttgatgaaggtttccgatcaacggtagtcccggtggtgacggaagtgtgtttcttttcttccctctcttctgttttctgaaaattatgatggtaactacaaagattattgagcataacagaaagaacatgatcatcatgtctggattcttcaagtacatcaaaacgtgttcttgtgaagagtttttatttgtggtttttttggacttacatatacaagccaagtttcttcacggtagtactagtacgtaattactgtccactcaatcttttggacttatgtatttatgcatgcaccagtcttttaatgtttagttcttcgagatttttccttgtgaaagtcatttggtgcgtttacgatttatgtcttattttggtcgtgtcaccgttctagtctttcggtgcttccacgatgtgtcttaccaccatacaatacaagtgcctaggataatggtctcaggctgccgtcagctctaaggatttatatactctgggcccaatgggccttacaaaaatttgatgatcattgtatataatcggtttttaaacggctgaaccgccaattcatactcatcaaaaatacaacgacaacattgttcaacaaacaattctccatgaaaatttaaatgtcctaattcgtctcaaacattctgtctccaatatgtaaaacatttatattttgagatataagtagaagtaatagattataacaaatgatcataacattagtgtagtgatttgtgtcagtacaagtttctatttaaagtgtaacaacattgaatatttatgtttcaccaaaaactatgactattattctattaatcctgagagagagagcaaaaccctttagtgaaaagtttccttaagtttaaaagaactgaagctgaagtccaaattgttgtttacacacagtaaaatcgaattcgttaccatgacaagcgggttcaatggctaaacattttgtaatttaccaaacccattattcgatttgtaggatagtcaattatagggttcttagtcagctaaaacagtgacttaagagttaagaaggggaaaaaaaaagtccgaatattttatattcacaacaccatgaagttgactgaataagcaaaataattgattagagtaacatgacaataaatgagaagaaaatcaaataaaaaaccagatccatggcgcgaaaaaagcaacgacccacacctttgccacgtggtcttgtccagtggatctgagtgtcctaaattcgaagatgagaaagagagagagtgtacaacattctacagtcgacaccattatgatcagcagctggaaaagcttaagcttggttttaatggcacaaaatctaaataatcgatttatacacaaaaagacagctaagtaatgattattattattatcagaaactgcttcaaaacttgttcttccttgactaaatttctctcttctctcaagaactcctatcatctgttttgaattgcaagtaaccaagaatg

SEQ ID NO: 28435 - DNA, 3003 bp, Unknown
  misc_feature (1)..( 3003): 2750-1469P.txt file - cDNA_ID_2996770; gDNA_ID_2926268; Annot_ID_143354
cttgtagctgtctaaaatctagcaaaataggtattaaaaaaagtaaaagatttcttttttgtttggtcaacttacttgtattgtggagagattttttacctttactatataggatttgagagaatatatatttaatgcaaatttactttcctactatacttgggcaaaacagaagaaaatttgagtggaccctcgttacgtaacgcatagaagaaacttggcttatatataacgcaagtggcgaagtccacaagaagaacacaaaaaacttaagaaactcttcacgagaaaaacttgaagaacttaagaatccaagtttacaaaatatgatcatgatacttttcttatgcttaataatattgttcatcataaccattctcttcttcaaaaaacataagacagtgaacaaaatcatcaactttccatccccaccgagacttccgttgatcggaaatcttcatcagcttagccaacatcctcaccgatcactctgctatctcagccaccgttacggtccactcatgctcctccacttcggaagtgtccccgttattgtagcctctacagcagaagcagctcgagacgttttaaagacgcatgatcgcgtttttgctagccgtccacggtcaaaaatcttcgaaaagcttctttacaagagccgtaatatggcctcagctccttatggagagtattggcgacaaatgaagagtgttagtgttctccatctcctcagcaacaaaatggtacggtcctttcaagacgtgagacaagaagagatcactctgatgatggaaacgatccgtaaatcgagttctaaaccggtaaatcttagcaagatcttgtcgagtttaactaacgatgttatatgtagagtagctttgggacggaaatatggtgttggaacagattttaaagagttaatagacaggctcatgaggcaacttggtacgtttactatcgggagttatgtaccgtggcttgcgtggactgattgggtcagcggtttggaggctcgactggaaaagaccgctaatgattttgataagctattggagagaattgtgcaggatcatgaagatggagacggcgacaagactgattttgtggatgtattgctcgcagctcagagagacaagagtttcgggttcgatattgaccggttaagcataaaagcaatcgtcttggtaagggaaaaaatatatatcaaattcaaatccaatgttttagactattagtgtagaaccatgcattaattgtttatgtctataaccattatttgtttaagtatataaccattaattgttttggtcttgatttcacttttcaggatgcttttgtgggtggtacagacacatcctccacgcttgtggaatgggaaatgacagagcttctacgacacccaacgtgtctaaaaaaacttcaagaggaagtccgtacgatttgtaagggaaaatcaagtgtgtctgaagatgacattcaaggaatggaatacttaaaagctgtggtcaaagaggcactcaggctacatccaccagttccattgatggttcctcatcaatcaacacaagatgttaggttaagagataaccatatacctgccggtacgcaggttatagtcaatctttgggccgtcgggagagaggctgcgacgtggggaccagatgcgaatgagtttagaccggagaggcatttagagtcgccttctgatttccggggtcaggattttgagctgattccttttggagcagggagaaggatgtgtccaggaatatcatttgctgtggtgctgaatgaggtagtcttggctaacttagtgcatgggtttgattggcaatctatagacgatgagaccgatgttgctgaatcaatcggtagtgtgattcgccgcatgcaccctctttacgtcattccatcatctactacttgattaaggcttattattatgttatgtctacaataaacctgttcatttgaaaatgttgtaagctaagatatgtttgagattttaaagtttcgagttcctaattaaaccaatttagaaagcaaggtgagcttacttgattcattattctgtacaacaagcatcattttttttttagattttagattttataacgtttatatttttttatattttaactttaaaatataaataaatttgattacagaaaactgattagagagctctgatttggattagtcgtgaaagaggtgaaagtatacatcaaaatttgtttaaagtaaaaatctaatgatttgttaaaaaatttgaataacaggtgattttgttgtatttaaaacctcatggtacaaatgcttaatccaataagaattaatttatcgcatttgactttaatatacgttcaattccattagttcagtagttttgcttgactctgctatttgttactttgacgtgattgcatgactctctacctcacagcttgaattaatgtaagtggaaatattcttagtcttacttggttgcatttgttctctctctctccattgttttgttgatgaaattcttaaatctcatgattttgccggggttagggctttaccttgcacctatcaagaaattattaacgtgaaacgcctcttctttgcacatatctaaaaagagcaatccaaatagtaaaaagattagatgagaaatcctagtcctcaaagagaacttgtgcactaagacaatttgaaagattcaacgttttttttttgtcaaacgttaaataaatgaattttgagaagaatgataattatccatatgggggagagaaataagaaaatttgagtggacagtagttttggtcccaagagaaacttggcttctatacataagtccaaaagaggtacacgaaattctggcttactagaggtattttgtggttcgttcactctatttccatatgactcagatcatctaagttcaaaaagaagaccacaaattcttagaaactctttactagaaaatcttgacgaaacttgaagaatacaagcatg

SEQ ID NO: 28436 - DNA, 3003 bp, Unknown; identical to SEQ ID NO: 28435
  misc_feature (1)..( 3003): 2750-1469P.txt file - cDNA_ID_2996770; gDNA_ID_2926268; Annot_ID_204996

SEQ ID NO: 28437 - DNA, 3000 bp, Unknown
  misc_feature (1)..( 3000): 2750-1469P.txt file - cDNA_ID_2996774; gDNA_ID_2926268; Annot_ID_143356
aatttggatcacacacgtgattatgtaagactccaccatttctaagatttttgtaaagatagcttttgtatccccaagctatttgcattttcgaagcttaaactatgaactttatgattttttgattagccactacgcatccaaaacttttaattccacaccacatgaaagcatcattattaattggagtagcttttaagaacacacgtcttaaaccatgcaccgagcaattacgtacaaaaataatttactaatatcgaccatttaatgagtaatgtactgatcttaagaaaacatgtttctccatgtatcccggtaataccatgtggatctacgaaaggatctcgtggcgatttttgtacatttccataccttaatctctaattagttgttattcaaaattctcaaggcaagatgcgtgaacatttggcgcagcccatttgttgaaacgtggtttcatactacatatattaaaaacaaaagagaaaaaaaactcaggccacaagataacaacgggcaagtagtttttcaaaaacacaataaaaaacaattatggcggttttatttaagttgttaggcataacattggtgtttaacaacaaatgtaatatttaaatatgaacaccgatcgtgggttaagactttctttataaaaagctaatgtcgttttaggtagtagatatgaatgaataattggaatggatcttggcttaatacccggcgtcgtggttggataatgatgcttcctaatgcaaggaaacatattttttatttttgttatttaaataatttacgttgatctcgtaatcctaggccaattgatgaatattcataatttcatatgttcgaaagagatttcacttttctgaaaaaaaaatacatatatatgtaataatttttttaattttttttttgtatgactcccacggataattgatggagttgagaaaatattgtagcttttatgattgatgtatgagtttcgaattgataattgtctcacctctattaggagattgaataattttcattttcaacatgtaccgatcttatcttggttttaagcctatgtaattacgaattaatatacgttcatttttttataatatttttttttgtataagcttgtgtatttcataagatccccaaaatgcaacgacgtggtttgatgtttcctagtttcttggaagtgactctactattttattggttatgaatattatacgttcgaaacccaaaaattttaatttacaatgacgtgttctttttctagggatcgtggaccgatccaaacagctggcgtgtctgaactgtccttaaaagcctatccaattttaaatccaaaacgttagaagattcccaaatcttttgaaagattcaaataattgaagtctgaagaggattccaatcaaaaagtccgatagaaacatttttggctacaagagttttttcccacctctaaagtcaatacttttgtgtcattttaatatatagttatttatgaaacaatctatctatataatttaccatcttaatttttatatatcgtacagttgcaaaatcattttaaaaagttttatgttgttaacatatctcaaaattagttatattcgcaaacactgtgtgtggggtgaatgtcctggtaatcaaatcggaacaaaacaaacgtattaaaacaaactttgagaaagctgaagaatcataagtcgcaagaaacaatggtctaaggatgattcttgaaattaggtctgattaccctcgggttaatacccactcaagagatttggaacaacaagtaatctcaatggtagaagcaagaaactctacgtgtcaatcttatatctagacgatcactgcctaagcaacccaattgtgtgattgactgatttcctccattaaaattttgttgatgaatgctaatcctcatttctggctaaagaaactactcaataatcagcttgtgtcgatctatatcaagtcagttacagcagaaacaaaaatgacacaaacccgccatcggatggcaaaaccaagttcttaaagaatctaatgatactaccttgatctcatccagtgactagaaaacaaccagactttaacctacaatatctcaggatctaggtctccctaaagagcttagaagagtaagtaatttcatgtaacacacttagctttagatatcaagttatatgacactatccttggtggattaatttaccaggatcaagacacttgcatgaactagcggatcaaagccttgggattgctcttaaacatgattggttcctgagaaatctgtgcataagattcgccatactcagattaaccctaaagcgaagcctacgacggtcgtgctcgtgtgttctctcgtaatcattgaggtttttgtggagtctgaatcttcaaaacgacgttttgtgtttttacgttataaacttctaaacgactacatttcaggttccattttggtgatgagaaattaaaaaaaggtgccctcacgcaggatcgaactacggaccttcagtttacaagactgacgctctaccactgagctataagggcaactttgctcagttatctgtgatgtgcaaaaaaattcaaaacctcaaagaacagacattttgggccatatatacaaaaggtaaaaaatatgggataaatgctaaaataagatagagaaatgttgcaaacaaaaagaccataaagtagcaaaaacaaacattttgggccaaactgataaagaaaaatagtttggggatacaaataagaaatactaaaatataaaaaagctgtggggaacgttgcaaaataaaattccccaaaaacacgcgcacgataatgattccctttactcttgttgcgtgcaatttccgctattatgcgcattcgtcatcactttcccattcctctccgatcagttcttctctctctcacactgcttttgcctccattgaacccttcttctctctgctcaccggaatatttctctcacaaaagatg

SEQ ID NO: 28438 - DNA, 3003 bp, Unknown
  misc_feature (1)..( 3003): 2750-1469P.txt file - cDNA_ID_2996778; gDNA_ID_2926268; Annot_ID_143358
agtcatcagctttccagtcttcaatgccttcgtaagtatatgttgcctaataatttatattgaaatcagccttctacattgtcttcttgcagactctaagtgggtattgatgaaaggtgtgatataaatatgatagtcctctctgcagtttctcctttgacttcatttggtatgtcttcaaaatttctgtgatattttttgtttcttacctcaggtaatttgaagtccttatctctcttcctcaacaagtcacaagtgagtacctactccttatactttctagatctcatggagtgctttcttaatggtattattgctggttaattcatttaaactgcatggcgaaatatattatgtcaaattattaactttccaaatagttaaggtgtattgttataacagatgcggcgaacgttgttgttccaaaggcatagtccactaacgcccaatgtgctagtaaagggtaaatgtgaaacggcgacaatcgttcctcttacagaatcgtgtcaataacaacaaatctttgacaaatatctttgctgttttaacaggatgtgtgccaatcaatttttgacccgtgattctgatttattgattacttgcgttcatggaatccttcgagacgtgtttggactttggagtactcttaatgggaagaatttaatgcttgtttgcttagtttgttgtatgtaccatgggaaaatactctgatgaaaaaaatatttaatttgcaggtctactctacaaatctagttgatgaccgatatctgaactattatgtgctgacccaattacaaaaaggagttactatgtaagttagctagcactctatcacttaaaccattcacaaagaactttgttcgatccttgatatatctttgtctatgatatgtttcagaataacgttaggttatgagctaaatgatcacttgccgatctttttagtataattatggaaaacagctatccatcttttttttacggtcttgcctatcttaaggtaattcttcaccaatatagtaatttcaactcatcatttcttaagagttcattatttactgcatattgttgtctgaatgcatagtaatatttgatttcagaatgaggcttctagatctaggtcacaaaacagaggagactgaaagactgattttattaagtctgtacggtactcagaaaacagaggatctagtttcttgccatataagttatctattctagtactttttcttttaatcttatataaatatcgaaagccatgaaatcatacattcgaaagatctattaaaggcttctttttaacttgggtggtcttttttttttttgggtggtctttgtttttcaagatatgttcgtcaatctctctccacaaaaatgttaagctctttttttctatctttgttgttttcagattttagattcttcaaatcgaaaccttctccgaaggtatgtgtcctcaatctttttcttatgtttgatcttctgatttatttttttaataatatgatggtcttttcattataaatttgctcttataattttgacctttcatcttatgtagttgcagattttacagtctattgatatgtggtccaatctcattaaccaaagaactcttcgtgggatcttccaaatcacttaaagaggccggagacaacgcatgcaaaatcacacacatacacacgtacataacatacatacaaatacacacacgaatacaaacatacatgcatgcatacaaacttacatacatacatacaaatatacatacatgcattcatacattcatacatgcatacatgcatacatgcatttatacattcaaacatacatacatatatacatgcattcatacatacatacatgcagtcatacattcatacatgcattcatgcattcatacattcagtcatacattcatacatgcattcatgcattcatacattcatacatacatacatgcattcatgcattcatacattcatacatacatgcattcatgcattcaaacatacatgtatgcatacatacatacgtacaatattgttaagtcttaactcaaacaatttatgtatagaataaataaataaaaatgtataaaagaccatttttgtatagaaacattgttggccgcgcactagttcacggacataggaagggaaatgataaaactcgattagataaggtggttttcttgtcttgaactcgattaaataacatgaattattgacttattgtcgtatagcctaaggtacgtatagagtcaccagctcgagcttatttgcttttgcattactttgagtaaaataatttccattgaaatatctataatttaatttaatgaagaggacccaacccatcttcatcttatctttaccatttatataaatccactgaaaatgggaatggacgtacgtgttctattgtgtttctaccaaatatttttgcgttttaatatctttcaactgtctctaccaaatctaaattggttagacttcaatatatattattcataaagttttgtcgtgtttcacgtgtttatgaaacgtacccgttcttgcatttagtcccacgcactatctttttttatccatacttgattactttctcaattcgtcgatctcacacatattatatccggccaagcggctaagtccaccataaaaacgaattatatcgataaccggaatgttatcagaaatttacaatgtaatatttctggaatgactattaactttgacgttgttacgagtttaataatttttgaaaagactatataactctcaaaacgtacatgtaatttttagcaatgtccttggagaaaacaagtgtaacaattacatgtacgtgtaaattaaaaataatgcaaatgtcagtcaatatttcgaggaaacaatatatttctgttcccatctctaatcatttcctcaatcatataccataaaaggcataaacagaaccaaccaaccaaccaaccaacaagaagaagaatccaaagacatg

SEQ ID NO: 28439 - DNA, 3003 bp, Unknown; identical to SEQ ID NO: 28438
  misc_feature (1)..( 3003): 2750-1469P.txt file - cDNA_ID_2996778; gDNA_ID_2926268; Annot_ID_205002

SEQ ID NO: 28440 - DNA, 3000 bp, Unknown
  misc_feature (1)..( 3000): 2750-1469P.txt file - cDNA_ID_2996782; gDNA_ID_2926268; Annot_ID_143359
ttgatacacacgattatatatatacatatatatatatatatatatatttgttttatttttagtatattattatattagtatgttcccgatagaaattttgctattatagcaatacataggtcttatcatcaataacccacttctgatgtcccactaataattaacaactagtataagttatcgtgtgtaaaatattttctttcggtttttgtatacgagtaaaccctaaagcaatcgatctagttaaataaattataatataatttagataaaatctccaagaaaccatttctgttgtttaatctcccaactactgaataatataattaaggtcgaatcccatgaaaataagttatgacggaagaacatattgtaaatgtaagtttggttaacttgaactcaaactatgtgacatccaaatcttttgtctcctcgatcgtatttactttttgttgccaaggtttcaaatccacaggctcctacttttgtaaagtcaaaccttttcatttctaatgatactaacattcatagcaaaaaaaaacacattgtaaatttattatttatatatctcataaggacgagtattaggatccaaatgagaccttttggtcctccacatatcatgcggacaggatcatcaatcatcactgattagtattaatgaagttggcttttagataaagtattcaaccaataatatggggaatggacatctccgagactccgaccaataatgagaaagttaatcaaatctatttatgggtcggaccgatcactatttttctgatgcggaaacttatcaacaaactttgaattttttagctttttgttttacaatgaatctatttgcattaattttaaaactgtgtttataattaaacaagaaaaatggtttgaaatgatgaattcattggcctaggacgtgagatcaaaacgccaactccaaatccaaccaagccaatgttcatttctccacgtggcgtttttaatggatcaaaatcattgcaccaaacctaatttccaacaaatcaacatttatgcggcgaacttactccccaaatccaacgtaacaatcgcactatacactttttttttttaattccataaatttcatagttcttttttctccaaatttataattatagacagggtccaaaatgtttcatgaaaattaagtaaaaaagtaattaatattaaaaatgataaaatataggtcaattacctaaaaacagagtttttctttgctataaatggtaggttaatttttctaccaacattaaaaaaaaaaaaacactattatttagtagtaaattgtagtcttacctagattgattgaggaatttaatgaaatacttttacaaaaaaaaataccatgaaacaatatatgtgattacaaaagttaatgatctatgcgattaggaagaaaatgttcgaaattcaaagctattactaagatagttaaaaatatatccaaaacggataagaacgttcgatttaaaagtcatgtattcatttatcttatggaaaatattttaatcgaacacaaaattccgttgacacagattgagtcacacaatggataaacaaaaggatcacaattggcaatacaagagggcgtgtaagattggatgagaacaaaatgccacgagggatgaggagaggtggctcttgggaagaggcaaaggtcggtttattgcaataaccggcttttctagtttttttttaataaacagctctttgacgcaaagccaaaaacaatattggtcccggatttgttcactttccacattggattgataagaaaacataaatctgcctacatggaacaaaaaggtcgtcttgtttttcggatcacaaacaaaagcaaccttataatagtcactttttttcaggaacgtaaattatgcaaatattttcattttttgttttcatcttattttcctaatgttgggaatataatacggacagtgttacacggtgtaacttacaccgttggtccagctcaatacacaaatcaaatagaacattatctatgttaaattcttatgcatgttacaccaagtcggtaatatatattaaaaggtttaaaacaaatataagcaattgaaattaaatacaaaattgagcttgttagtgggacattgtttaactaacttctcatggaaattaaactcatcactcttgctatggttgagacattgtttaactaagttctcatggaaaaaatggggcgccacttaaggtataaaccaaaatatttgcgttaaaccctagataagctaagatgccatggaaacaaaacactgggcgagttttcttctcgtgacaattatcatcaaaaattatggaacaagttgatcctaatcctaatcctcttatcaatatctttgattgtcttaaagtttttatttattttatttcgtgataattgcattgtcttaaagttcatagttgcataataactttatccccaaactttcatgatctccacggaccaaaaaaaaaaaaacttaggaattagtttaccaaaaactccaactacttaaaatttcagatatttgttgtcagtattcaaatactacactcggaagtttcgttcgactatgatacatattctcagttcttttttgatgattcatggaagataaatttgaatatgaattctcctgttcgttataaattattgtaataaagacttaaagagtgatccagcttcatctctttatccacaaatgctattcccgtcacataaaaatgccaaaaaaagaaaaaaaagagtgataatctaagtgaaaacagatcacgagcgtgttagataagaatagagagacgcaaaaataaaatagatatttgcgagacgccacgtaagcaaccaaaaggttacggtaggacccacctcgctaatgtctatataaccagaaatgtgccaaagcctttcttcttcaaactaccaaacctacagaaatctctcttcttcttcttctctacaaaatttcaatg

SEQ ID NO: 28441 - DNA, 3003 bp, Unknown
  misc_feature (1)..( 3003): 2750-1469P.txt file - cDNA_ID_2996786; gDNA_ID_2926268; Annot_ID_143361
atatgtcattagattgcaataggaagttaatatgagaaatctgtttggttcaattgtgacggtatctaccaatttgcactaaaatatttatagccaatatcagcgaatattttcatggacaaagtatatatgctagtctagttatcatgatttgctttcacttaatttatcaccaatataagcaaattttccaggatttatctattaccaattaataacgttaggtttataaatagtctagcgataccaatattcttttttatcaagtttgatgaggaagaacagttgtatatatgatgattgtggttattagttttgttctacaatgtccatattcttaggttctaaaaatgaatttgtatatatgtattattctattcaaattaaggttgcattgtcgagaattcggaattgagtcttacactcttaaattttgaccaaatctagctaatatatcaaactttatttctgaccaaatcctatatggtttgccgtttacgttttctcccatggtctacggagtaagtgacgctcacataggcaacttcgatcatcagaataatttctttactcatgatcgtaatatataatactaatcactaggttctttccacctagattttattggcttatgagataacattctttattttgctatggtgttagtgaatagagaagaagagtgtttgagagagacggatttagaattcttattgaataaatctgtacaaggtaaagtatatatacaattgataccaaaccagctaaaccggactaaacctatgaatacataattacataatccaatagtcctccacaagatgaggcatatatgttaataagactcatcttggattgtagatgtgcaaattggtgaggaaagagtggtttagtcaggatgtctgcgatctgatcttcagagttcacatgtaacattttgagtgaaccatcatcaagcttctcccgaacggtatgacaatctatttcgacgtgtttggtccgctcgtggaagacatgattctttgcgatgtatatggcagctgtgctatctgagaagagaactggaactgaaggaagaccaatccgcaaaccagttagcaagataaccaactggttttattggcttatgagataacattctttattttgctatggacacacaaaataattagcatgtattttagaacgttctttattttaagctaaaaattatcatgcatatattataatatttatcttaaaactatgattatagtaaaaagatatcggtgtatagtcaactacaccttctgcttcacaccaaagttccaataacaaattatagaattcctgtttcacattaaacaagatcgactcgtaaatataaaagataacaccaaattactgtttggagattaaaaccaaatgtctgaagaattacagataaagtttagctcacaacaaggaattttacaaattctgatgccctcaaaactattgatatattttgatttttaaaacccttgcttattgggtctctacccatggtcggccatgtccaaactaatctctcaattaaataatgtagtcgtgtaaatgcaccaatcaataaaactctcaataaaaaaataaaacaatatgtcttccttaagtacgaatcattattctttttttttgggcaaagaatacgaatcattattcatttttagttttcagtgaacacttcgtcgagaatagcgaaggcaaataccgatgatttcttaaaacaattcaattggttgtattatatatctaaggagtggacattctataaaagacaatacttaaaagaattcaaatgaataatttgaaataaaagatttgtttttaatgaattctgtccaaatgaccggttaaatgctcgtaattgattcttcacatttgttaaaggagatttctattaaattcctttacatgacatgatcatcatacaaatgtctatgttcataaatcattgttattgcatgtataaaatattggataatcatacgaatgtcaaaatgtaaccaatttggattggggaaaaccatataatagagaataatgtcaaaatggtctccgttcataaaagtaaaaaataaaaactatgagaatagatggaactatattttcacagtttttcagcgtgaatggaacttgtttgtacaatacaaccattgtaacccaaaagaaatttggctcggattaggttaacaccgttaattggattgagttgggagttagtttgtacaatacaaccattgtaacccaacaatgtcttgttgaacccaacaatctccgacgtccgacgagtttatatgaggcatatgaccactatggtatactatttttcttttagtttattttttgttatgtaatatcttaattgttttgaaattttaattgttttgtatatcgtatgtatattttacaatatctttttgtttcatggatagatgaggaagtgacaaagtagaagaagtgagcaaagagaacacccgtggcaaagcgttaaaagactgaaaaatgaaattttgtagaagaagaaataatataacatcgagacacgatgagactaacttttgaatcaacttcattgtagtaaaacttttgtggctacgaccttagaaatgaatctattttatttatttattaatcattgaatatgtgtagtatttttatttttttacagcctaagcctttgtatttgtattatctaaaatagttctgttaattttggaagactgttaatttggtgttcatttcattcaactactgtcctctcacaatatcaaatgacaaaactaaatcatcaaatacatgaaacatgttaatattgttttcataaaggataataaaccacttatatgggcttatatgactctatattgggctaggcccatataatggtcgccacatagtcaaataagtctcacgaacacgagtagtcatcgaacggaaagttaacaaaactgattttgcctgtttggttttggatccgagatg

SEQ ID NO: 28442 - DNA, 3003 bp, Unknown
  misc_feature (1)..( 3003): 2750-1469P.txt file - cDNA_ID_2996794; gDNA_ID_2926268; Annot_ID_143366
aagaattttcaaagctctgtatcttgatgcatttgcaattagtaggagattttggtgtatgagttagaatcaacattgcagtggcatggttatagacagattttaaaagaatgcgggagccacttatggagtaacaaactctcttgttgtttggataacattcaagcttgatattagttctgggaaacttaacttgcagattttgacacgggctctctcaagtccaccatttggaaattatggggtttggtggtctctcgcggactcgaagtatgcagggacagctttgttagtgaaaaaatgtttcaagcctcgaaaagtttactttaacttggacaaattaggtatttttatagccttgttgcttgttccttatcatcacataaatctcttgcacactagcaatttgaagccatgtttcttttatctgtcttgttatggttctgccatttccttgatctcaaagttgatgtacttgggagaaatatatcatagctagatcattgatgactaacttatatacttgtcgctctcatgcagcatctaaacatgaacctgatggtcgtgttatcttagctgaatttgagacatttcgtcttttgaatacgtattcgcctaacaatggttggaaagatgaagagaatgcgtttcagaggagaagaaaatgggacaagaggattgttgaattcctcaacaaaacatctgataaaccgctaatatggtgtggcgacttaaatgtcaggtaatgaggaagttttttctatatcttctcttgctatactcttttccttaagcccttacagaataaaagttgatgttatttcctcgattcgatttttgtaatacgcagtcatgaggagatagatgttagccacccagaattttttgctacagcaaagcttaatggttatgttcctccaaacaaagaggtaaggaataccatattttgtacgatttattcattatcattatagcttttatctaaaaacagagctggctctcaataatgttattttccgtcggccttttatatctcttcctatcttgtctcttcatctgcattgtgaccctgctattgttgatgactttactacgcctgtatttctcttcctatcttgtctcttcatctgcattgtgaccctgctattgttgatgactttactacgcctgaaccgaaaggttctccgtgagatggacctttaaatcatacaatgactacagtggttttgagttttttgattatgcaggactgcggacagcctggatttacaccatctgagagaggacgcttcggggcaactataaaagagtatgcgtaatatgtctttgcactgcgaagtcttagtagtagtactttctagaatacagattagagttactaaacatgtgattataaattatatttatgggaactgttacagaggaaggcttgttgatgcataccggtatctacacaaggagcaagaaatggaaagtggcttctcatggtcggggaatcccattggaaagtgagtggatactacacattttagttttatggcttggagtccagaacctccgcatgtttctaaagctatatattgattttttgttttggttgccataggtaccggggaaagaggatgaggatcgactattttctggtctctgaacaactcaaagaccgtatagtttcttgtaagatgcacggtcgtgggatagaacttgaaggtgccatagataaacctgttcatcacacagattcatagaagattattattagctctttttgcaacaatttggttcttgatttgtttcaggtttccatgggagtgatcattgtccggttacactcgagctttcgaagccatcttcagaaatggaacagaaccaggtgtcaaactaaaatcatcttcttctgtattagaacataaggccttcttaggaacaagccaaagcttattttatcagagaatttaatttttactttgccgagagatgcattgaagatttgattgaggttattgagacacttatttagccttgttactctgatgaactctcaaatgtacttataattattgttgtgcttatcttaatatgttttattttcctaagaaatgttgatatttttaattgtgaatcttcttcatttaattatttttatttattaacttttgagtcatttctaaagatttagagcttttgttggtgtattttaagcatattataccctttgctttattgtcttagtcagtaggtagaggcaacattcgttaaaccaatggctcattcaaattcttttttttgggctcattcatattcataaaaatcaaatttggattcagcataacaaacacaataatatatgtagacatttatatcatacattaatttctactaatttcatgaactaccaaagactaaaaatgtttaatgagaaatatcttttttaaaaccatcaaaaattttactcttaaaattgggatttatgtttggttttaaaaaggagtttttgaatgtgcaaacggatttacagagaggacaacaacaaatgtgtgttagaaatggcagaatcgtaaataataagaaaatcatacccttttaaaaaccatttctctctctaactaagtgttctttacttgttttaatacagagatatcacaatctcttgctctgcccaaacccatcccaaccccctaaaaaaaatacaattttttcctctgtttctttaatccaataaaaacagagagacctaagaaacgagatcaacaaagcccgtcgtttttttcgaggaaaagtgaatgaccctttaagaaaataactctattggccggagaaatggtggagactcgtcgattctcttaaagtttgtttttttttcctctcttcaaaatttttgttctgtttatactctgtaatggcgttttaatttgatacctagaagttaaagtgaacaaattttgagagaaagtctcttttttttgttcttccctgtgtgtgtgagagagagagagagatatg

SEQ ID NO: 28443 - DNA, 3003 bp, Unknown
  misc_feature (1)..( 3003): 2750-1469P.txt file - cDNA_ID_2996801; gDNA_ID_2926268; Annot_ID_143370
aaatattttgattatcttgttaaatattatttacaaattacaagtgtaaacaaatttttatatttgtttacatttagttttggtgcaaatgtttgttctgttttattccagtgatttattcatctaatgaatccagtatattcctataagtagttaccatttgtacattttgtaaattgaaaaaaaaaactaaaatattaaggttttaaaatacaatttaacatatatatatataaataagaacaaaaaaaactttaaaatcaatcatattaaaaaggtatacatgtacacaccacataaaataattatcctcagcaccacaaaaatacaatcattcaattctcaaatatttgtggggtttaggcttacacatgttagctaaaaataaattaaaaacttatacaatttttttttttttttttacaaatccattaaccacaattttcatctaaaaggctctaaatggttagtggttactctgggatttagcggggccaataaaacttaccaaaaacgacaatatatttctttttcctttttatttttggacaaaaacgacaatatattctggtactaatattttgtggtacgaaataaactatttaaagcttaaattattcttcacgacaataaataaaattttatctaaacttaaatctcatctgccaaaattcgattatagtttatgtatatatataataatataataaaaaaaagaatgtatatagtttattctcaccactacatgtatataacacaaccattttcattagaagctcaaatttcaaatctcacttccttatcacaatgtcttcctctatctctcccctcctcacaaccgccatctccgtcgcaatcctcctcttctccaccatctccacagcggcgacaattccaaacatccaccgtccattcaacaaaatctacgccttcggagattctttcaccgacaccggaaactcacgctccggcgaaggaccagccggattcggacacttgtcaagtcctccatacggcatgactttcttccgacgaccaacaaaccgttactccgacggtcgtctaaccatcgacttcgtggcagagtcaatgaatttaccgtttctgccaccgtatctcagcctcaaaaccactaacgctaacggcacagcaacggatactcacggcgttaatttcgctgtctctggatcaacggtgattaaacacgcgtttttcgtcaagaacaatctgtcgcttgatatgactcctcagtctatagaaacagagcttgcttggtttgagaagtacttggagacacttggaacgaatcagaaggtttcgttgtttaaagattctctcttttggattggagaaattggagtgaatgattatgcgtatacccttggatctactgtgtcaagtgacaccattagagaacttagtatctcaacttttacaaggtttttggaggtaattaattataaattaagcgcataattaacatatatgaaatattatgattttagatctacaaaatattactaacaaccaaatcaagattgacatgtttctttttgtttttgtgtttttggctctccaaccaaatgtcttcttttttcattacaaaaatgtgttcaatcttgacaaattatgtttttttgttttcgttacaataacaaaataggcatttgatgataaagcagtctggcttagaagttaaccggatcatggcagaaataattctggtggtcatggatctaactgaccggtttgtgttgaattcattgtagtatgtttagttaataacatttttcttaaatcataactgcagacattgttgaacaaaggtgtgaaatatatgttggtgcaaggacatccagcaactggatgcttaacgttagcaatgtcgttggccgcagaagatgatcgggacagtctaggatgtgtgcagagtgccaataaccaaagttacactcacaatcttgcccttcaatccaaacttaaacaacttaggtcagttgtgtaaagataactaataatttgatgttatatagtagtagactatatattttaaacatatttaataaatgcaggatcaagtatccgagtgccacaatagtctacgcagattactggaacgcgtaccgtgcggtgattaaacaccctagcaagtacggtatcaccgagaagttcaaggcgtgttgtggaattggagagccgtacaacttccaagtgttccaaacgtgtgggacggatgcagctacagtgtgtaaggacccgaatcaatacatcaattgggacggagtccacttgaccgaggctatgtataaggttatggccgatatgttccttgacggcactttcactcgtcctagatttagtgacttgttgatcaagaaactaaactatttatgaatgaattgttttactgattttttatataagatttaatggttttggagtttttttttaataaacattattggatttttttatctgaagcctaagaaattttatgttcggcgcttaaatcacacaagtcataataatttaactaaggtctgagatccttggattatcaaacaatatatttcatttcaaagtgaaagaaagaaaattaaatattattcaatatagttgtgctcaggatcttgttttcaagataatgcggacatagctacagttcctatatagctcgcattgatactcctggccaaggccaagtttgcagagccagtatggtataggcttcccatcccaaaaacatttaaaaaatcctcgactttttttttgtaaaataggctctttgtaataacaaatggtcaaactacaaagagcctattggacctagaaagattcatttattagaggcccaaaatgattagtttttattgggcctaaagaatttagaaatatgtatgaagtggatctaaaagaggtaaacgacgacgttttactcttcttcttaaaaattagtctacagacaaattcttctaattttcgctctctccaaacttttccatg

SEQ ID NO: 28444 - DNA, 3003 bp, Unknown
  misc_feature (1)..( 3003): 2750-1469P.txt file - cDNA_ID_2996807; gDNA_ID_2926268; Annot_ID_143372
tgtgctgtgttatgttgtattagatggctttgtcatgtctccaactccatgccgagatggctcttcaaacttcccgagctttagaatcaactggtggaagtagcagcagcagtagcattagaccgatgaacataagtctaccttcgggtatctctaaactgacatcaatcaaacttccttcttcaaatgttcatctctagaaacgccattcccattaattcgggtctagtcacttctgtatagtagcatttcttcactaaagaattcatgtgttcatcgatttttgatatctattacaaagttttgagattagtgattacagagccagataccaaattgatttctctatttatgagtgaaaaacagcttaacaaatttgattcagcagctgacgattactcaactttagatacgattacagttgctaaaaatagatacttttcatcttccgaatgttcagaaatttcccattcagatttctaaactagtcaatgatgcaagcgaaaaaccaatgggttgccactaaacatgattaacaacaggcaacccccgagaaaaaccagaacaacagttcgatagataaatcaaagaacccgtaaaaagaaagaaatctacgcatagaagaagaaaactcttagagattccataccaactactaacttaatcagagtctcttcacccttttcaatctttccaagttcatcttccaagctggacctaatcttctgcgctacgctgatgtgttaaagtcattagaagttatcactttagtcaatgaatagttcccaaagaatgaagctcgtcacagaacttttccaagtctttatgactaaaccagtcctctttcagctgcaaattttaagcgaaacccgggcgggcatttcaagatacacgaaaaacaaaaaagccacttatcgtgaacaaggataaaatgtttattgaatgataaacttacaaaatacggcatatcttcgacgttgaagttctcaggagcgtcttctatgaaccgatgaatgtagtagaggacaaagcttccacattccacatcatttgtttgctgtggaacctgaaattataataagccaaaccaatagtgagatgtaagaatcaagaaacataaacaacttggtagatgcactcaattaccattggcacataaaacgggatttcatcaaccagacttgagtcttcagttcttccctcagctctgtatatgtccaacacaaacctgaaatcaaagaagaagcacaaagatatatcacacaagcttttaaacaaaaatatcattcttcgatacagataattgaaaaagaacaagagagagtacttgctttcttatatctggttcaagccgctgcgaagagtcagttgtttgtagtgagtcaagaaacaacatgcatgttttatcagaatcaagatcctccccaaaattgcaaaagatcaacaaagtccaatggctcctggaggaattaaacaaaaaaatagacaaatatagttacatttgaaaccattttcaagaacacatatggcaaaattaactaaccagtagacgataggaagaaaaacgtatttcttcgagaagatctgctttgtctttacggaatcgaaaacactacttctaatgttatggttttcacttttgtacatactgaaccaaagacaatctaagtagacaaaagagttctttttctcatccgagaagcccctccatacatccctattcacattagacaaaaatgtaagtaaatagacacaattccttgttattttgagtaaaaagagatattgcttacgtactctaggtaacctacaaatgctttggaattcagttttttccgtagcttggagtctaaatacttgcacttgattcttctttctgacctcccacggcgtgtgcattcgtcatagaaacaaggagcagtcaatttgaatatctccaactccttggttcgcttcggtttcgaaccacacttactcaaggcagcagcaatatgcttccaacacgtcctgtggtgtaaatactcatcttcctcacaatctgtaaaattatagacacatgttgatcaaacttgaaagttagcctcttccagagccagaaccaaaactttcacaaactacaaaaccagaactaaatatatatacattttcaagaaccatagatttcattgtcataaaaatccaaaatctaagccaattactagagagaatttcaaaattacacatggtaagatagtaagcatcaccacgacacaggaatagaaacaatctcgtcactttgaaaattccagaaagaaaaaaaacacaaactttcatcgaatcttcaaaaccctaactcccaaaattgcgttaaaccaagaaattaaaaatctttcaaaaacccccagaaaaaaaaatgaataaaaatcgagaaggaaattggaatttaccatcaataatagtaacacgagcaggactgctgacgtatttactattagtatttcgaacacgattacttcgtcttcttgacattgaaatttggtacagagagctctgagtgttttgtcttgccttgctttttattttccctcttctcttgtaaactttttgtttcgcttaatattagcagacgaattacgtaaagactcttttggccgttgattttacttactttttaatagacaacgattcaacggtcaagatgatttagtgtctctttggtttctgtgatatataatttattgaaccctttataaattttgttttgaattttttctcttaagaaaatatttctgtgtaggtgctttgggaaaatatagaatcaaacacttatttgtaattttttttttttttttttaaatttattaggtatattttgttttgccctataaacattttcttaacactcaaaagtaaaccaagctacatcttcttcctcttttcataagaaagtaacagtaataatgataaaaataaacaagtcaagtattgtaaatattacatatctaaactcatgttgtcatcatg

SEQ ID NO: 28445 - DNA, 3003 bp, Unknown
  misc_feature (1)..( 3003): 2750-1469P.txt file - cDNA_ID_2996813; gDNA_ID_2926269; Annot_ID_143378
atatatagtgtcaaaaaaaaaacatgctatttatttttgacttctgcatgactattagcacacacaagaatatatattatatagaaatgtcgtcattccactagctataatatatacatttttgatttttttactaaatagatcatatattttcgtaaaatactaattttctaaggagctgatctagtttagtggtcatacgaggaccacttacctcatcagctcaacccactaatattgagtttgtaccagtttgacaaaaaaaatacttaacttttcagaaaataaaatggaattagttattttcataattacattttcagttaataaaactaggataacaaaaacttgagttttctttttcttcttctgaaagttatgacctacgtagctaggttttagtttacagtcgtggttaacttagagactctttgatcatcaatcagttaagaccaatgcttctttaagccatttagtttattcttgatgataaaagtacgtaacatcatttttaaaaaattgtggtgagtgagtaaaagtcacgatacaaagaaaaatattcatagtttgaaaagaacgtaaagtagagatgaaatgtgaatacgattatatatattgtttacatagttaatgtataggcctttctttctttatataggattgtaaagctctttacaccgctttatttataacaaaaatagaaatgagcaaataattacgtcgaataagcactaattccattaaagtgggagctagtaagcaccaagcacactagttcaactcgtatcaatttattgtatttaaatcagtagttaaaacttgtttaatttcctcattgagaaagatttgcccactttagttaagtcttatcccaaatagcactttagttaagtctttatcccaaataacttgtttacttttacttttctattaaaattatgaatagtactgaattcactatttaaataaaggcactatgaaataaaaagaactccataaaaaatgcattaattattttatatttcttaaatatagacaaactttatagaattaatggctacaataaatattacgttgaaaatgtcgttttaatatttctccatcttttttacataatatttatatgaatttaaatttgaatgtcgatacaacgataacacgaagacgagaaaatataactattttcattagaattgacaccaaacatatttaatctcttcatttttgtcttaaaaacaaaagaacatactttcgtgacataggttcatttagtacttgatggattttcgtgccattggttcatttactcgatgcaaggcacggttccatcgacacagcagcaatgtgattgtcacatgtcgcgtggtaagacgagggttgctagagcttaccagtaaaagaagatacacaaattttggtcttatccattaggcatacaaatttaaaatataattaatatctcatatttttaattttgacagaaccaatgaaataaaacacgcgcattactgcagtgaatcccaattataaggaatctgatttgacgtggatcttcaagacacttccacgaattaaactgcatgttcttaaatgcttacacgtattacttctacaactctcttctctactccagatgtctccatcttccttttatatccgatatctaaaacgctctcaagtatagcacaatccacaacaacaaaaagtacaaatcttactcttcttttcagctagattttactaatcactcgccaagaacaaccaatggccgttcgatcaaccgtaagtaacctaagacgtcgtcgtttctctatgattcatttggtcttcacgatttgacttttatcattttgtgtttgaagggtcacttgaaaaacgtagtgcagaggttaagaacttacacgaaggcgacaaccgtaccaagatccaaagcgtattctacggcggcaacagagtatggtggccagagaaccgccaccacagcggcagcaacaaaaggtgacttcacaccagtttacgtctccataggattgatttcattgtcagtaacatttggtgtctacactgcgtatcttcatctacatgaaaaccctggcgtacgtgtcaacaagaagatgagagagaccgttcccgagatcgaagatccagatagagttctaaacgaagcggaccggttcgctaacaggtcttggtttaggaaaatagctcacgttcaagagtttgacaagcaggatgtgatctctgacccaatcaggaaagaccagtttgctcataaacctcgtgccttgacgcttaaggatgttggcgttgatcctaagatatcggctgctgcagctcactaagtttttatgaaggctggtttatgtgttttgttttccatgtttctgtcgataaataaaacatctgaaggagatcaaagagttttcaaatgggtcggttaaggttttatcctgtttcctcttggatgtattacagtgatcaagcaacttttgagtgtatttgtgttgtttcaacagcatgtaaattatctaatgaaatttcggtcgaagtaataatacaacttcgttttgcttctattttcttctggattaacgattttagtaaaaatactcatttgggagaaaccaatttcttgggtctaggtttgaatgagataaaatggttaacttcctaaccttctaagagtgtccgaggattcattcgcattctaattgggcccaggtcaaggcccaggaccaggccctagtggggtaaaattttgcacgcgtcggtgctttgttttggatgacttggcgagaggtgatagggtagtgtcacgttggcgagcgatattcattggaagataacaatcaaaatgacgttcgtaggtctaagaaatacgaggactaaagagtaaagaatatctctctctctgatctacttagtacttacttagtagttacttctctgtcttatttgattttgagtctctgttttgtctcttctcttgagattgcgataatg

SEQ ID NO: 28446 - DNA, 3003 bp, Unknown; identical to SEQ ID NO: 28445
  misc_feature (1)..( 3003): 2750-1469P.txt file - cDNA_ID_2996813; gDNA_ID_2926269; Annot_ID_205037

SEQ ID NO: 28447 - DNA, 3000 bp, Unknown
  misc_feature (1)..( 3000): 2750-1469P.txt file - cDNA_ID_2996817; gDNA_ID_2926269; Annot_ID_143379
ttcttgacgctatcaaaggaaaagatcccgatgatctctcatctagagagatcgcgtttgaagatcccttctccgttgatatcacaaaactcacagttgggtatacaaaagatgctgatatgaaggtaaacaagctgctaaatactttttccaatcacagtaatgaactagtttgtgttgattcaacatttgacttcttcaggtggtggaagttcttggttccaaaggtgtcaatatggttccttttgagctaaattatactgtggaatcggttcaagggatattgaacttcacaatggatgtagatatgttggctcattttgatgaatggcaaagaaccggtcaagaagatctctatgaagctcaagatcaatggccggttgagttacgccgtgctcgtgtagttacagcagtagattacattcaggtttttgtccatttcaacttctcattttggtttataggttggttttgtgatagttatgtccgatttatttatctatctaatttaccggcttaggctcagagagctcgtggtaagttgattcgggaagtggagaagagctttacagtcgatgcgtttattggaaatgtgaccgattgggagaaagtctgtatgggaaacctagtcggtttgccggttctagtgattccgaccggtttcaagaacataacggatccaccaaccaacagttgccggagacggacaacgatcaatgccggaatttatgcccctccagaacgtgatcacattgtaagtaaaaccaatagaatatatatcttatatgtcgttcagtgaactgaaatttaggaaaattgtgtggtaggctttggcattgggtatggcgtaccaatcggttaccgatgcacataggaagcgaccacctattgatgatcttggaccggatgactcgataccaaatcctcctcgggctttaatccctccccgtaggttacacatttgagctttcttcaatctttttttttacattgggaaatgtagtcaaatcaatgttgtgtgttttgtttaaaaagaagttatgttataagtagcatattgttctgtctcaatgagtgatcaagtcaatgttatgaaatgaacatatggttgggaccgtttttgacgatcatgctttgtagtgcgcgactctggatataaattaatctattgggattttgtctaatgattaatccgtgaaagggttttgtttccatatcgaacgtgactgacggtgattggaattttggaactagtgctgatataaaagtggaaatatacacgtgttttttattcgttttttatgtagctgtcgtgtatgtgtttgaaattgcattttttgctttactagaagaggaaatgggaattgcgtgggtatagaattttaattataataaattgtgttcggcgagttttgtgggtgggaatttattgtactacctttgactttacgaccttcgcgttctattttcgatctcaacttcttcactgtaaagctttttttcgtcggaaacaaaatattatggtgcataatcccagccctgcatagtccaaacctgaaataaataaaatcaaacgtctatattttttattcattaaagatgaattagctaaatctgaaaaagttttgattttaccataaaaagaagttttgagtcaatgaaaacatttctggcagatcccattatttattaccaataaatagtgacatttgacttgatacatattgtagttttttcttatttaaccccaaagcaaaagttgacttgatatttattttggggttttacaaattttgctcttatctataatcacaggcaattaatttgctcgccggtcttacagagtaattgccctcaattgtaaccttcaaatgcaacacttcataacaaaagtatacaagaaacaaacaatcaaaatgttaaatatgttttaagtatctatctaaatatctctaatcgatgtgagccaaagaacggaaacacaaaagagtaatttgttttaagtatttatctaatcgatagccaatcaaagagcggaaaccagataaaccagcacacgtaatggattaacttgaatagctagtggttttttttatatcatctatctctaatctttgtatataaatgaatccaaatttttttaaagactatctatgtgactatgtctatctagttataaaagaaattaatcgctaggactatatatgcaaaaaaaaatggtaagtagacttttagttttagggttgatttttctgtaaacttctaaagtgaaacagacaagtggatattcactttccacggtacgaccttaaaaccaactcttttccgtaaaaacaaaatctaacaaaatggcacctacacgtaatttattcgaaatagcgagggtaaaagagacaaatactagtcatcttccctctttcctctggtttatatttctttctttcttttagctcctctgcacaaatcccctgagctctcttcccatctcgagatccgccgttaaactctttttgcccaaactctgagcttctctctctgtcttcttcttcttcatctcctcttttgtattcaatcacagagagactctcttctccagatctatcatttggtttaatcaaggtatgttcgtcggaattatcgaagaattctcgtagatctatccattcattgattcaatttgatcttttccgattagttccgatctgatcgagcgatatagagtctcgtctgattggtttggttagctcaaagttatagtgcagatcgagacaaatgtacatttttgtgattcgttgatgatgaatattgtagtctttatgtatcgatgcatgtagcttaatctcgttagtggtttcgattatctaatcagaccaaattgatgtttgatcatatattttaccaatgcactgtgttatagtgcggccaaatgatgagtcttttgaatgatttactctgatttttgccgaaatggctttggtctaaggttagctagtgaacatg

SEQ ID NO: 28448 - DNA, 3000 bp, Unknown
  misc_feature (1)..( 3000): 2750-1469P.txt file - cDNA_ID_2996821; gDNA_ID_2926269; Annot_ID_143380
gtaaaaaaaacatgaaaaccacacacaaaccaccgaaaatagaaggaaacaacgattgatgacgaatataacctgatcgtttccagaaattcgatctttcaagatataacacaaaccgatccgatcagtgagagaatctaccggagacgaaattgcgtgtaagttgctgagcttcagaaacgactacaaccaaattcgcaagcaacaatcaaattcaatattcataaacgaagacgaaattcgcagcaacaatcaaatcctagattcagaaatgaagatgaaattcgtagtagtaacaatcaaattcgagcttcagagagacgaaattcgcagcaacaatcaaattcgatcaacagatagattcaacgatatacgagcaaaaattcctactgagaatggaaatagagagagacctgctttagatctccgatcagagaaggcgagatattccgcagatccacgacgaaacaaagtagcaccattctcagtcaatcgtcgtcgtcttcttcttcttcaacgatgcgcgcgagactgggaatttgaaaaggggaacgcagagcagactgattttaatagaagacgatttcatttcagtccctatacttttagtaatatttgggatctcactgcaaacaaactcttaattatttacgaaatttactattagtgtgaattatttcctcttttggcgctaaacttttttagctgtacaagtcacattcaaagtaaagttcaaatatggaatttttttatatgcctagaaatggaatactctttgagaaaagagtacgaatgtattctgctctttaggtaatcaagtacatatgtgaaggaaacataagtttatatccaaaaattggaatcagccaaagccataacaaacaaattaacttaaatctaagaatctgcagactcatctgggctctgaagaatctcacgaatgaagtttatgaaagagcaaagaccacccaagaagttatggtcaatgacaccattaccatcaagaacatgagcaaaatccaccagcttgacttgtggtctagcatcatcatcatttccctttaagatggattcattctcatagaccattaaaatcgaacaagagttgaaatggtagagcgtttggttctcgaaccaggtcttgagttccagcaactgcgttaagatcccgtgggaaccgccgtaaacactcgaggcaaaagcagagtcaggtttcgagccagtgtccgaaagtgagttagatgatacaaacttcctcagagtcaatctcgctccatctacatcgagcccgcgaagaagcttcctctcgggcttccagaaactcgattctttgtgatcatacacttcgaaaccagagatcctgaaacccgatgacacggttgtggtacccgtgtctttcttcaaacatttttggatgtattcttcagatgcatcaggataccatgttctcgaacccatcttaacatccattactgatggttttgtgtattctgcaagaagattttccaacaccatcatggctgctccatcagaaccttcaactgcttgagtgccgtgatacaccgggaaatatctatggatgtgttctggaacctctgtgtttgaggagaaagattcgtagaactttacctcgatttcaccacgagaatcgccctgaagtggcttgaagaaccgacccttgtcatctacgagaggaccaggcttcccgtctttagcaatgtgtcctgcaacctgatgttcagggactttgagctgcatcttgtttaaattatgaaactgaacctgaagaatgagaaattagatacagatagaaaccactcacaaaaccaaagaacacaagcagaaaaccaaaaacatgaagatgttaagagatctgtggttcagtactcaatgagccagtaaaagatcacaatgagtccatcacagccaacaatgccctagtatctaaatgtcatagaaattaacctaaaagccaagaagatcctgagacaagccacaacaacttagggaatagctatcaagtgttacaagaacaactctgcatcaatgaacctgttgtgtaactcaacaacttaggaatagctattgatctgcaaaactatcacaattttcacaacaatcagagctaaatgaaattcagattagttatcataaatctacttacagaattttccaggaatatactaattcagaatcaacaaaccacagatcgagtaccactttcctggttcaccaaaatcaaaatcaaaacttttctggttcatcgcttgaagaagaagaagaagagaaaagaaagaaaatagaaaaagaaaaacaacactgaaaaggaaaatttcctaattttagctattcaattgaagaaaatcacgaaaagttgctttttcgtataaaaggctagaactttagaaaagtacgatcccattaatcaaacgcaacataaagcaacttagatttaagtaaggaaataattgaagaactttcatggtaagagattcaagtaaacagatatacccaaaaagagtagtagaacaaatcttcagggagaaacgatggagaagacgataagaaaggtgtacgattcttcacataattgaaagtttttgtcttttgttactttttcctttgaggcaacgaagcaatctagctggataattatattattctctcttttatttaatttatgtttaattaaaacttaaaagtcagatgcagactgctgaggacgaaaactcaatagagtaaaccggttttaaccatctttaaatcataaacaaaattagtttatcattgagtatttatgtaataatatattttaagtactcgattatcgtctaattaatgatcaatttatccagtttccagttttgcattcgaattgagttcctcctcggagcagcgtcaaagtcaacggccgtctgattcttgtttatctcctaaacccaaaaacaacgatttcactgtcaccgttgtcaagctcgaatcacactagccgagacgatg

SEQ ID NO: 28449 - DNA, 3003 bp, Unknown
  misc_feature (1)..( 3003): 2750-1469P.txt file - cDNA_ID_2996837; gDNA_ID_2926269; Annot_ID_143385
tttgaacactcagcaggtcaccttgttgcttcagtgcctggaatccattcttataagccgtcttatctcacagagtctggttgctcaaataccgtgagtagcttcaccttccatcttctatgcatgcattctctgattagtatcaatatcttgaactcatcttttattggttcacttagttgttttttcttaaagaatattgaaagtttaattgtgtcctgtatattagaaattttggtctatgcatccctttcttgactaattgtatgattattgtttcacagattttcagtgaagaatttctgggatctgttgaagcatctgttgtaggtctcagttaccttttccgctctgccaatgattccacaggagcacaactgaaacgactggcttcatatatccgcagaacccgggaaaattctctcggaatgttagaacttgttttgagaagaaatacgaatgtgcctgctgacccgaatgctgtgagagtccttgttcctaacccagatgatgattcaagagatggtaggtagttacatttcatgtattacagatcgctgtatgttccagacatgaattttcattatgtgactcgtccaaatttccttttgacagattttgtccaactaggctttttgccacggagtattgcaaaatgggtgtctcctttatgggatattggattctttaaatttgtgggatatgtgtatcgggatgaagtccttggagctgcttcttgtaggagcaacgagaaggtgcaactagtgctgcatgtattacaggcagggtactcttcatatgcttatgagatactttgcataaatagagtatggatacatctaaaaatctctcttgaattttgcagggagtgtccatttcagatatgtcaaagttgattcaaccttatcatgttgttgcattgtgctcgttgattgcttcacttcagagatgtactggcatttggaggctacaagaggtaagtttgattattaataaaactaaagaatcatcctttcagacccttgagttataacgagagtatatctgtctctaactgtgttcttctgtattgggtttctgaaaggtgttaggccgttacaagtggcccgaatctcaggaatctgatttcgtctacagtaagttcattgcctatgataatggtaaacaaacaccttaatagggtattaagtttatagtttttctttttcttataataggtgcatcctcgattggaggctcagcaactacaggatttcaagctgatttttcatcagctgcaggtaaaaaagcgttacagcattttgactcccaggagtctgatccagaggtaccatttttttttgaagcacccttaaaaactgttactacaagttttttgcatgaaacgtttggtctgtgttcttcttgatcagtggggatgctggagtaacagggaagaacgggaagctccttccattaaaataatcttccctaccatagaaagagtcaagaatggccatcatggtgtcttgtcttcaagacgtttgctttgcttctctgaggtatttgcttattttacacttgtataatgcccaaagcttttgttcagaaagataaagtaaggattgctttggactgattcaataatgtactggaaattatgaacctcaaactttgtcttttgactatcttgtgcagaaaacctggcaaaagtggagacatagcaatgtgcttcacgatgcagttcctaatcctcaagatagagttggacacccaatgcatatcaaggtaagaacaaaggagagctctgtctgtgacaataaaagatttttcgagttggcgaaacccgactcttccactgtagtaaaatgtctttataaactatgaacaggtggctaggagactctttacctccacgagaggttcacgatcttcttcgtttggttgggtttacagcggctcacataatttcagtgcagctgcctggggacagaccatatccagatcctccagaaacaaccaggaccagtcaaacaatgccatcagagcagttaaaaaacttcgtgtatgtaactatgagctcgggattgtgttcgttttccctccacctcatgaagaaaccgactcatgcgaagggtctaaaattgatgatattgtcttgccttttgttgtaccggctccaaaatatggatggagtgataaaccggctacaggtttggctatgagggaagcttttgctgagtttagggaaggctctacaagtttctgtggagaatcagaagttgaggaagaagtagaagaagaagaggaagaagaagctgatgctgaaggaagaggagagtttgttgcagaagaggagaagcaagaggaagaggcttatgctgaggccttgtggagccaggttgagtcatcctcatcctccctcagctcctgaaactatgtcgtttcggaaaatacccttgtatatgtaactactgttgtttgcaacaaacataaaattttgaaaagtataataagaaatgaaataattcatttcatactctaataaaaaaaaacgaataatgtaatacattgaaggaggacttaataattagaaaaaggttatataattagatacattctttttttaaaaaggttatataattagatatattcgagtggttagaattttttttccctttgtaaacatttgaaacttaagaaatttctggtcaataaaatgtaaagttgaaaaagtaatagaaatattcttagagaaattatagcaggatggaaaaatggatcaccacaaacaataatagcaaacgaaaacgaaattcaaaaaaattcaggtctctgaaacaatatatatacccatagccatctttccatcaaatcatccagaaaaaacaaaaaaaaacaaaaaaataataaaacaaaaaaatatcttttttttttctaataaaaaaaaaataataaataaatatgagatacacaaatgtgtccattttattaggcatgttggtgatctttgtttcaccaatg

SEQ ID NO: 28450 - DNA, 3003 bp, Unknown; identical to SEQ ID NO: 28449
  misc_feature (1)..( 3003): 2750-1469P.txt file - cDNA_ID_2996837; gDNA_ID_2926269; Annot_ID_205044

SEQ ID NO: 28451 - DNA, 3000 bp, Unknown
  misc_feature (1)..( 3000): 2750-1469P.txt file - cDNA_ID_2996841; gDNA_ID_2926269; Annot_ID_143391
tgagtcacatggtttgctagaaggcgggacgacgtaacagtcaggtacatacggtaaactcctctcttgtgcagaattccccattttgaatgtgcttgaatcctcacctttctccattattggtatttgaatttgagtgttgagaaatcggttaatattgtgaagggataactaaaatgaaagtgtgagtggctcctctatatataaggtttgtaggcttgtagtcgtttattgatatttcggagttatatattaaaatatgacggtcgaatactaaattattattcttcctttttggaatatctagagcatgtgtaactgtcaattgtttatcgtgtaccaataagaaactaaactttattatcaaaatgataatataatgaacatccatatgttgtacgaaatgtataagaatgtccaaattcatatatgacgagggatattaataagatgttgggatatagtaggaagtaggaacactaacatggatttaatttttaaatggagacttcgatctcattcatagtcccaactactaaaaaacaaaaagaagctttccgcaaaaaagcatcctcttgtccggatttcaagccttcataaatatgttggacacatatgtgaatgcatgtacagataaattcgatatatatgtcgtttgagttgtaacaattctgtaaaaataataatgaaattgttatatacggtcatgcgtaaggtctaggtaaaatgtattgcgccgggttccttcatgcaatgggcatttatcttcctttgggaaagacaaaaaaatgtctgatgtcacattgtcactgacattaaaatgagaattttcaatcataatttaacacaactagcaattaagaaataatattacatcgatttttcatcgaaatacaactacctagcttctagtgatatacagtattagtactatttttcgttgggtatattagttaatttataaatacgtaatacgtaaataaaagttgcaaacaaaatgttcatcctagaaattatattttaggacaaaaagaattgttttcttgtacatgttttaaaaattcgactatattttaactttttatcccaaaaggctaaaccatatatctagtataatttttcgatcatacatgttctagttctgatgctccaacaactataaaaagtgttacaagggaaattctctggacgcatattattaggtaggtttggtaaagagaaacactcaggattagtcgaggagttatggttcaacaccccttcaatgccaattccaagccctctgcaagtattttcgagaaaaggaaaagtacataacaactaatatcaccattccacaagatcatatataaatacaagcattatttactggccattaaaatcttccctatatttgtatgttgtgcaatcaagaacaaaaaataaatatgaattactgcttcaatatctccatcaagatttaaccattttagggttgtggactttaactaacagcatatgaatcatatgaattgtgaaacacgaaaaatttgttaagaacaaaaaaaaggctatagggaacaaagcagatcatatatgttgtggtggttgtgaagttaggttatccaccaatgagcaaccttaacctatgccttatataaaaacatatatatttccataattccattcacacatatgcatatagacaactatagcaatacaagaaaattaaacgcaatttattgagaaaatacaaacagcgtgcactatgaagaagacgtcgaagatacaatttcttttcaatctctgcatcatatttggggttgtagtaataagaagatgtaacgcaacgacatactttgtaggagacagctccggttgggacataagctccgatctcgagtcttggacttcaggcaagcgattctctcctggtgatgttctaagtaagtatctttgatcatgttggcttcatccaactatatatatactacataattaaaaactcaaattaatttacagtttcccttaatgaactaattagtctaattaattatgtgtataatgtttttgcaagtgttccaatactcatcgacgcatagtgtatacgaagtggctaaagacaactaccaaaattgcaacacaacagatgcgatccggacgttcacaaacgggaacacgaccgttgctctttccaaaccgggaaaccggttctttgtatgcggtaataggctccattgcttcgccggtatgaggttactagtcaatgttgaaggcaatggcccatctcaggctcccgtgggatctccccaagccgccacttcagggattcttcaaccatcttctaaaaagaataaccctgcgaccggagtcgctagctcagccgcccgttttgttggcgacagcggttggaggggtaccatgggaatttttgtatattttatggtttttgcttttccattcatatggttttgctgattaaaaactatctataataagtgttttcatgtatatgtgtattcatatttgccctataatgagtgagagtatttatttgttgaatttctttatttttgtttgagttcatgaccaaattaaaacctaaatttttggttcgttatacaaatttcgttttgtttgctcagcaaatttcttacaaaaatgacatgtaaacaacgttatgcttaaagttattaatcaatcaatgtataataaaaaaaaaggaattagattctttgactacattgaatttgtatttgttcgattcgatagcggaaaattcaaaaaataaccgatatcggtttatattttaggtaattttatctggttcggtgtagtaaattcaccgtttgaccgtatctatatcacagatgattcactgcgattaaaagttgtggttatcactatctaatcgtgatcgctaccaaaacgcaaacgctagttaccggaagacacgtcttgagtttcgcagcatctctctcctctcctctgttcatatctctctttagaaatttctcaatg

SEQ ID NO: 28452 - DNA, 3000 bp, Unknown; identical to SEQ ID NO: 28451
  misc_feature (1)..( 3000): 2750-1469P.txt file - cDNA_ID_2996841; gDNA_ID_2926269; Annot_ID_205050

SEQ ID NO: 28453 - DNA, 3000 bp, Unknown
  misc_feature (1)..( 3000): 2750-1469P.txt file - cDNA_ID_2996855; gDNA_ID_2926269; Annot_ID_143397
atatagaaaattatcttaaacaatacatgaaacgttaacgccacacaaaagaagaagcaaatcaggcgtgactttttttttgtttttgttttttgtttgtgttgtgtgtgcacaatttggcgtgagttaacgtagatctctatttacttcccatcgttttgcatggagcatgcatgtgtaccgtaccgtgcacgtacaccacacaactcttttcataaaagccctctatctttcaacaaacatccgattagagtagcaacaatagagatcaaacgtaactcacaaaatgctctcgtttcttatcccagttgtacagttttttcaggtggttatcgctgccgtagcatctgtagtcttcttagtgttcgccggtataaccttcggtgcctcaattgtgggactaaccatagccacaccgctttttgtcatcttcagtccgattctcgtaccagccactatagccactactttcctagtcggaggggctaccgctgcagttgccctaggagtgacggcatttgctctcatactttggctctttaagtaaaatttatttattcaatttactattattttttccatgactaaagttttttgaaaaccctattcaaaccctcgaggtgcacatctcatatatccactatttatcaaacgtcttacatatcatatattataaggcatgtgtgcatctacaacgaacctgcataatgcatgttttattggttctaatgttgaataatggatgttttcagcacacaaaaaaaatctaaatagtttcatgtacacttgtgtgtgtgatgtagacataggattggagtaaaaccgaagaacaatccagctccgaaaggagccccaaccaaagcagatcaaccgggagcgtcgggaggagcgtctggagataaaccgggagaaatgtcaggagcaggaggaccgtcgggagataaaccaggaggagcgtctggaggaggagataaaccgggaggagcgtcgggaggaggacctggaggagcgtcgggaggagcgtcgggaggagcgtcgggaggagcgtcgggaggagcgtcgggaggagcgtcgggaggaggacctggaggagcgtcgggaggaggacctggaggagcgtcgggaggaggacctggaggagcgtcgggaggagcttcgggagataaaccggaaggagcaccgggagataaacccgggggagcatgggggggtaaaccggggaaaaagccaggacataaaccggagggagcgcgaggaggtaaacggcttgcgtggtggtaaggatgatcatatggagcaacttgaaacttaattattaggtttcataaattaaacctcatgtatccatctctttttagtaaatattaattaccgtagaagaaactacatgtttcaaatatcatttctattaatgtatagcatggtacaaagaaattaactatgaaacaatgctttgtttaaatgaagtaattaatcggtactatagcgtatatacatagaatggatccagtttaaccaaagcaactgtatgtgactatgtgaatgattcaatcgtgagacattgaaattgtcgtttctccattacctttttggaagaaaaaccatcgaaagctagctaagactttttttattaaacgaacttgctactatttctatgttttctttaaaatgaaaattaaatttgttactgtttcacctaaaactcaaaagtattgctttttaattttattattaaaaaaaaactaatcttatttatgttaagaaacctgtcaatttttcattgttaatttcggctctataattattaattaacaatcaatttctcaaaaattgcaatcatgattatgattagatatatattagttggattgtgatgcattttttgtaatataaaatggatgtttgtattagtttctcactcatgtaattaaacaccaaatgctagaaactagtacttttgtttctcagctctcgtctattgttatatctgcaacacgaacaaaaaccttatctaggtgttatatatcacggttatgtttatgagttagaagggattcttcaacaaaaatcacggaactacttgtatatatgtatgtgtgtatccgatcgaggttgacttccggggttggacgttgaagaagacgaattcattgattgggcttatatatgggcatgtattacttggttcaagtttgtaacacttttagctttttcaattctattcgaaaccaaaatattgggctatatatcttcatacaaccttcaagataaattggaccaattttagaagagcaaattgaacccggccgttagcgttagccaaaccccaactccttttcagtacaattaaatcaagaatttctaataaatcgtgaatttctagacatacatatcataatttcgtcaaagcgagcctacacctagttttgagctacataactcttttttttttttttttttatgattaggaggtttcaaaacccttggacccataatttcttataattagttttgtaatactaaattcaccattgagagcgacctctcgtcactagtaattcgaagatctcatattcatgacctatattaaccatcttccagtcaagtaatttcaatcgaaattcatcaaaatcatatatttaacttagtaatcacatatgatatggctaatatacgtaatataacgataaagatttcttcacgctttgatattccataaagcaatggaaatatggaatggaagaaaacatttgaattttacaagaaacaataaatagaaggcctacaaaacatgacaacccacacacacacacacgaaaagagaaaatataaagaaggacatgtaacgtgacgtagcgtagatctccattcactccaatcgttttgcatggagcatgcatgtgtgtgtaccgtgcacgtagtagagaccacacaactccttcataaaagccctctctctcttaccatcaccaaaacacaacaatccgatcagaaaatatg

SEQ ID NO: 28454 - DNA, 3000 bp, Unknown
  misc_feature (1)..( 3000): 2750-1469P.txt file - cDNA_ID_2996865; gDNA_ID_2926270; Annot_ID_143408
gaaaaggttgagaggcgtggcctttggtgacattgcatggggcatgaaatgacttagcctttgaatcaaaccacaaaaaagctttatcccttttgtgtttgaaaacaaaaggttttaaaatgataacatcaaagtcctgttactataaaggaacgatacaccaaaatagaattatgtaaaactgtttgagcttggatgtctacacaaacaataactctttgattttatttcatttttgaatgggttgttcattttttttttcgcttacgtgactatgccatttaattattttattttccatacattagagtgaagttatactttgtagtagatggtagaaccgtagaaaaatgttagctaatgttgcagactatatctattccaataaacttttgaacttagaactaaatcactaatatatacataacaatatgtatacgtgtgtactaagaaataatattcatggggccaagtaagggaaaagacaaaatctcagatacaaataaagcaaagattccttttgtttatttccaagatcatttactgaaaacagaaatgagaaaaagagttggctaagtgatcgatcgtttgtacatcatgatcctaaggttggataaagatttttactcaaaatgatgtttgttttgctaaattgatcaatacatgagttgggatgcggagttgatgtttgtaattaattgtcaccaaatttgcaaaattacaatttgacataacaaccgagttggaaacaaatctttatacatgacaaaaaagggttacacattttttgtatacattgtagtccacatatgaaaaaaatatatatatagccgtagacgtaacagtatcgatcgcttgatcatcaaattttttatgcgagtatttgttgttttatgtataaatttggacatgcatattggaagaaaggtgcctttaggcaggcttattgggacaagtaaattttgaggcatattgtgaagttgagtggaagagttatcattccaatgttgtaaaagaaacaaaactttctctctctttctgcattgcatgtcccctttatttacaaccacctctttcctcttcacgtcttaacgaatatattctactttacaacttaaatacatagagagatacaccgatacatgtgcattcatagaatattatcaactctctcgttcaatggtcaaatcaaatttctgtatcaacttacttcttttgattccaagtatttttcatgtttttaagttgcggcccacgcgggattctctctctctctctttttttttatctatacaaaactccactaaattaggtatatattcattctctgacatatgtagattaaagttgatcgcaatattttctattttaatttctcttgttattatattatgctgaaccacacacacacacacatgtatacgtttacaaataatgactgcctaaataagtgaacaatcaaatcaaagcactagaaatgtcatatgtatatgatgtggctaagtcatggtaattcgtcaaacaacaacaaaccaacaatatgcatactgttgtgttcacttcgttgatatttgtttaacaatacattttttcttttgataaatttattactaaaaggatgaaaaatggttacacaaatggactcaaatatttgttgtaatgctcatgtaaaacacaaaacctcccacatacaaaattataaagaggagacaaccaaaatagaaaattaacccgagtaattatgaattgtgacttccaaagagatcttgccgtagcttctgctgctaccttagtggctcctttagctaattaaccctctgctacaacggtaaattgttgacgatgatattcatataatagcaacattgatagtatttacatatattttttcatgtctaaagttggatatggtaactcaaaattgcactgaaataaatcattattttggtccaatttttatacttatcttttcgacaattcatggtttgcatatcattggatgccgtctatttttttacaatgacttaccctataatgtcttaagtatctttttattttgttttatataatatatatacagagagaatatttggaagacataaaagacaagaaacgaactaagacagaaaaccataagctaaaattattctttggttgttgttttcgcatggagcctataacacagagagtgtccatccagaatcgcaatcatgaccatctgccacttccatcctattttaaatttgatacatatcttgcttttccagtacacgttattttgttttctactccaagaaaatgctcagattataaaaaatataaaactaaaaatatgtaagccttcgttcaaggtggtaaattggtttcgactgaaacatggtctcactttttccgttcctaaacccgaaacaaagttcagaatcacacggttaaattaaagtccaaaataagctagataataaattaattttaggtcaaaccagaaagtgtaaattcgaatagcaagatattgaaatgaaaataattaattgttacaaaatcacgaataccaatagaattttcatttcaaatgaaatcctaactcgtcttattgctcatgctcatgtctttgaagttttacctttagacaatatctaagtaggtttaagtacgaaaaaacctaatgccataacattcaaatcaaacccacaaaataaaatcaatgccactgatttgataagtgaaaacaaaataagaaaatcttacaaaaagtattatggtttattaatacgttaacgtggtccacctgaattgaggccatcatgtaatgccgtccagtttggataaatcaattaatttcgaaggtatacaacatgaatctcgtgtttacctatctaacaatataacgaatttattttcttgggagaaactctttaccaagttttgttactgaatcggttcaaagaaatacaaattttggaaattaacgacccaatttcagacggcccatgtaatatcatg

SEQ ID NO: 28455 - DNA, 3003 bp, Unknown
  misc_feature (1)..( 3003): 2750-1469P.txt file - cDNA_ID_2996873; gDNA_ID_2926270; Annot_ID_143410
agggagccatgtatatgtacatgatatcctttttaagttagtgatgcgatgcatgcaaaccatttttaatatatatatatatatatatatatatatatatatatgcatatccgactacgactgctatggtccctatttaaaataaaataaaataattggttatataattttgtggatccgttaataattatatataaatattaagatgttgatacgtgtgataaaacaccactttcataagctaattattgtattatgctaacaaaaagaataatgataatgtataacaaccgtcaaccgtagagagtattttatttgatatgttttagataattaatacaaggtatctaacaacatcgactacattattagaaaaattatattcccactaagaaataaataaataaataaatatatatatatatatatatatatatatatatatatatatatttggagttaaaatgcattttggatcgcaaaccttagtcagcaaaacgtaaagagaagacgtgcatgagatgatggtgaagttttcatggggtagtgtctccattgagtttcctccgtttagaattcaactttatttgctgtcaaaaaaatatatcaaccttatttttaatattcaaccttttttatgcacaatatctaaattagttttttttttccgttctaagacaagcaaataaattacaagagtgattttgttcaaaaaataataattacaagagtgagaagagaaggctaaatagtcataggagaatactcagaaatacgacgacagaacataaaagtccatttggaagattcattggaaaatacattacgggtagaaaaaagggtaggccacgaaaatgattaagatttggaaatcgtgggtaccattcaaatatatgagcaagtaaattattatgcgaatatgtattgcatagttttcttttaacttattatatgtgaaataagtggtggtgtcattgttggtgttgtttgctccttctttaaaaagcatagtgtttagaaaatcaggaatctcttgcaagtaaagtagagatgacataattacggcattgcgtagccaccatgacacgtggctttttccactccgtcacacctacgatgcaatgatctcattaaacccattttattccaatattatcacattcattcatttattcataccaagaaagaaaaactctcttatattaacatatgttagtgggtacataggactaatactaatagtgtttaattttttcgtaaaatgaaaagcaggtagagataagatgcagagggcaagaactggagccagtgttgacactacaacacgtgagagatgctatatggagaggaagcagagacacttcttctctttcacaaaacattactttgcttccaaactcatctacctctgatcatctcatggtcctccattatggtaggactatttcttaactattttatactctattttatttattatttttatataacaccatattctcaataaaaataactgcccaccatttcttcttctaccttttttaaagaaactcaacatcccaccttcttcaattgtttttcccagcttctttttattttttttggtgggtggtctcgattatttattttcacttaaggcttttccttggtgcgatttgtccaatgagcaagaacgaaagagtatctaattctgtaggagtgcataccccgattgatgtcttttattcttgtatcttctggggttgcgagtaatgttaacgcatgaaaacacatgtattaagtattcatattcattatttttcatgctacatactactattactatttctaggtgactttctttggacataatgctactttaggtaggttcagaatgtttcatgttgtatcgcagaaaatgggcctgatttcggctcaccaaaccaactcaatgaatgtaactgaatttgatctgcgcgctcatattagaagcccattaatatttttcttttgagatcaatgagcccattaaaatatatgtattgatattgatacatttggtaaaataatttataactcgacctagaaaatatgttttactgtaaaatttgacaacaacaaatacacttttggaggatttttttttttaattacatttttggagatttatagagacgaaaggcataataactttgaatgggtatggtttttaaactagtttttggttttagtttgtccgaaaatctattttgtacccattcaagattttgaaaaaacaagttttcctaaaaaatagagaatctagtttttgagtgttttagcaatttttcaaagaaaaccaaaatctatgttttgggagtttctttctcaaaaaccatcgattacattttttatttttgttttagagttttttgttgaaaaatatattatctattgacataaaaactaaaatctaaacaaattaccattcaagtttttaagaaactaaaatctacaccaaaaacaaaaaccaagaaaatcaaaaactaaaaaccaaaatccaaaatccaaaaaccattttagaaactacaaacattcatggcaaaattaggaataattggaagagataccacacaagtaaaatgaaactccaattagataaaaacgagtagatgaaaattaaatttggtgaattcgttgtcgatggagaaattgtcggcaaacaatgatacacatacataaatcataatggattggatcgttgattgagagcacaacaaatgaaaaatactttagatatgtatagttgaaaaatatattttgtaaactaataaaaaattgttctatacgattttatttggtcttaccctcttggtaaagtaactaaagtagactaactcaactctcttctagtcttcttcttcgaactctttttttaagaccaaaaaaaaacacacacaaagagatgtcttttgtctgactccataatcacaccatcaccaagaagaagaagatctaggttttgcatctctcgtcattacaatg

SEQ ID NO: 28456 - DNA, 3000 bp, Unknown
  misc_feature (1)..( 3000): 2750-1469P.txt file - cDNA_ID_2996881; gDNA_ID_2926270; Annot_ID_143414
gcccacagccttcaccgtcattctcttcccctagtgcaactttatcatactcatcttcctctgcctgtgttaagaagcataattcatggaaacaacactcagcatcaaagaaagtgacatcctattcataatacggtatgtgctacatatagttatagcaagaaaaactcaaattcaagaatcttaaagctggttacataggttgatgattcacgtacaaaaactctataagtcacacaaaccaatatgatactacattaaaaattcaatgctcttctcatatgaatctaccaaatccaagagaaaagaccaacactgttccctaatttcaattagctaagcaatgagaaacaatcgttaagagaccaaaattgatttacctcgtcatcgagagtgcgatcaaggcccatggaggctctgatactccacacaccatcaaaatcctcgccgcaatcaatatctttgagatcatcctcggaaggcttctgctgttttaagagctcgtcaaaggatgaagcacaaggaatctcgtctctatcgtacgaatctcgcttccactcccgcttctctacctctgtgtcggagagagtccacaccgaccccgattgctgccgcgacgccggagcagaagacgacgtggaaaacttggaagacgaaggacgagagaagggtagagatccgaagatcttcgcaacgcgagactggaaatcttcgtcggctgatccagacgatgccattgtgaagctattagaaattgaaacacacacaaatcgattgctgtgaataaacgaagaacgaacaaaataatagaccgcctttcgtgtgatcctataacaaaacaaattttaaatgggcattttataatgggcctggcttaatggaatttcctacttcttggcccaatatcggcctactagtcactgttacctctatacagtttttaatttttttttggttgtgtgctaaagtggattttagtatccgtaggccgtttgaggtcaataaggaaatgaaagatgcgacagtctaaaaaggaaaagagagatctaagttacattagattgatagccatatgtcggaaatcatttgagagagaaaacatacgataaatgttgtgagaaagatgaaagaaaattgatgtgagaaaatctgattagaagaccatattaaatgttggttaatagtaatacataatgttcattattatgtttttaattgcagatgtcttagttttaccagttgaacaaagatcttaacctagatttaagacgattatcgttatgattaaacaatattgaactagctggacaagactcaagagatcatacatttcattaaacaataaggattttgaaaccaagaaaatgtattttaataatcatatgcgactgtaaagtctgcaaaagaaagtaagatcatcgtgtccattttttccaaatttctcccacttttctttttgctttaacaatttttttccaaaagaaagtaatcataagtgttcaattttttatatttaaagatattttcatataaaataaaataaacatgtcttaaaaggaatcatttataccccactggcctctctgtctctccggaacaaaagataatggagaagcaaccagataacgggtcccactctcccctctctattaatactctcgagagaatcgcgtttactacacgcgcctcctaatttccagcctctttaatactacacgggctttaaaggcgcgtggatatagtggattttagccagagtccttgttttctcagatgaccactgttacagaaaaagcacagtcagtcctctctttaaaaaatttacacttgaaacgacgtcgtatcttaccaaccttcacgatctccggcggtaactaaaacggcatagtttcgccgtcttttgtggttaaaattttcacaaagacggtgaagttttttttcttcctttctttgatttgtctgtctcttctcttctcccgagacacttcatctaaaaaacacacccccactgttttcttgttttgttctctctcgatttcgcgagaaaaaaacaccagctcaaaattacgcttggctcgagactttgaagatcatcggtttctgtttctgttggatatttcggggaagctttgggaggagaggatctcacgtttttgttcgtttatggcgtctgtgtgagacatagtggtggttctagcttttaggtttttggtgtgtgtgttcgtgttatgttaattgctgtttgtgtcgaagaagaggaagtaataaattagctcaaaatgcatttcactaagcttgatgactctcccatgttccgcaaacaggtttgtttctactacatatctttggttcctgtctatgtgtgcttgtcttgatgtgtccagtcttttagtgtcgtaggttaaaattgggtcatattaggcgagatttgttcttcaaaagttgtcaacagatactaattttggagccattaggatgtgttgtgtctggaattttgaatgtccaccgacatttatattccaaaatgtgagtggaacttcactggaaggttcgaattaatgtgtcactaagaaattggtttatctggacggcctattcgcgctttaacttgttgctccatgaaatgtgaaatgacttatgatccagtgcacttgtttgggtctctgattcgtgtgtttaggatacatttgtgtccacttagctactactttcatgctcactggtttagtaggacttctgctatctaactcaacttaaatgctaaggaagttcctagtgtagctcaaattctgtccaacaactgctctgtttgcctgaagttgatgattcttttgcccctatatagagtgcctgaatcactcaatctttggggttatccatagttgcagtttcttccataattggattgtgtctttactgttttctttgcgtttatgtatttttccttccgcagctgcgttcttacattgatatctttttcttaaatagttacaaagcatg

SEQ ID NO: 28457 - DNA, 3000 bp, Unknown
  misc_feature (1)..( 3000): 2750-1469P.txt file - cDNA_ID_2996885; gDNA_ID_2926270; Annot_ID_143418
tttttagattatgatatggaagactaatttagtaattaaaaaaatcaagaaaagttttctaaactatctgctgccctcaagtaaaaaaaagagaaaatgacggggttttatccccacggcggagtttcctgactaagaaactcggaaacaacgttggcctccaatatcttgacggcttcttcagtcttcaccgacctcggcgtcttgtactgactcacagaagagcctcgagacagaaagaaattcatgagttcgtcgaaggcgccaggcttaacaaccttaatctcaagaggtccaatgttcttatcttttcttcgttcttgtctatagagagggtccagatacttctcaacggtgaagcaacattcttccataacatcgcggttaggttcgagcttggcgtccttgactttgctcccaagttcccaatagagcacatagtgtcctacaaacgaggacgaatccacacggctagtgaactccattagcatcaggtcatgtggctcgagcaggagctttgcgtttgtcactgccttaaggaggtcttcttcgtatgtattggccatgtggaggctcagaacaactttctgtcttcccacgaaacggaaatgtggtgaattgttgtagaaaccagtaactcttaaaagatcacccacacggtacctatacagacctgtcaaaccatatggagatcttgagagagacattttttgttacacattaagaaaacaattaaaatgattattttgtctttctatcattttctctaagcaaagactctgcaacaaatacttaccagaaaacgttgtgacgacaggttcataatcatggccaattttaacatcgacaagatcgacgaccacatggttctctatgggatcaagaccagcttcttgttggtctttcttgacctctaagaactcgaagtacgccatagatgggatgatggtgtacgacacatcgctaggcttgcacagaggattgacattgacacccatgaaacattcagagctgccataccacgatgaaatcaacggaagaccaccgccatagaattccagcaacggaatgtactgtgccatggagcctgtaacgacggcttcgacgcattttgcttttggccaaagtctcttcactattgcctcccatgaggttttactgcattcttgctcgataaggctcgctaggtccggatttggagcggtgaggaacttactaatccctgagacacattgagggtctgtgatccagtcactgagacggccagtccttatgtttgagcataactcttgccaatgaccttccaagtacttgattactctgatgaagacagaagcaaagggtgcaccgaggcgagctacattatctcgttgtagaagcccacaaagcaattgacagtacatgctctgagtagtgtcttcacaagtagaaatttcatgcgggcttatctgtaatctatccctgcaagtaatataacaaacacgaaaaacaaacagtagtaagcaccaatgagcatgttcacaaaaaagtgaattgtgtaatgtaacgtggggaaaaagtttttgttaatttaccaaagagatgagttggttttgtttacgcttttcaaaatacaagttatcatagtcctgatcagtatcccagaggcagtctctctttcagggttcacgaaatagaacgtgagagactttccttctctaatcccctcgacgtacctgcaattacaatgaatgtttcttttggtatcacatcaataaaacaaacccacgttggagtttagaaatatttacttatagagtaaagatctatagagagatccaaacataatcctctgttccccatcctctgttgtcaaaggaatcaaattttgaattcctgctgtagtaccagagctgcaaaacatttaacttccgttatatattcttcacttcaattttaatgtacatcattaaagattaacgactcaagtatcaacaagtttcaaaccaaatttcctatattaatcttttttgtaaacaagtggacggacttatgaaactccatgtgcatgtgtgtcaatctcattttatgatatataagccaagattccaagtctcttctggaaattctctaatctataaatttgtctatatccctccagatcttgcatatacaaagctttgaaattattttggttatcctgcacagatccaaaaaaaaaggcggatcgttttgaaggcacctcatcacaagtaaactgatgggtcgatcacagatgagatcagacgcctctccattagcgatacgattgatgtaaggcttaatatcttcataggtcacaatgggtacgttcttcttgaaggtttgcttatcaacttgaccgttgaggaaacctttaagatactcggtatgagcattacgtgaaagtactgcttccaagatggaatcttgaatctgcgttacgttggtggtcacatcctcaagaagagacaggctagcttttgggtctgttagatcaaactttggcaacatgcttgcttttgattgtctgccaacaacaaaaaaaaaaaaccttctaagtcgtatcacgaaattgtttacaaaagagtgaagagcaagcaaacctttgttctggcgaggtggatggatgagctttggcctgtgtctttctatgcttgaaagctttgtaaggagagattagaaaaagcagtcagtcaaatggtgtggtgtgacgatatgttcgttgccgtatgatttgttcttatttccataaatagaattaactgacaaagcataagtaaagaaaatcccatttttagaaagataaatttattcattaaccctaattaattaggataatttttttttgaattaaaccgcaaacaaggtcggttcaacttgcgtctgtccggttaacaaaatattgaaccgatcgataaatcgtacgagagcagtcgcataaaaaagctccgaaagagagaaatcaatttgaccaatcaaataattgcggtggtgaaaatg

SEQ ID NO: 28458 - DNA, 3000 bp, Unknown
  misc_feature (1)..( 3000): 2750-1469P.txt file - cDNA_ID_2996896; gDNA_ID_2926144; Annot_ID_197639
tgaggatgtcggtgtctatatatcttcgggtgaaatggttagtagatatcctttgactgttgacgtcatcactccaccggaattgcccgaggaattgtcgagagtggaggtcgtcaataaaagttctattggtaagaactatgatggtttgggttcaaatgaggatgaaatgagagataatgcaaccattgtgataggcgaattggacggacaaggaacagaactaaatggggcaatagtggtggttgatgatactcaagatcatgagattggatcacgtgatgatagggatgatgatgataggggtgatgaatacgttgagccaccgcctgatgtagaatctagtcagtttaagaaagaatgggaagacggtatcggtttgactttgcgacaagaatttccaagtagggcagcattgcaggaagtggtggacaaaggtgcatttgctaacagttttgattatgttattaaaaagtctgataaggagcggtatgttctaacgtgttcaaaagcgaattgtgactggcgtatacaagcttcatgtgttcaagatacaagtatttactctattagaaggtacaacaagatgcatagttgtacccggattagtaagagtagtacaaggatgaggaagaggaaaggtacccctgaattagtagcagctcttcttcatgatacgtttcctggactgttggaaactccacctcctaaggttatcatggagcttgttcagactaaattaggtgtgaaggtatcatactccaccgcattgagagggaaaagacaagccgtttgtgatttaaaaggtagcgcggaagatagctacaaggatatcaattgctatttgtacatgttgaagaaggtaaatgatggtacagtaacatatatgaagttggatgagagcgggaaattccaatacctattcatagctttgggagctagcattgaaggctttcaagcgatgaggaaagtgataattgtggatgcaacacatttgaagaacggatatggtggtgttctagtctttgcctcagctcgagatccaaatcgtcatcattatatcatagcggttggcgtactcgacggtgagaatgatgctagttggggatggttctttgagaagctgctaagtgttgtacccgatactccagaattggtatttatgagtgacagaaattcaagcctcatcaagggcatacgtaatgcgtatactgcggctcatcacgggtattgtgtttggcatttatcccaaaatgtcaaagctcattccactaacatcaacagagacgtactcgcttggagattcatggagttaagtcggatttatacctggtcagaatttgagagggagtatagagtattcaaggtgagatatcctaccgcggtgaattatttggaggattcaaccgtgaaagaaaaatggggtaggtgttgttttccgggggaacgatacaatttggacaccagcaactgtgtggaatagttgaattctgtttttctcaatgcaaggaagtattctttaatacccatgctagatgcgatcatggccaaaatttctttttggttcaataacatcgcaaagatgccgcttcaggatctgttgataataagtttgtgcctttagtggagaactacttgcataatttatgggtggatgctgagaaactaaaagtaacagagctaaacacattccggctcgagtacaatgtccggggagttgaagggaacgaatatttggtcaacttgcacttcaaaacttgcagttgcaaggtgtttgatatccaaaagtatccatgtattcatgcgttagccgctttcattgtattcgatagcgatacaacaagaactcgaggtatggaattacatgaattggtttctaagtattattgggcggaattgtgggcattggcgtattatgggactatttatttagttccgggtagatcacagtgggatatcccggatgatatcaaagcgttgaaggtattacctctgcctcggaaaaagaagaagggcagaacaaaagtgcttaggattccatccactggagaaagacgtccaaaacgtcaaaggactcagaacaaaaggaggccgagacagtctctgcaatggttgttatttggcacccgtagtatttgattttaatcatgtaaaccttattcgcgttgtgtgcaactatgtaacactacactttcgttctgtaaaactatattttatttcactcggaattcaagtttaacgataatactaagaaaacaggtgaaaactatgatttgacgataatactgggaatacaagaaaaactatgaatgatatgaaaattcgaatttatgtttgtttgaaacatcaaatattaaatagactgtaaagagataaagaactcttaaaaattaatttaaacgaattaaataaagaggaaaaatatttgttgaaaatacatgttaatagactctatcctacatattccttgtacttttaagctcacttttgatataaattccaacttaggattgaaattttgcaattttatatattgttaacatgtgagtgcactaaacatttagaatttaatagtgatagacttctctcaactgaacaactagataaatcattttgaatgatatgtaaaactgtttaaactataaaacaagaaaatacaactacgtggacattttgtacaaccaataattagggtacaactgcatataaaaaaacggcgcacgtgtataaattacggcgcacacgtggaaatcaccttattctccaaaaaaattaatttctctccaatttcaatttccccccaaatccattaaaatttcccaccaaaaccaaattccccccaaaaccaaacaaatatctcttctctctctcactcaaaattcattctctctcttcaaatcattctctctctccgtctcaaaatcattctctctctcgatctcaaaatcatttctccattctctctctctctcaaaattccttctctctcaatcagctatg

SEQ ID NO: 28459 - DNA, 3000 bp, Unknown
  misc_feature (1)..( 3000): 2750-1469P.txt file - cDNA_ID_2996896; gDNA_ID_2926271; Annot_ID_143422
ggtgctatcaaagggtttgtgatttcctcaaatttatgacaagtaaatttaaaggttaactaaaaagtttttagtaaaaacccatgttttttttacagatttgcttacattgatctaaaagaaggcgcaaataaggcattggaacttaatggtagtgacatggcaggaaaggaacttgtagttaagacggctctactaatgagagattcataccttggctattcttgtaatggaggtattggcggccgttttggtggacgttttggcagtgttggaggtatatttggtggtggtcgttgtggaggtcttggccagtattatgcacaagtatagactaagtatataccgagactataccgagcccttagactttgtggtggtcgttatgacatagtcactatctattcatacttgtgcttaattagatgaataaaccgggactataccgagcccttaatcacttctattatgtacaagtatagactaagtatatacaagctaatagccagtgtcgccgctgttgaggcttttttggtggtcgaggacaacagacttagttttaatcccttagacttagtgcatgcaagaagaccacaaatagatagtgactatgtcatagcaaaatttactattgattcttatgtgactaacttgtgcatacggaacaacgaaattgccatggaaaagcaaagatttttggtttttcattttcgtggctatttattgagtagatcgtggtttagtataaattaacaacaaattttagtggtaaggacgtggctatacgaatttctattactatttttaaattttcttttatgagtggcttttattaaatctaaaaaaggtgcaaagaaggcattggaacttaatgaaagtgacatgacaggatagtaacttatagtgacatgttttgtcaatgtttgtggaactatttcagggtgtctgttgtgcgagttttattgcgatcaaataactctaagaaataaacttcacaaaggaacctcgtgatcactatcatgtagtactataaaccaatcaattgacgtctacaccagttctagtttgggccttctggccgaaggaagagcaattgtagtcactgactccatgaaccaacatgcgcaccataaaaccagaacttggtggtaacattttagatgtgtaactaagtggtacgttttcataaaaagaggagtcatcttgtaagtctaggttagatattgattcttctctagtgcaaaatttactaaatcacgccatttggctagtcgaaatagttctatgttttatgttcattaaaaaaaatcgttgagtgggcaactcgccggttacactcattgttaagagatttgtcaaatggtaaaagtacggaactatagatcatctttggtaatttataaaaaggaaaaaaaaaacatgtataagagtttgagttttttcttacccattatctttaaatttttgttgttttctcaaatttgtagaacctattatttctgtagattttttttttttttttaaatcaaactcggctcaagcagtcgtatggattttgggctttaatggcctttgtaatctctctactgttttgtttgtactttatgatttatcagtcctgggcattcggttatccattcggtttcggttgatgtccattctgttttcggttctttcggttttaaagtttaatatccattcgattattttgaaatttcggttcggtatcagtttggttctggatctttcggttcataatttagtatctatttgattattttgctttaaatattttcgaatattttggttttttttggatattttttggttattttcgagtatttttattattttatttatatattcatgtctttttaattatttattatagaaataactaatatttttgaaaatataattatattttggatattttcgattcgttaccgacaccgattcggttttggtccttttgcttatagaattttatatgtattcggttattttcaaattttcggtttaattcggtttggttcgggtcgatttttttgattcggttttggttcgaattcagtttatttgtcgatgctagtttatctatagaataaagtcctcgccgagaaatcatctcataactccccttatgcaatcaacaagtctctcaactccccttattgtctctatatccctttctcttttaatgagatgtatagagactaaattacccctcctccttctttttataatatctattataaaactaaataattaaaaaaaaactatattgaaaaaaaaaaacagaaaacgatactctctctcctctcctctctctctcctctcctctcctctctctctcgagctcactcatcgctctcttgctcactcatcgtctactctcttgccggaattcgctcaccattgttgccatatccttatcttcggcgagcttcttcgtcatagaaagaaaaggtaagtttttcgagctgaatgaagcttaaaattgaagattagaactaagagattttgtcaattagatttgagattaagcaaattgtgtttgggtatgcacattggaagtttatgcatactttctgggttgaatagatttttaaatgggtaagaaatggtttccaacaactgaatcatagtgaatttcagttttgaacccgaatccattcgatttgagctcttgtcaggaaatacatctggtagaactgcgtagaactgcacatgattcaattaaaaaatatgtgtagtatgacttagttgcaccagtattaaccatttacatgtagtatttatttgggtttagtagtattacccattttcatgtagtatttatttggtacaggagttttacccattttcatgtagtattattagttatacatgtattatacaaataggtgtagtatgactagttatacttgtgttacccagaattgtagtataactagtatatctgacagagtttttgtattgttgttgtaggatacaatg

SEQ ID NO: 28460 - DNA, 3000 bp, Unknown; identical to SEQ ID NO: 28459
  misc_feature (1)..( 3000): 2750-1469P.txt file - cDNA_ID_2996896; gDNA_ID_2926144; Annot_ID_139055

SEQ ID NO: 28461 - DNA, 3000 bp, Unknown; identical to SEQ ID NO: 28458
  misc_feature (1)..( 3000): 2750-1469P.txt file - cDNA_ID_2996896; gDNA_ID_2926271; Annot_ID_205123

SEQ ID NO: 28462 - DNA, 3000 bp, Unknown
  misc_feature (1)..( 3000): 2750-1469P.txt file - cDNA_ID_2996904; gDNA_ID_2926271; Annot_ID_143425
actcgtcatcggtcgtgaattgatgaaccaatccctatcgttacttagccatacaaccaaccaaccccactggtctaagtacaatgatagagattggggatcgtacgattcccttggttcacgatggccgaatcaagctcttggcttattggtccattcgttctccaaacgtacgcccctccggctacatggtggacgattgagccatcggcttatcgaaccatccatgtttccgttccggtcgtttaacactacgaccgcccacggtttactaaccgtttacccgtccggtccatggtggtcgataaagctttcggcttaatgatccatccatgcggtccgaacgatatccttatcacacccaagggtccgtggattcatccactggatcatcgtaggctagcccatgaaatctttcttccgtcggccttaggtttgctcgcgggtccaacatccgttttgtccatcggttcccaccgtggactttcccgttggttatccgtcgagtcaccctttggtcttaccgatctctgatcggtttcaccatggctgaggagatagatacatgaaggcggccgcgatgttgatcctatatggtgaatcacgttccttacccattcttggtgctttctccctttatcggtaagattgcatccatgggcgacccttgggtgtgttcggatgcacttatccttgtgcttcctcgaacacttttctcgatccatcccatccgacgatcggtctgtccgacccgatccgtcagacgatcggcatgtcccatccgacccgtccgacgatcggtctgtccgatccgtctggccgatccgatccgtctgacgatcggtctggccgatctgatccaacgatcggtctaccagatccgattcgtctctaagccgaacggtctaccctctccatcctctacactccatcgaaccgttggatcgggaggtagcatgcgcatcagttcggtcgagttatactcgccgagccgcaccccctttccgaccaacaactctaggatgtgttggaactcctttaagaatgttttatggtgttttgcatgttgtgagatgatgtgagatgccttgggcgtcctcccttatataggaggcgaatggatgcttcccgaagcatcacatccggtccttgcacccttccgaaaggtcacatccgttctttgcatcctttcgaaaggtcacatctgttccttgcatcctttgggcgatgcaaccgttcgttggtacccgctcgaccttacaccttttggccgagacacctcttcacccgtgagctaccacagtcgaccagctcgagtgtcagctgaccggaccacccagctgggtcagtacttgattagctcaccgagctcagtcgagctgtcggtcagctcacctagctgagctagctagttttacagctggtttagctcacctagcttagctagctagttcatccagcttgtccagctcacctagctggttcggcttgaactttctcgttcttcctactaagtattttggtccgttcctcgaccatgatctagttttctcttaaaacaaaccggccttttttatgaacgcgggacgcggtcgttacaagtctaccccccttaaactgaattcgtcctcgaattcggcgggtgagagatcttgtttactccctaacttgggacacgggcgttacaagtctaccccccttaaactgaattcgtcctcgaattcagcggatgtaagatcttgtttactccttaacgttttcccatctttagtctctccgagactttagatatcatatttgatcaaatctctatttccgagcttgatcaagtttcctgatctttgtctcttacgacactcgatcaaattcctgatcctggtcctttcccggactcaatcattattttcgatctttgtcctttcttggccttgatcaatatttcccgatctttgtcctttcttggacttgatcaacgttttccaatctttgtcctttcctggacttgatcaacgttttctgatctttgtctcttccgacattcgatcaaatttccgatcttggtcctttcccggactcgatcattatttcccgatctttgtcctttcctggacttgatcaacgttttctgatctttgtctcttccgacattcgatcaaatttctgatcctggtcctttcccggactcgatcattattctagacttaggtctcttttcgaccttgtcgtttttttcatgatcttggtcaatctccgataagatcaaaaccccagaaatagtcaaatcccgactaagtctgtacccgatcttagtcaagttccgactagatccaaatttcgttgatatcggtccatctccgaatatatcaaccaacttcccgtcatgttaaaagctttgactaaaaggataatatcttggttcccgatcatgagttcggtaacaatttccgtttccaaacacatcgatccctcaacttccttatccgccaaactctcactatgacgttttctcgagcacctatccatcctaggatcaagaatgctctgataccaacttgtgagaccccgtcccggacgtctcggcgtccggcgacgttgtactcaagttcgcgcctcttcccggccgaacctcttaatttttcgctatgcaacatagaattgcctttacgaggctaaaatctataatcgctctcttattacacagcggaagtctttctaaccttggtttaattctaaccaactcttgtaccggtttcatcgtctttgttccttagacatagatcgatcctttactcggtcaagacatgcatatgttcgctaactattctaaggaaaacaatcgcatattcctttatcctactttcacggtcaattaccaaacgtctatcttaactaataagctagatcgttacataccttggtcaatatgcggatttgattccttagcccgtttgtcgccttactccattcgttcaacgactcgtcatcggtcgtgaattgatg

SEQ ID NO: 28463 - DNA, 3000 bp, Unknown; identical to SEQ ID NO: 28462
  misc_feature (1)..( 3000): 2750-1469P.txt file - cDNA_ID_2996904; gDNA_ID_2926144; Annot_ID_139058

SEQ ID NO: 28464 - DNA, 3000 bp, Unknown
  misc_feature (1)..( 3000): 2750-1469P.txt file - cDNA_ID_2996908; gDNA_ID_2926271; Annot_ID_143426
agcactctcagagtaaggaaaacattcctcctcgaaagcaacatctcgggaaacaaaaattctttcagtttgaaaatccatcactaaccatcctttctttcgaaattgatatccaagaaaaagacatcgagcactgcgatcttcaaatttgtcattcgaacgtcttactagctttgcatagcaaaggcacccaaatatccttatatcatcataagaaggaggattctgaaataatacttcgtatggtgttttccctttaagtaggattgaaggcgttcggttgatcaaatgagtagcagcttgattgctttctccccaaaaacgagttggaagctttgcttgaaacaacaatgctcgagcaacattcagtatatgttaatgtttcctctcgactctcccgttttgctgtggtgtatcaacgcatgaagtttgatgtacaataccgttttctgcgaaataagaactcatacacatgaattttgtaccgttttccgttcttattgttttgactttcttgtcaaattgtcgaaaaacccatgccacaaagtttttgagcattgtggataccgatggtttttcaatgagaatttgagtccaaacagctcgcgagaaatcgtctacaatggtgagaaagtaaactgctccacaagtagcttttgttctataaggaccctaaacatcacagtgaattaaagagaagaaatcatctactttatttgaactttctgaaaacgaaacacgagtttgttttggtctgaagcaaacatcacaacattcttctaaagtactaatactatttttgaaaacaccaacatctgaaagaaaagataaaacttttggagaaggatgacccattctcctatgccacaaatcccgagcatcaactgtcctgacacgatttatttgaggaataaccgcaccagcaagatgataaaccccatcacgttcagtgcccgctccaatcaaagtcctcgaagcttggtcctgtatcacacaaaactgtttagtaaatatgacagcactcgcaatgtcatgtaagagttatgacacataaataagtgtaattgacaattcaggggcatagaatacgtgacgaagtatcaattgtcctccgagaattcgtgtgccatatcgggttgcccaagtgaccttgtcatttggcaatttgatagggcaaggatctattttatgaatttatgttagaagattcataccaccagtcatatggtgtgacgctcctgaatcaatgatcacattaaactcactatgagttccatacaaaatcagtttttcactcttaccagagtatccctctttgcttgctccatttgacttcttgcatttctcaatgaatttggccaatgtattcaattgactatcaaagagctgcagaagaccagttgtggacgacgccgacccgcttgttgtcgtagtcatggcaccagaaacatgtgaggcggacaacgaagaactacgaccacgttctctgcctcgcaaggacccgcgacctctaccagatgaacctctccctgcgttttgagatgattcgttccaccattcaggataaccaaaaatcttgtaacattggctcttctcatgacctgtcttttcacagtgagaacatgtcaaggattgttgtttgaagctatccgcaacggacaccgaaaaaccaacgattcctcccttttgttgtggttctcgtgttgcctcaatgtgtctctcttctggaactatttgtgagtaaacgctctccaaatttagttcatgaagtcttgatagcagatttgatggggttgtgccaaatctttgattatcaagtcccattaaggattggtggatgtgaagtccatcttgtttcttcttgtatttcttcatagaagaacagctagaactcccacaacaacagataaatcctttgtctatatctgagatatcatcccaaataatcttcaatcgtccataatattcttctaccgtttgtccatcttgtttgcatacgctgagatcagcgtggagttgatgctctcttgtcccgtcgctaacagagaagcgagatttcaaactactccacatctcagaaacatcttcaactagtgatattgatgatcgtagctttggctccacgctactgtagatccatctgatgatcatcgagttcaccatctcccatcgttctacatcttctccatcaccgtctggtcgcttaatacttccattaaaaaaccctaccttacgcctggttcgcaaggaattcgtcatcaatttggaccatcgttcataattgttcctattcaacagaattggtgtcaacacttggccggtattgtcggttgagctaagatgataaggagacatcaaagctccttcaccacctgaacttccgacgatgagtttcccggagctctttgtgtatttatcttcagttccagtcatgcttgattcacaatctggatttttgtaatatttcaataatcaaagcaatcttcacaggctaaaggtaggctctgatatcatgtaaagtcaaagattgctctgaatatattcagttgtgttattcatattgaaggtggcgatacaaatatatatgtgtacatatcgattttaaacctaatacacaaactaataaggcttcgtacaaaccaatattctaatcatcattgttttcctctaagcccatctctaatacttagcccatgcttttcctcttactaactacctcgttctacacatacacaagtttcctcaaaatatttccatcatcagacatcggtgattgtgagacccaactccatattttagcccatcaaaggttcatcttccctaataacttaaaatctaaacgtgggagtatatattggtgtatgtatcaccttcttcatgaaagccatcaaaaagaaacgcaaaacctaaacttgaaagagatcgtgagccaccgttttgtggttttcatgatgatcaatcatctatggagagatgtgagagagagctgaaccaccaatg

SEQ ID NO: 28465 - DNA, 3000 bp, Unknown; identical to SEQ ID NO: 28464
  misc_feature (1)..( 3000): 2750-1469P.txt file - cDNA_ID_2996908; gDNA_ID_2926144; Annot_ID_139059

SEQ ID NO: 28466 - DNA, 3003 bp, Unknown
  misc_feature (1)..( 3003): 2750-1469P.txt file - cDNA_ID_2996936; gDNA_ID_2926272; Annot_ID_143439
ttgctttccaacatgaataaatgcaatcaaagacatacagaacacgataacaaaagaagcttcaaggaggataacaaacctaactaagcaagtactgagttgatatacctgcatatgaatatggggaatgcacattctgggagtaatgatcgtcctcagtaagcttagccaaaatcaaatcgattgcccgcatctgctcctcgaaggtcccagataatgtcactaacctatcgctcaacccataaaaggtattatccagaggggatatcttaataccagctttagattcctcaatgaatgacctttttgcaaagaaagaaatgtcttgagggttagtgacagcagtacaactgaaatcagtattccttggaaaaaaacataaaagcaatgccatattctagaacttaaaaggaactagatattccatacgcataaactactgcaatctgagtcatatctaatactcagaaactttgttcacctgttatatatagggtcttgacttgtttatgcatgcattcagagaaaataattgctctcttaaagatatgaaccagagaagatttgaacatagaaacaatgcaagaacataaccagatacattatagatgatatttggtggttaagcgtgctgtaggaaatggtgtcaaaggaaacaggctatggattatagaaggtctgaaaacctcaaagaaactgctgcaacaaatacagaacggaaacttacttgatggtggcccctccttttccgattatacctccacaagaactgttaggaaccacaagtctaattcttctcctaggctcaacctcattaccatcttcagcatgaagctagcaaacagatagaaaagttaaaactgatttcattgtgacatactatataaactaaataaacgcaactgtgacatgaaatacaaatttgtcaaaaaagattacctcactgtgcaatttatcaaggataagttccagtccattgacaacttctttgattgatcccgatatcataataattctgtcagtcgtccccgggaaaaactcttgattacgtgaaagctgaatccttgccccagactttgcctgaaattcagtgatggtcgagccacctttcccaatgacggaaccagctgccgcattggatacaagaaaccgaatgtgtgttggcttctcagcagaatctgaaaagaggaaaacacattagatagtcaaatagatagcatggttcactaaaccgcatcagtattgagctaatcattgaattgaaacagcgtaatttaaccatccttggaaaatgaatctatcacacaggaaacattctcacaagttttcatcagcaaaaaaagacattaatcacacatgtccgttgacatatcacagagtacttaaacgagatccgattcacgaatgtgacgaaataccgaaacaattgagtcagagtcgaaggagaaaaaaaaacagaagaccagatcggatcgaaaataccagcttcggaagaatcatgcggttcaggggatctcttagccagctcttccggtgaacctgccgcatatgactcagtagactccattgctgctacagaagataaacggcattaaccaatcgacattatcaattcaatgaagagaaataagaacgaaatcggagagagaggaagagataagactcgttcatcgaaatctgagattgagaaggaaaaattccaaagtttacctgtcttcacacaattcgaatctgctccctccgtcgtcgtcgtcacttggcgccggtggttaaatgaatctgagcaaaactaagtctcaatcgtcgtatcggtgcttcctcggcttcttcgtctttgtcgccgagcggtttgtgaagtgaatgaaggtggctctggtgtccttcgtctatctatccactagcctcccttattctattattttttatttttcctaaatttaattttattgaccgcctctctatttcttttttaatttttttttcctctttcacaatcatctcactttttatttgttaaaatatcaaatcaactcaactacaaaatgtgttaacatcaaaatgtgctacgaaataaaacataattagaaaataaaacaccaaaattatcatttttctacaattttaaagcaatagaatgaacatgataataataaaataaaaatggcaatatgtgtctttttctctctattttctcattttagaatttgattttattgcattggtttgatttattttcatagtttgttagatcttgaattgcagtaaatatatgtttatcaaattgtacggtagagttgacgaagacgatagatacgattaatggtaatgcatgtttatgatttgaatcggtcgatttaataatgtaagttcaatattattataaggtgattttggttttttagcccggcaataatgggaagtggctctttagccaaaataaataatgggaagtggcaacctgtgttttcttcacgactacagattcattggttaaaaccttcaataaaataatcatgttattttgtgaactttaaaattagtaatcaaattcctcacacattattattttcaataattagataactctttttcgcattttcttaattaattttgtactctttaattaggaaaaaaactaattattttaatcaaaaatactgacaagtgttatggatccaaccgagtctggttacatgacattttcatatttacttactcaaattgcgaaggttattcgttgttggcccaatatatacatttcacgggctcttgttgggcttgctttcaatattcagcgtattttaactgtagcgaacgaaacaacgtcagcaggctaacatgcgcagtcgaagcaggtggtgatggtggtgccacctcccaaatcttcgtcgtcccaataatcttatcacgtttctctcactctctctccttcgcttgtgtgtttaagctaagccgttagtcgttaaacatctcatatcctaaaacgccgtcgttttagctatg

SEQ ID NO: 28467 - DNA, 3003 bp, Unknown
  misc_feature (1)..( 3003): 2750-1469P.txt file - cDNA_ID_2996941; gDNA_ID_2926272; Annot_ID_143441
aagccaaaaacaatttaatgttttaatcagaagtcatttgcaacttgtagacacaaacgttaaattttagtcggtgagtacttttgtttgtgattcatgtcaaacgtaaaacataaaagagaaccatgtcaaacgtaaaacataaaagagaaccatctaaatttatcttttgaaacctattatactttgacgaaaaaaaaagccctattatacaattaagcatgagtaaaaaagaagcaaatgttctaagcaacggagaaataatttttcttatcggtccttttacaaacgacagccatatatcatttgtgcgtatctcaaagcaaaagtctcttctctctttgaaaagacaaaatcaagcaactaagcaagtaatgctaacttcacagttacaagacaaaagaagacattcacataacggtgaaacaagaaagattgtgtttgatatgttttcctttaatttcggttaattggaaaatattgtcaagccatgcatagccaaagtaaatgtagtttaagtgaatatcctattcacattgcctgaaattttcaaaacaaaaagatatagacaaaagatcaatgcatatgtgatatgtcgactagctagttatacaaatatcaaaatttactaagttaaagatgcatgattgtatatggatgtcgtaaaatgttaaaaccaaaacgtgcgtttgttccctctcaaacgaaagtttgtgacttcgagaaatattttttttttcagtaaaagacaaaatagtgaagaagatgcaatgcatgagttgagtcatatacatactaaagcgtttctagtttttggagaatttgctaaaaccgtaagcaatgattttcctataaatatctaaaacacaataactttctttgaaataactaatcacagcctatattttgttttctaaacacaatcacaatgtcttatcatgataaacatatataaacgaagaagggaagaagatgagtggatattatagaaagaaaacgtacgtttgtgtaatttatattaagcgatcagtgaaagacgtatgtgactgatgagacctaacatagacccaaaatccatgcaaccttgtctttcgtcccaatgcatttgtacgctttctcatagacattttcttatttgattatatcattgattaaagtataattatagagaatgaaaaaaaaaaatcaactatgccaccatgtgatataatttatttatttttcttgattattgcatgtgagaatattggttggtacgaaaccctcacaaagatcgatccaaattggggaaatatttttagtgtttatataaacataattaacgcaatctctttattttgccactaggaaactgagcattattatacaaaaagtcacattttattttgccactcggactcggttcttatattatataataggttatcttagttttgaaaaaatatggccatgaaggttattaagaattgcctttgcccatttatgataccaatatataattgttttttcttttgtgtgttttagtaccaagatgtaattgtttgctaaagtctatgagaataccaaaccaaaataatttgaggatatcagaaataaacaaaaataataatattgataatgtggtgtgaagtttgagctttccttccctttaaaaacttgaaaggtcaaagatgttgtcatctcacctctctccatttaaaatttcaggatcccaaaccttaacattgctaaaacccaaaaaaaaaaatctaccacacctttctcaggtaggccaatgtttacacctccatttttgttcacaatcttcttcttctgtctgtgaatttcctttattttgattcctcatttacaaactggtacaaaggaaatgaatatctaattaactcttatttgtacatcttctgatccatctctgtcttttcagattttgtatttgttttcccaatagatttgaactttaaaacccaaacaagaagagagatgctttgattttgttacatacaagtgtttgttgcatgaaactagtaattatatattttaagttaatttcactttaaaacatttatgagttatctttattttcttaagtacattgtgcaaacttactaagaaaaacaaatccaacttttttgtttttgggatcattgttttattaaaatcattaaagaatttgtactacatgtcttactcaaatgtggatttggatatggtcttatgcatatctaattaatttataattacagtgacaatttagagattaaaaaacatgacgtgggttgagatgatcatgccacgtgttgtaatcgtagaccagatcctcgcttccttgagactcgccttccttttgcttatttttaattttagcaaaagcgaaaaagtagacaaaattaaaattaaaaatagattattcatttccaaaggaaaactaaaataaataaattaattaattacgagaaaaagacaattaaagagtgattaattaattctctaatctctctctctctctgtctaatggccattgcaccttctctctttgaaaaaaatccaatctttttctactttcattaataaatcaccgattattttgttttctcttcttcttctgcgatccttcattgaatttgatagcccaatttcgtcttataggagcttcatctttcacctttttgttcttaattgtgtttcgccattgacgaagaacacgaagaggtacgtcttttgttaattggaagtggaattttgggttttgattgttcaatttggctgatgattggtatgaataccaggtgagagagatgaattggaggacatttgggtgtgaaattttgaatcttttggatgttgggattttgtgttttctgggatcttctcagaaattctgtggaagatgtgatgtttggttttaggggtttgagaatgattgatggagttactagtatgttgttttgaattatcggaattgacgttaaaaaagggatttttaggttttggcgtgagaggatg

SEQ ID NO: 28468 - DNA, 3000 bp, Unknown
  misc_feature (1)..( 3000): 2750-1469P.txt file - cDNA_ID_2996945; gDNA_ID_2926272; Annot_ID_143443
atcgagcctcggtcgatccgctaaacttaaagatgagtaaaaagaaatcagaatgctatacatgtttaaaaggtacagagagatttacaaacatagagagaaagcaatacctgaagattggccacgcaagtacgaaaagcagacctgagagtatatgcacaagctttctgctcaaactctgctcaccataaaacaatcaaagttattgtttcttccttttcttactttgttaacacaaaggaacggtatatgtttttagcggtaggcgattacggatagttaaaagggaggttaggaaaagtggtaacatataaagcggtaaatatttttggaccactttgttcttgtccgctttaccgattggtcatgataaagtggtatactgcttactaaggtgttaccaattcttataaaaattcagaatgaaaaaactaattcacaacaaaatttcctaggcttatcattgtttctaatgagtactactgcaaacacaacttgagaaacttctttcaacatatagtggtgttcgaataaaactggaattgtaaacggagaaattgtgtggataactaaaacgattattaagagacctgttgaatgacgtttcgcttggtgagactctcgaagcttaagacaagcgcgtatgctccaccaagcactgccacggtggctccgacgtcatgcaacagcgaattcgtcgcaactgctgaagagatcagagaacgacgagcacgtaactgagtagcagagcccattccggtcaaaccaatgaaacaaggagaagaaatcaagaagccaggagaacagaaccggtgagtcgtcaaagagttgttcccgaaccgacacaactgatgattgatcggagatagaggtaaggttgctgccatggacggagggaactgagtttggaggaggaggaagaagaagaagaagaagagaatcttgacaagtcaataagataaggaaaatgatattttgtaatttatctttttttgtttgggtgtttcgttagtaagaactaaaaagacgtaatctatgaggtgtcactttctgattgatcgagaagaatgcaaaaaatctgcctcacattgtaatttcgtctttctttattgggacagttggtcagtttgtactaacctagtggtgggaaatggccaatgagcatggcctattcgggtaattgtgttttttacttttttaccttccgtactttatttttgggtttattgtaaaatccgaccgaccctaattatgacggtgaatctatttttttctcaacctagtatatattctgaaagcttagacgatctacaatattttgaactgagaattgatttttttattgtaaatcgtttttaacaattaaatcgttttgagtttttctgtcactttatctttttcactagttgtagaagacctaacattttagtacttaagaccgttactattcttttggtctgaaattttacattgtataaattaccattcttcaacatggtctgaactctgaactccaatccaagagagataaaacatcattttaaaaaacggattgactatactaacacttggatgaaatttccagttttaaactagctgttctctacattatcatagtatatatcatagaaaatttgtggaacacgacaaaacaatatattatatgatctcaatggtaaaaacaggaaaaaactatcaaatggactacaaaccaactataaatatccgcctttcaattgtatcaaaaattactacccaagatatatttgtaaaaaccatgttatgtccagtgtatatgcaaatatgggtgtaaatgtaaaaagtactgcaattaatttctcaataattgcacgaacgaagataatatctaacaaagtagaaaacaaaaagaaagaagaaaggagtacaaaatcatgtatatgagagctagctataaatatggaccctcaaacataggcgattgacggaggtacagtataatagcataatggagaacgaagggtgcggatgatgaggatgatgatgtgttgttgttacttaacttccatttattctttcatcaaatgacgtctaatcgatttaaattgtctttggtcatgatttgtttgttcttatacattctgagtttgaagaaagttgtatgtaactatatatgtacatgccccattgaagagtcaaaaataaagtagtctgctgcaatgaataacattggcagagaatacagatagttttatttgcattataaatcggttatacaaaataagtaaataattgctcgtttgtaaatattctggtaagtaacagttttatgttttcatttaattttgattgattcgtactcaatcaacacgctagaagtcaatggtttcacactattttctactaattttttcatcaagtttcaattcaaaaataaatgtagatgaaaaatggttacgataaacaacaactatagagtcgaatactccggttatatcgaaccatatagtccagttaaaaattgaaatggctttgcatgaccgcatcgccggttaacactgattattagatagagattagacaaatgacataattagatagagatatacgaaaaggatagtgattccattatcactaatagtgacaattactgctcaagaaagcaagttggacttgagtgataaaacgcgtgaaattattgtcaccgtcctaacaaaaatatattaaattcgaaaaatgtaaatttagtagaattattaaaagtttttgacataaaaattgttcaatctctccaccactgtctccgcttaacagattcgctaactctaaaaagttttacgaaaatcaaattctcaaatctgaatctctttctctctttctcatggtgaagttttgtggcacctgaaactgagagagaagcttcttcttcttcttcgtattgaaacaaaccagtgaagcagagcagtttttcttctttctccatggtgagaaactctctttcgctcgagatcgatgacaatg

SEQ ID NO: 28469 - DNA, 3000 bp, Unknown
  misc_feature (1)..( 3000): 2750-1469P.txt file - cDNA_ID_2996956; gDNA_ID_2926272; Annot_ID_143449
cgttgagaatgtagcgaaagctgtggctaggcttgcgaggaaatgcaacgatcccaagttgaagtgctttgagaattgttttagtgatatgatgaagactggagctgacccttatggttggcagtttgggtggaagaaaatggataagaaagctaagaaaatggaacgtttcatatcatctaatgctagtctctaccaggagactgagattcttgctgatcttgaacagactttcaagagaatgaagagcaatgaatctgctactgacaatcttttggagtatcagaaaaaagttacatggaaaagacacgaagtgaagaatctgcgggatgtgtctctttggaaccgtacttatgactataccgtcattctcttggttagatcagttttcacaatccttagcaggactaaacatgtttttggcattagttacagagtggaagcaagtgatgttagctctgcagattctgattttattggccgcagccactccgtttctactattttaactcctgtatctcataaatctgagtctagtggtcttcctagatttgcttctggcccccttggaagatttaccggtccagcatcgggttcagctgctacaaggtccacgaagatgagtgatttcctttcgggttctctcagcgccgaatcacctaagtcaggtcctcttgttgcagaaaaacacaaacgtttcaagttttactctggtcagcttgggaagatcacctccaaatcaggaccacttatcggaatgggcaaaaacaacaagaagatggggcagaccccggaaaggccttcaatttcctcagtgaaaaagcaattgaaagccaaccgattaacacaggttggcccatttaaaggctgtatggtgtctcacgatgggattacgcctctcagcactagggcccggaatggagctaggaatagtagtgctgagcatcacattcttgaagataattctaactctgttcacgttgaaaacttgacacttccttcccgacccaagctgtcagatgctgctcctaatacccttggtaccgcttgcttagcattacactatgctaatgtcatcatcgtgatagagagatttgttgcgtctcctcacttgataggagatgatgcaagagacgacctttacaacatgttaccggcgagcgtgagaacatcgcttagagaaaggctaaaaccttactcgaaaaacttgagttcttccacagtttatgatccaggcctagcaagagaatggacagacgcaatggcgggtatcttggaatggttgggtccattagctcacaacatgataaaatggcaatctgagcggagttacgagcaccaaagcttggtttcaaggacgcacatagttcttgcacaaacccttttctttgcaaaccagcagaagacagaagccatcattaccgagcttctcgtaggcctcaattatgtctggagatttggcagagaactcaatgccaaggctcttcaggagtgtaccagtagtaaaacccttgagaaatgcttggacacagataactagtgaagctctccaagacgacacacacaagtctggatttttactacctcgttgacctaaaccggcactggatctcacccactgggtaaaccataccgtgggcgcgccctgtatcctatgcagcttggaccaaaccagagtacggaaaggtgctcgattaattacatgagaggtattatgatctgagcacctctttatcttcttccccgtttactattctgcttcgtggattgcaaaattctgacttgtagtaggatgatgatgcgttgtatattgttctatgatttttattgtggtgagttacatactgcatatatacgtatgtgccaaggttgttttagattctgtaatactcgttggtgatacagaagattccttaaattccgatttgtccaagttttgtcctgtattattattactcgtccttggtcttctcctcccttttggtcaactgtattcgtatgtgggtttgtcaaagtttgaaattaaagtcaatagatttcttagttgattattgtttcttcagtctacatgtttaaattttatgatataagttttatgaatgaatcgcacttgatctagctggccaagagaagaagattagtgttttgtattcttgattccaactccaagtcccatgtcacagaattcagcatgctgaatcgttttatttgtcccaagcacatgctgaatcgttatagcattaaagaactttatactagtattttttagagaaatatctagcatttaaaaacaaatattagtatgatgataaaaaattttaaaaggaaatatctaccattaagaaacaaatattggtatgatgatagtattattatatgatgataatatacaactagtaatattttatagaatgggtcatcatacaattacactagttaatatttactaatatccattttaggatattttaaaatatattaaatgtaattaattttctgttgatatttcatagttttagatcaaaaatattgtaaatattttgttaattgagttaaaataagaaatctctatttaattaccaaaagttacattaaactctttcattaataaatggactatatcaacaaactctcatcattatatattaaggttgaattaaaaaacaataaaggtgagaaataatatatttcctttttaagaaactcttaatcaacaaatttcctttttattttatgaaaaagagacaaatttccttttcctaatcttattatataggtgagaaataatattattttagaggaaaaaaaaaagaaggtgagaaacgtaaactttggccgtacggaaacagcgtcgtatttggatgtctcattgtctttgtggcaaaaaggcagcgtgctaaatccgtcctttgccaccgttgagcggccggtgaaccccaagccgaatcaccgtctctcccacctctctctctcccctctctctctctccttttttacatg

SEQ ID NO: 28470 - DNA, 3003 bp, Unknown
  misc_feature (1)..( 3003): 2750-1469P.txt file - cDNA_ID_2996960; gDNA_ID_2926272; Annot_ID_143451
gttttgatcttaaaatagaaatgattgagcaaacctcaaaaatgtcttcttaggatcacaaaatctttcctttagcttattaaagccgggagttcaactctctctcccttgtagactttttgttttcaaatctttttctttcaaaaaatcaataattagttaatgggcataatatttggttttaattaagtccatagattttttaggaccatctctaatcacgacaaatatcctaaattgtaacacatttaaaacttaaaagtattgcattcacaatccttaaaatatatatatatatatatatatatatatatatatatatatatgaaagttatatagaaacgataactccttactcaacaattagcccaaaaaaacatccataatgcatttaaactaggaattttaacaaactcaaataggttggtagttaaaaaaaaacaaatagtagatgtacatacgtacctttaaaaatatatactcatatcgaaagttttaaattttgcgaaattaaatacatttatctatcaattaaaatacatttaataatgcataattctgtaatatctatctttaatttccatatagaaccaaaacaaaataaacatatcaaatagttttaacttaacaaaaacgttagggaaaagttgacctaactagcttgattgacgttgaacttgtcaatgcgaaagcgatatttccaatatatactacatgtagtattatttatatggaagtttctaaaaaggtgttgagtggattgttacttgttggaggatgctattttttccttcttgccataatattttacgagtatgggataactacatactcatgattatgaaacgctcactttatttgaaaaacctcctaatacaccaaatatgtcactagattccaaaacgtagaccaattgtatctaatctcaaattctcaatcaaagtattaatttaccgatggtaagaaaagttaaccgatataattatcaaaagaaagaataagtcaacagattcttaatctctttattttggtatatgaacatttgtacaaaaatctcaaaagatatgtaactgtttaaaatataaattcactgagattaattcttcagactcgtgttagctataataatgtcaagagttcttcttgtttcaaggaaaaaccttaaagatatgtatattttctgtaattatgatgatataatttgctattcattgtcacaaacattactttaaaaaatcgtattttcattactacaatgttgactaagaacaaaaatacattgattattgatatatcgtcaactgaattttcttccgagggatataattctcaaacatagcaagaatctcataataatgtttcgtgactacctttagacgaaatttttttaagattcgtaacgtgacttatggtctcttgctgtgggggtcaatgcgaataaatctaaatgtatgggagtcaaataaaataccaagaaaaataaaggagcagcacccaataaactatatgggaccagaaatcctttcattggtttaaaataggattatcccgaaagatgaaggactaaattgaaactgattgggggtaggaagagatccgtcacaatcattaatggcttccacgcggaaacttgtcgtttatacaatttcattaactttcgggtcgggtttatattccaaatgggtcaaataatattagtttaatacactaacggagtaattaattggtgactacaattttatcagtttggtgcaattagaaacgaacatagtcgtaaaatacgagttcggtgttatacctttatttacgttaaaaaaatacgagaattttgtgtcaaatttcaaattaatttcatgaatatatggaaattattagatactctagcgaaaatagtgattatgagcgttttacaaaaatacgattttagcattgaacttcctttatgtaattcggtcaaatgttggcatgaagaagcaagtttgcaacattaaatttcatttaaaaatcgtgttgacatactttaaaatctaaatataggaagaagaccaaaacattaaatttagtaagattctaatgaacatttataagttataacttataaccaacaaaagttgggtttagcgttgttgctttatctgaaaacttgcaaactaaaccattttaataggactaatgacaattaacaacaaaatacacttaagcaacaacgtcctcgtgaatataatttgggcctcaggcccatattgctaacgccaactgatatttcactttattccttcttcatctcaccacactctctctctatctctatctctaacggcatagctgactcagtgttctccggcattgactcgcctgagaatcagaaagcttagatcggtgagcttttagctccattttctgtttatttacatattatttcctttttttctctctcccttttttatctggaatttgttctgctaaattttccagctgttacattttccgatcacgagaagaatcactgggtttttatgttaatcaatacatgttcctgttttctgatcataaatctcagctattaacacctgattttgattctgcgtaataaaaacctctgatttgcttttatcttcactttccccataaacattgcttactttattcgctcttcttttaccgtttccagctaaaaaattcttcgctattcaatgtgtttctcgttttgttgatgagaaaaatatctgacaaaaaatcatttattgcattttatggtgcagattcttagttaatgtcgccttctctaaccaagtcagattaaaaaggagtgttcgtccatgttgctttgttttggtgtttggagagagttttcggagagttaggtgagtgttatttggggtgaggtagtgataaggtttgaagggggagtgattcatcaagtgtgttatgaattcgagggctgatccgggggatagatattttcgagttcctttggagaatcaaactcaacaagagttcatg

SEQ ID NO: 28471 - DNA, 3003 bp, Unknown
  misc_feature (1)..( 3003): 2750-1469P.txt file - cDNA_ID_2996964; gDNA_ID_2926272; Annot_ID_143452
cttgcagtacttagagtagaacatgaattagaatatcttaagaaagtcatggttttgaacagatggacctccagcgtgtaacaagcctctttacaatttgaattcaccaattagaagagaagcagttgggtcagtctgtgaaagttcgtttcaatatgtaccgtcaacgcccagtctgttcagaacaggtgaaaagactggattccttgaacagatagttacaactactggacatgaaatcccagagccgaaatctgacaaaagtatgcagagcattatggactcgtctgctgttaatgcgacggaagctactgaacaaaatgatggcagcagacaagatgttctggagttcgaccttaacaaaactcctcagcagaaaccctccaaaaggaaaaggaagttcatgcccaaggtggtcgtggaaggcaaacctaaaagaaagccacgcaaacctgcagaacttcccaaagtggtcgtggaaggcaaacctaaaaggaagccacgcaaagctgcaactcaggaaaaagtgaaatctaaagaaaccgggagtgccaaaaagaaaaatttgaaagaatcagcaactaaaaagccagccaatgttggagatatgagcaacaaaagccctgaagtcacactcaaaagttgcagaaaagctttgaattttgacttggagaatcctggagatgcgaggcaaggtgactctgagtctgaaattgtccagaacagtagtggcgcaaactcgttttctgagatcagagatgccattggtggaactaatggtagtttcctggattcagtgtcacaaatagacaagaccaatggattgggggctatgaaccagccacttgaagtgtcaatgggaaaccagccagataaactatctacaggagcgaaactggccagagaccaacaacctgatttattgactagaaaccagcaatgccagttcccagtggcaacccagaacacccagttcccaatggaaaaccaacaagcttggcttcagatgaaaaaccaacttattggctttccatttggtaaccagcaacctcgcatgaccataagaaaccagcagccttgcttggccatgggtaatcaacaacctatgtatctgataggaactccacggcctgcattagtaagtggaaaccagcaactaggaggtccccaaggaaacaagcggcctatatttttgaatcaccagacttgtttacctgctggaaatcagctatatggatcacctacagacatgcatcaacttgttatgtcaaccggagggcaacaacatggactactgataaaaaaccagcaacctggatcattaataagaggccagcagccttgcgtacctttgattgaccagcaacctgcaactccaaaaggttttactcacttgaatcagatggtagctaccagcatgtcatcgcctgggcttcgacctcattctcagtcacaagttcctacaacatatctacatgtggaatctgtttccaggattttgaatgggactacaggtacatgccagagaagcagggctcctgcatacgattctttacagcaagatatccatcaaggaaataagtacatactttctcatgagatatccaatggtaatgggtgcaagaaagcgttacctcaaaactcttctctgccaactccaattatggctaaacttgaggaagccaggggctcgaagagacagtatcatcgtgcaatgggacagacggaaaagcatgatctaaacttagctcaacagattgctcaatcacaagatgtggagagacataacagcagcacgtgtgtggaatatttagatgctgcaaagaaaacgaaaatccagaaagtagtccaagaaaatttgcatggcatgccacctgaggttatagaaatcgaggatgatccaactgatggggcaagaaaaggtaaaaatactgccagcatcagtaaaggtgcatctaaaggaaactcgtctccagttaaaaagacagcagaaaaggagaaatgtattgtcccaaaaacgcctgcaaaaaagggtcgagcaggtagaaaaaaatcagtacctccgcctgctcatgcctcagagatccagctttggcaacctactcctccaaagacacctttatcaagaagcaagcctaaaggaaaagggagaaagtccatacaagattcaggaaaagcaagaggtaactaatgtattctacaatctctgtgatataattttgagattttagtaactgatgtgtccaaaccagctccttatcactgttggtgcgttgtataggtccatcaggagaacttctgtgtcaggattctattgcggaaataatttacaggatgcaaaatctgtatctaggagacaaagaaagagaacaagagcaaaatgcaatggtcttgtacaaaggagatggtgcacttgttccctatgagagcaagaagcgaaaaccaagacccaaagttgacattgacgatgaaacaactcgcatatggaacttactgatggggaaaggagatgaaaaagaaggggatgaagagaaggataaaaagaaagagaagtggtgggaagaagaaagaagagtcttccgaggaagggctgattccttcatcgctcgcatgcacctggtacaaggtgaagatccacttctcttctcaactccatttttattcacacaaattagtagaatactcaaaaatgatgttttgtttgcaaaattttaaaattcactagttaaccatgtcaaataatattcataatgcatcttgtgaagaacaggtgtgcatttatggtgacagctgaatggtttatgtgcctattatttcttttactgctatagatgaccaattgaacttaaacgtttacaggagatagacgtttttcgccatggaagggatcggtggttgattcggtcattggagttttccttacacagaatgtctcggatcacctttcaaggtatatgagttgccttaataaattgagttccaaaacatagaaattaacccatg

SEQ ID NO: 28472 - DNA, 3003 bp, Unknown
  misc_feature (1)..( 3003): 2750-1469P.txt file - cDNA_ID_2996968; gDNA_ID_2926272; Annot_ID_143455
ggaaccacagggtttcaatatttatgtaagttgacactcatttagcctaatgtgctattatatatatttagtgtcaggcttgtttgcccgccttttctttcagtattctttttctggatactttcttggttttaaactaatgatgataatgactcatcttgtaggttggtgggggtatgggaagaacacacagaatggagtctacttttgcccgcctggcagaaccaataggttatgttccaaaggaagatattttgtatgctgtgaaggccattgtagtcacacagcgagaacacgggagacgagatgatcgtaaatatagcagaatgaaatatttgatcagctcctggggaattgagaagttcagagatgttgttgagcaatattatggtaaaaagtttgagccttcccgtgaacttccagagtgggagttcaagagttacttgggatggcatgaacaggtattgttactaaaacccttttgaaaattgcgtcactttcagaactttatagcatggcttaatcaataaaatcttatcgtcgttgtgtactgatagggagatggtgcatggttttgtgggcttcacgtagacagtggtcgtgttggaggtataatgaagaagacgctgagagaagtaatagagaaatacaaaattgatgtccgcatcacaccaaaccaaaacattgtcttgtgtgatataaagactgaatggaagcgtcccatcaccacagtacttgctcaggccggcttactggtaagcagttttatttgacccataaggtatgaaaatctaatagctattgtgtcttaagctgagcaaaccattgcttatttgtgcagcaacctgagtttgtcgacccattaaaccaaactgcaatggcttgcccagcttttcctttgtgccctctggcaataactgaggcagagcgcgggatccccagcattctaaagagagttagggcaatgtttgaaaaggtaagatctctctgtgcacttatctaatcttgtgccattacaggcatttgatattgatgtgcaaaacttcttccttgtatcaggttggtctggactacgacgagtctgttgtgataagagtaaccggttgtccaaacggctgtgcaagaccgtacatggctgagctcggtctagtcggggatggtcccaacagctatcaggtacggttggagcacaagctcttgttactagtgatgagacagtatagtagtaagcaagcaggctaatattctgagttgttgtcggttgtgcaggtttggctaggaggaacaccgaacctgacccagatagcgagaagtttcatggataaggttaaggttcacgacttagagaaagtctgcgagccattgttctatcactggaaactagagaggcaaactaaagaatcatttggagaatacacaacccgcatggtaagtatcacatataacttctctttaactctctcactgtggcttgaacatttatattgaagaagaagaaaaaacaaatgactgtgttttttaactttaacaatggtaaaattgcagggattcgagaaactgaaggagctgatagatacatacaaaggagtttctcaatgagcacaacagagatcatctttcgttttataattcatgtaatgtaatgtctctgtctgaactgttactcttcggtaactctgatggagaacttgttctcgttttggtttgattttgtaccctcttttttttttttgtttttttggattgctttgtctttgattggataatgaagcattactgtatcaaggctaattagcccatcaataagcctttttaaagctctggatatggaaaagtcagaacctctctctcttatctctctaaattttagagagagagagattttgttcgatgttttgcatgctttaccagcttatgaatccggatgtgatccggttttgtcgatctatctcgctgtcctatctcgccgtccggtgtatccggtgttgtttacggctatcccgttgccgttctgtttgtttcaccgaattgatttgggaaacaatttgatatcagttttttcttcttttctaactggaaattttcatggccttctctcgatccgttccaccaccatccacaatcaggtaagtgttttggtgtttcgattgggcgactgttttagtctcatccacatgaatcaatatccagatttgggcgaattctgggttgcttgactccttccaaccgttatagttgaaacggtccggcgtttttgacggcttcaatcacctcatttgaggtccgtcttgccattccaggaagtcaagatatcaatttccgaagtctattcttattagcaagtgatgacaagagatcagaagcttcacctcgtggttgattgtttgctgacaacttctttcatgcttttgttctcggaaaagatccagtgatgagaagagaaagaatttgaagattaaattgaatcttttatctttttcggtttaatagttgtttgtttttataatccggagatgtttccggttgttcactcgccggaaattgtgccggcttctgtctgcatattttgctgaaggggttgtgggtaccggtttactaggttatccggttcacccggtttgtaagattggtttaatgaataaaaatcccttatgagaaaaaaaaaaaagctctggatatcatttgattactcctctttctaagatggcttcttatgctttttctttctgttgttgctcagttgctctgtttaaatatggactgtttttttaacccacaagtaaaacattttgagaaatttacacaccactgtaattttttaatgtccacaattatttaaaaaaacatattcacacataaaaaacagaatggacgggaggggtataactggaaattttttcacatcgattaaattggttgaaaacctaatcgccttaaaccctaattgtatcatcctcttccttgcgttctctctttctctctctcgccgacgacgaaaacatg

SEQ ID NO: 28473 - DNA, 3003 bp, Unknown
  misc_feature (1)..( 3003): 2750-1469P.txt file - cDNA_ID_2996971; gDNA_ID_2926272; Annot_ID_143457
cttaactctttgaatttgtattcgtcttaacagactgggaaatcaaagcattttgggttcatacagtttgaggaccctgaggtatactttagattctgtataaaattggtgaaaccgttgtgtgctatatatatactctagattcaattcttgacatttttatttggttctctgcaggtggcggaaattgcagcgggtgcaatgaatgattatttgttgatggagcacatgcttaaagtccatgtcattgaaccagagaatgttaaacccaatctgtgagtgattttaatcgactttttttcgtagtgatcagggatcttctttgcaaatagttagttggcatatctaattgtgtaggttagctattttacttggctgcttatgtactttgtgctatattgttgaatgaaagagctctatataacaatatactatctcgtgtggtttagcgcaagctttgaagtacaatgttctatggtttacagagtgagacttaatgacatttgagtcataggatgatactagataggatgtgataaaataagtgaggataaaagagagtttattgaaagatcgttttcttggctgagatggttttatttatgagtcataaaattagggtaaagaaaatgtgattcttgtcccctaccttggtttctaatgactccatactctaaaagatgtgcgagactctctagtgtttccagaagagaacatgcatgacctattttgagaattgttcttttcaagtagttgtggatcttaatgtatctatgtcctgaatgttataggtggagagggtttaaatgtaacttcaaaccagtggattcggttcagattgagcgaagacaacttaataaggttattctctccacttttcttgttatcaatatgccatttctcttgaacaagtggctctaactttgatttatgtcactgttgtatacaggaaaggacattggaagagcataggaaaatgttgcagaagatagttaaaaaggatcagaaaaggaggaagagaatcgaagccgctggaatagaatacgaatgccctgagcttgtaagtttccgattacacaattctatacactacatcttcaacattgaactaataactgcatgttttgtgtcactgcttcaggttggaaacacacagccagtcccgaagaggatcaagtttagtgaagaagactaaaagctgaagctgaacaacacttttccgataaccttttttgaatagaaatctgttctgttgtactcttgatattggatcaataactaaactttaaagtttgcaatgaaaacttctgtttcaatgattcagattttctgtatagcatcaagatactttcccgagacagcgggtgttagattctctctgttgaaaccgctctttctaggtgcaacggttgcgatgagaacaaaattctcaccatttcctacatcgatctcatacaactcggcaaagacatgtctaaactggtcttgaagctcttggtaaaatgtcttgttcggaggaatgacattgataatgaaaaccccagaaggaacaagaacagttcttgcagctagcaacacatctttagccacaaactcaaccggaggagcagtcatgccgtgaattggatcagtagagtccagatcaaccatcaagacatcaaatctggcatcatcatcacagcttttagaaagtctctttaagaactcaataccatcttcaacgtgaacacgagctaagctttcctctaacccgaagtattgccttgcaatcctcaagacttcaggatctatctctacgcctgtaacttcgaaccctaactgtagccttaagaaacttagcaatccaccacctccaaccccaatgcacaatgcctttggtttagatttgagatgatcatatacatcagaaccaatcaagctaagacttgccaccattggtgccaagtaaggatgcacaagttccgtaagatcaagcttgaactctgttcccattaatggcagagaaggattcgaacaacttctgggaatgattttaatggcagattgaactaaatttggcattctcttaaacctcaatctcctcctaaattctctaactccatcatcgatctcaatctctacatcttcaattaacatttcaccaacgaaaggcccgacgcatttttcaatctctacactggagacaacattatcatcgtaaatcagaaaaggcacatcgtcgatttcttctcgtgttagggttttaggtaacaaagctaccacaagaggtttcaatcttatctcgagtttctcagattcgtcgtcttcgccgttcggtcggtgataaaccgcaggtaaatcagagtcagtatcgtgatcatcaccgatcaagatcaatcgagagatttctggcatgttaaggagaagctgtaattgaccggactcagtggagaagatccaatcggattctcggtgcttggggacgagaatggcggcgactcggggaggagaagactcagtggaatgaacaggcgagtcgaggacggcgacgcggaggagatgaatcggagaattagggttagggatagtgaaagagatgaaacgagaaggagaggttttctcgaagattctcacatcaagcgccatttccttgattttgatttcaccatcatccatcttcgtctttttatgatgctgcttacagttaaccgtaataaaaccaaaccagaaataaaccgataaaaccggaataaaccaaaccagaacaaaccgatcatgtgactttcacgtgtttcaactccgaaattttcaatttttcatttactcatcttcttcttcttcgtcctgggcttttcatctccaggcctctctcatttccttctctgagtctacaaacatgtagaagcaggtgttttaattacgtcatagcagtaggagaagaggctttaagtcctcttctttctctagctaccgaaccactttttaaaattcgcccaaatcacaattctgtttgcacttagaatg

SEQ ID NO: 28474 - DNA, 1797 bp, Unknown
  misc_feature (1)..( 1797): 2750-1469P.txt file - cDNA_ID_2996975; gDNA_ID_2926273; Annot_ID_143460
aagctttttttagagacttcaatggtgagccaaggaatggtatctcttacaaagtctctatgcactatgactccaagagtccgtctcaagaatccgaatatgttgcagaaactaaagactggatcttgtaatttccgtttcagaaatctccgtgtcttatgcacaccaaagctgtctcagtgggaaccgtcacctttcattcatgcttctgcagaagaagctgctgatatagtattggacaaaaccgcgaatgtgttcgaatctattgtctccgagagtgcagaggaagagaaagtagatatgtcagcgcaacaacgaactaattctcaagttcaggtacttaaatggccaatatggcttttgggtccatctgttctcctcacaagcggtatggcgcctactttatggcttccgttgtcatcggtttttctcggttccaacgtggttagtctactttctttgatcggtctagattgcattttcaatcttggagcaacccttttcctcttaatggctgattcttgcgcacgtcctaaagacccatcacagtcctgcaacagcaaaccaccatttagctataagttctggaacatgttttcactcataatcgggtttctagtcccaatgttacttctcttcggatcccaatctggccttctcgcttctctccagccccagattcctttcctctcgtccgctgttatcctcttcccgtacttcattctccttgctgttcagacattaacagagatcctcacatggcactggcaatcaccggtctggctagtcacaccagttgtctacgaggcttaccgaatcttgcaactgatgagagggttgacacttagtgcagaggtcaacgcaccggtttgggtggttcatatgcttcgtgggcttgtctcttggtgggtattgatcttgggaatgcaactcatgagagttgcttggtttgctggttttgcatctagaacaacaacaggtcagcaaccacaatctgttgcttctaagtaaagacagataaatgtttcttcgtttagtttttaaagtcatgtcaaagatttgtaactctttcttcactgtatagcttttattattcgtgggttggtgataaggattaaaaaaaaacacatattctttatgatcatattcgctcttttagttaggtatgtgatgttattcatttcaatattaaaggctgataggttgacgttaaggttgagaatatgcaaaggttgacacagattcctgtcaaagaaagacatttaagaatttacgaaaaatgatgaaaatgtttctcttaagaaagtagagcataatgtcgaataagactagtttatatggttttgtatttttactaagtcatgtcagaaagaagaagaaaaatatatgtactgtgttatagccttataagtaataggtttttgcatttggtgagtacttggtaacagtaaaaaaaagaaagttatacgttacgttgtgaaatatgatcagattataatgtatattctttactttagttgaattgttgttgttgtaattcatctccacgcgtttgcgattagggcgcgtttgcgtttttatcaattttaaatgaattgacagtattacccttgagaaatgaacaagacaaatagcgatgtcccactctattcattagctctgtctaatctctctcgatcgacgactgctctctctctgaaccggagacggtgtcacgggacgaatctaatcgccgggaaaccgttttttttttctctcggaaaatcgatttgaatctccggcgatctgatcgggatg

SEQ ID NO: 28475 - DNA, 3000 bp, Unknown
  misc_feature (1)..( 3000): 2750-1469P.txt file - cDNA_ID_2996979; gDNA_ID_2926273; Annot_ID_143461
aatggaaatacaaccaacaagtcctgcaaaagctccttcccatgtcttctttggactaatgctaataagaggagttctaccaaatgcctgcaacattagttgattaacttcagccaggagaagttcttgcgagactatatgcatgccctgaaaagatacataccttgccaccaagaaaagcaaacgtgtctgaggcaattataccacagaaagaaatcaatatagcaacaagtccaactgtccaatgtgcttggccgccgaggatagtaggccagcttctcccaattcctataagtaattaaactgctcaggagacttggctttgattactttacggatcaaagctaggaaagataataataagggagtgcttgccggtgtttagaactggagcagtaagaccacaacgtagcttaacccagaaacaaggaagatatccacagtaaaacaggccaaacatcgtactactcagctgagaaaaacgcgggtttcctctctgtaacaacaatgccattgcaacaacaaacgccgctgaagttatcgagatatctatatgaccaaaatacctacaaaaaagataaaacctttattcagaacaagagaaaagatcacaggcttttgcggtgtttactgactgaaactactcacaatgtaagtatgggcataagagcacagataatggagcagactctagaaagatatcgtggaggaggtgtcattccttgagcaattcctttacttctcaccagctcgaaatattcccgggcacttagaagaaccgcagctgctactgctactgtgaatacccatcctccagctaatacaatacctcctacagacaatccaattcctagaccgaaagttactcttttcttaaactggcttctagatttttgcttctgatcatctaaactcgaatcttcttcaacattttgcaattcttgatctatgttgtgttcctaaacagacaatagttacagcaatgccatgataagtttctcagcatcacatagcaatccacaagaacgattattcgtactactaagctaacacatcaagagaaagaggagtaaagttacctcctttgagttggcatcgtcaccaatttgatttgattcagctcgagcaacggccgtgataactctccggttaacagaaatcggagtaaagcgagaatgagacaacaatggtttcgggtacttttcagagaattgaggaagaattagatatttccttggagaggaacggcaagggcatgtacagagagagctcaatgaaagcggtaatggcttatacctacagacttcaacaaaaggcgccattggaatccggtaatcggaaagaagaagaattcaaaatcctaaaatttggataaaggacaaatctttacgataacggaatcatggaaggaagagattttgaagattgtgtgattcggtgaatctaatcggagcttatacgttttgtacggtggagatgctaatggtggaccttggtggtacgacgagagaggatctgaaacccacgcgcccctgttagcgcgttgataactctccttctttgttattgcccgaaagtctctggctgcaaaggaaggtcttacgtggaactggaagctgacctgagtgtcaagtggcatattgttttgtttgttccttggataaaggattgtcttgttcttcatgtgtgttttaagcgttcctcaaggtcttcacaatgtggatggtgttagtcctacaggagtgaagaagtttgcatcttacatcttagtatcagaggaagaaacagaggaatcggatggagactgtggtagggcataaaagagcgaagaccccaaagggcaagcaacttttgatcagtagattttgggatctttgttagtcttcgagttgaacagattctcaaggacaagcaacttttgagcactgtgacttatgtggaaccttataaccttgaaacttgtcttggagtaatatgcaaatttaccaattgttcatgttagagggaaaatgtatgagattggtgaattgctttcagaaatattgctctattagatgaatcaactactagtcaaagcccttgctcgaggacaacgtctacatcctttgcacttttaaagagctcaacaaattcctgtggagggaaagaggttactgtggcgatccatggctcagagtcttctccatgttcaaatgatcttgaaggtgattcaacagactctgctcttccttgcaatctaattcccacgagaacattgacagcggtactcacaaactcttgttggtcttgtctcaatggtttctaaattctaatcttatgaaagcttaatatctaagaaaaagatttaaactttgcttctttttggtcttctgatctttagtgatcagaagtagaggcgatatagtatctatgtaaatcagcattaattagttgaagtacttgaaaaatatctgatcatttcattcttaatgatatgagtcatcaattaatcctctcttcatgatgtgataatgaatgcttgagaaaattgcagaagaaaacaatgaacaaaaactattattacacttacgttctatacgcccattaaagaagatgatcaaagcctaacactatctacaaagaaaaaaagttacaaccacaatcaaatcctttacgcggagaaactagaattcaataaatggcgaacagaggatgctacgtgacggttaagtaactaaaatttaaatttgtttaattagtttttgatggtttagtagttgtcaaataaaccgacaagtgaaaaaaggaaattaacacgagttaactttttttgtttaaaggaaatttgaatcccaaacacatgtgaaaaaaggaaacttgaaacctaaacacatgagagagtttataaatagtagtcggtcgctgctcttcaattatcttctcgaatctaatcgattgatttctcatttggattcgtcaagagaatcactgaagcgtttgtgttccaagtagaaagatatg

SEQ ID NO: 28476 - DNA, 3003 bp, Unknown
  misc_feature (1)..( 3003): 2750-1469P.txt file - cDNA_ID_2997005; gDNA_ID_2926273; Annot_ID_143475
gtacacgcaagccatgctgccatatccacaacgagtacctctcctggtgaaaaaagctccaatacagatgacaacacctcatcagacagaacagatgttagacgtgaagtaacacgacctataccctttgcagcagaccaacgaaccacggtgtcctacacagttcagaaaataataaatttcaaaaggacaatgcttgcagatactagtaacatgtgcgattgtctggttggcagctgaaagtttcaagaggcggaaagttcacataagatattaattcaggccatcacagctttacgtgccatctcagatatgtataacattcaagatctgtttaagtactatctggttactcgagtctacaacttaatataaagcagcctacttatactcaaattattgtgtgggcatctattcgtataagtttagagataaccacctaaagttatcagcctaacagtagtatctcaccctttaaacataccgtgtccctcaaaccagatagtagcatttcaataatctcttctaagatttctggaacatccatatcttcatcctcttgatcatccaaactttctggttgtaagatggcagtcacagtatgatcaggcgccaatctttgagatgaactcgtagacatattctcagaaagagaggcggtttgagcctgcaggtaattcaataaataagtctcggatgactaacagaaaatgactaccaaacattatgtcaatattgacattattcatagagtaaaaatataaaaacacatgacgaggaagagttcctctttgcactactattctacaagctaaaaggtatgtaccacatagcgccaggaaggtgagcgatgaggaagacaaacaagccctatcctctgagttaacttgatcaaatacttgcgaagcagagaacttttagccgccgcgtttgatttgcttagcacagtcacatcattcaaaacaataggaagcacatctagcaacactttccggctagcagtctgccaacatgagtagacatattagatccagatgcaaattggaacaggttaagtaatagaaaccagtaatatttctacaagatacaaaacagataagtcaaattgattatgtactttacagacatctatatatgtttgacgtgttaagtatggaccaaagttaaaacaaagagaattccaggttacaaacagaataaaccttaaaaatggcagatagagcttccattacaccaagcaagcgaaagtggttcgtgacactatcttccttacaagacaaaacttcatatgtccactcaaaaaagctgaaacggaaatgccacaatagaataaagaaaattagttaatccattcacggtgagtaaattgtacatgttacaattgaaaacagcagtttagaaacaatcttaagtgttcaaagtgaaacaacactgaagcactgatggtggtaggaacagacctcgaaaaagcttttcccatatccggacgagttaaaagcttagagagtagcaacctcgatatcctgcgcattggtccagcactgcacagatagtccttacagaaacctaatatcttcaataccaaaggagcaaggtcatccacaccaaaggtcttgtcatcagcaatgcttgtatcaacagaagaaatatcaaacggaaccaacacaaggattgaaagccacaaaagagtaacacatttggcctccatttctccagtgctttcttgcctcaaggcagaaacagaatttgtactatggcacttctcgaggagcaaaacggcgagttccagatcggatacttgatgcggaaagaacttgataacagctttgtacccacatacagtaactaaagcatagataatgatgcttattggcttaataatctcaagaatttcatcaggtttggcctctaaatcaactgttttggagcggatgataaacattaatggagaaactatactctctaagtaaggttccactaattgaccttgctcctggtatttatccatctacaatacaacaaaacaaagtcggagaaagtaaatcaacatgatactgaaacatgggttggatcaagtagatgaagtcaaaagactaagaagcgtacaatggatcggatcttatgaacagaagtaggatcaacaacacggccatttgaaacaatatcatcgagaagagatttaacgagcttccattcttgtaaaaaatacctctgtagaactctctccttagaatcatgctcatcgtcttcttcctcttcaatttttaccgccgtttcgatttcgatcttcgtcggcgacatttcctctgctctagatgccattactggaaagagaaaggggttcaataaattcccgcccgccgataatactctcagtgtagaaccaccggcaaatcacgagatcggtgacgtcgacgatgagtttacatgttaaggcccatagtaatttattgggcctatatacccatgttcctattttgggcctataaccttcctcaatgtagcttcgttggtctagattttccatctttgggtgcttttataaaccggcttaaccagagttggtaggcttgatacttgaatctctttctggttttgtatattcaagaataagcaaacatttccttaaaaataactttttttttgtcgtacctcattttaaaaaagatattttatcctatttcattatggcggaatatccaaagaacaaaaaatggtagtaataaaaatagcgaaaggcatagaggatcactaaactcttagccttaatcagcggtcaagattataccttttagtgagatccaacggtcatatttgatccaagttgtcccttagtgaaaacgaagagatggcgaaattttgtttgattggctaaaaatcaacacactgataaaataagagttgcagagagagtctctcatcttcttcatttcttcaccaccatcatcacacaccttcttcttcttcttcttctctctctatcacaagagagtcaaatccatg

SEQ ID NO: 28477 - DNA, 3003 bp, Unknown
  misc_feature (1)..( 3003): 2750-1469P.txt file - cDNA_ID_2997013; gDNA_ID_2926273; Annot_ID_143483
agcggttttatcaccattgttgcagattaagtcggtgaaaccggataaatttacaccgcggattgtggagaagaaggatgactacgttcatgtggaatatgaaagtccaatcttgggggtaagttaagtaagctttatgttgctctctcaacctccatacctcaatatattggacaagaccctttggtttttgacagttagtagacgatgttgaattcttgttcactcctgggaagaactcgaaagtggaatatcgatctgcatcccgtaaagggaacttcgactttgatgtcaatagaaagcgaataaaggtaacaactcggatactcaagtgatatatctctgttattgccactggctaatagataatatgctcacacttttcttcattttttacctatggaggcattgcgacaagagctagagaagaagggatgggtatcagagaacagcttctgaagaaaagagtttccagattctattcttgtctattaaatatcttaatgtgatctatgtaaaaacattgccataaatagtgagagaaacattgatttaagacaaggattcgagtgattctcatacataaggaaacagttttggagaaacttcaaacacgagtcatgattttaactgtaaaatatcaaacccagtagcatttcatacgagttctacaactcaggaagctcgatgttgaagtgaaataacaaaccgataaggttggctaaatgcactaaaggagcttagtctttcctcaggtccatgagttcggtcttgataccgtcggccttaagtatcataatctcaagcttgtctccctattacagtaaacaatccacaaagcattagttagagaaaaaaacttgaggaagatgaagtagttgtgcaacgtaagggatatagattaagtaaatgttttggtaatattttgaagacttgaaccaaatgcaaatgatatgagcacaaaggcaagctttaggtggcgtggtgacaaaagaagacacaaataggacaacttacagtgtagatatccctctctgtggcagatgcgaaaacagttttaaccaagtcaactgcttcagcttcggaaaggggcgtgtttgaatcctacatggtggcagaagacgaacaaataagcaacagaacgattcattttatctttacaatgcgaaacgccaaaagcacgaatgaagaatatcaacaaacctgtttaggtagcaaaagaggacttggagacttgagctgattgtcaaggaaaggcatgatgagtgtggaaccagaaccttgagcaccgtatccaactctctcgtatgagccaacagcgtcgtaagtaaagacacacccttttcctggatatattcaagactaaagatcacacaaagtaccctcttctaaagtcacatcataacggagaaaaaaagaggagcattttaccttcctcgtcaagccctcctagaacattaaaggcatagtaggggaaaaaccgcttgaaataaagcgtgttggagagaagctgggccattgcaggacagctcatctgcttgttatgctgatgttgatagatctgaaggaaaccaaacacagagaaaacactcttacacaagtctttcatcattttctaatactgcgaaggatgaaagataattgatcaaacgaccaaagtttaactcaccaagtgtctggatttgagaaccttctgcaaagctttcacatcagcctggaagccagaggaagacaaaacagctctgtccgctctggaaaagttaaaagaagacaacagcttaacaagagtcttacaagttacataagatgaaaaacacgagaattctatctatttccatacgaatgaatacttgtggtatataagatcaacaacacagtaacaaacactctttacgtaaggttgaacaaactcaaagaactacacacattgtcaataaacgttataagaaaacgaataagctaagcaataaaccggattatagaatgatcaatgtaatcacaaagtttatatagagataattgtaaccactatcaaaagccatgtctaataataattaagaaacctattttatctccacccatatataactggtttcacccagatctacgaattacgattgcaaaaaaaccctaataatctacagcaataatagttcgattgccagcatggaatcactctcccaaagaatcaacagtgagagaagaaagagaatgggtacttacagtttatggattttggagtaatcgcgactaagaatactgtaaccagtagacatccgagtatcggcggcgataacacagtaatccgatccagcgatggccacacatgttctgaaaaacacacaacgattaaattcacagtaagtgaatcgtaacacaatcgcccagatagcaaatcagaataaagaagaaagacactaagcgaagaaacccagcaggttgattaaaggtcacacgatccgtaccctccattgttatcgtaaggagaccagttcgcgtgctgtttagtcatggcggatttgagagagaaagctttgagctagggcttagaagaatgaaaaatggcagacgaagctttccgggtttgtgttttgatgtcaaagaaacttccgaatcggatcttattagctctggctttgttaacaagaaaaagacggagactcaaaacaataccgttttggacgtggaaattacgggctgtaataggctttataatgggccttatttgggctttgaattccaaagaaataatctttcttttcttttcttcttcttcttcgtcttcgattttctctctcaacgcaaactcgtaagctgcttccattttcccttctagaccattgatttgttcttcgaaaaaaccgttctttcttttgcctctcactctagttccttctctcatttctacttctctagcttcactgacttgctgctaccactaaatcttggcatttgtggaaagttgggaatttagggtttttgggtgtgtgtgtgaaaacaatg

SEQ ID NO: 28478 - DNA, 3003 bp, Unknown
  misc_feature (1)..( 3003): 2750-1469P.txt file - cDNA_ID_2997021; gDNA_ID_2926273; Annot_ID_143488
tcattggacgcaaacttctcttcttcctaatcctaatcggtcaaccacattcgcacacaatccaaatccactcacttttgtcgtccggagtgtaattgagggcgttgctaaaaagacaagtgctagaatcacctggttatatataaattcaaacttcaacaaatgaaaagaaattataagaaaaaaacttcacgcgtgcgtcagaaggaattgcacgtgtgactgacacctagcatttgctgtctccaaccccatcctcttcttttctttgtcttccataaggtttttggtattaatacttaacctacttagggattagcatttcaattatacatacacgaatatatataggtctggttctgacataatttacaaagataaagactaagatcgacaaatcaatgaatatagacagaaagagaagtcttattttcttctactaattaaaatagccaaaagggactaatgtagtaatgtagtagaatggtaaactatgagtagttctatatcccacaagacacggtctgactcgttgtgttttgtaatctgacttcattagtgttgtttgggtcccaatccaattccccatgtccggcacatgctcgtctttctcggtttcacgcccattcaaatctttcccttttcataaatttcaccatcacggttaacggtaattcgttggtgtatcttttcaaaaagcgcctcatctttacttttgtttgtttgttagattgcttcatatttttcattttcttattcaactctttgtttttccttgaacatcacacttcaaaagaccaaaactagtggaacccatataccgcaccatgggggcacgctcttgtgttattgccataacagaacccatcatccttctgatttgtttaccttaagccacaacttaaaccctaaacctccatatttcaaacccttttctctcctacatgtatcactgcttcacttccacttttcatcaacctcacgttcccaagccctaactatatgtatatataaataactctatatttgattcattaatttagggacaccaaatctattcaacctaaaagccttcttttcccctatattgaccaactttttagcgaatcagaagaggaatggatgaggtatctcgttctcatacaccgcaatttctatcaagtgatcatcagcactatcaccatcaaaacgctggacgacaaaaacgcggcagagaagaagaaggagttgaacccaacaatataggggaagacctagccacctttccttccggagaagagaatatcaagaagagaaggccacgtggcagacctgctggttccaagaacaaacccaaagcaccaatcatagtcactcgcgactccgcgaacgccttcagatgtcacgtcatggagataaccaacgcctgcgatgtaatggaaagcctagccgtcttcgctagacgccgtcagcgtggcgtttgcgtcttgaccggaaacggggccgttacaaacgtcaccgttagacaacctggcggaggcgtcgtcagtttacacggacggtttgagattctttctctctcgggttcgtttcttcctccaccggcaccaccagctgcgtctggtttaaaggtttacttagccggtggtcaaggtcaagtgatcggaggcagtgtggtgggaccgcttacggcatcaagtccggtggtcgttatggcagcttcatttggaaacgcatcttacgagaggctgccactagaggaggaggaggaaactgaaagagaaatagatggaaacgcggctagggcgattggaacgcaaacgcagaaacagttaatgcaagatgcgacatcgtttattgggtcgccgtcgaatttaattaactctgtttcgttgccaggtgaagcttattggggaacgcaacgaccgtctttctaagataatatcattgataatataagtttcgtcttcttattctttttcactttttacctttttcactttcttaggttttgttttaacgtttgattaatacctgaaggtttttggaaaattttcgatcggataaaaggatttatgttgcgagccgaaacgcaacggtctgatctcggattgatctttatatatataggggctagtgttgtgatcttccttgagttgatgtttataatgtagtagttgatattgaatgaaatcttcatgttttttgataaatgattatagcttgatcaagatttagaagttagcatagaaaaatgcatgagaagactggttaaaattttcgtgcacaagtagctaaagagaataatcttgcttccttgtttaatggcaagacttgggaacaagatgattacattggcatacacttttctagacttttttctaggttatagacacaagtcaatactttgtattctagttacatttataaaactaaaatttcgattgtaaactatagaacaaaaaattatgaaaatcaataattgtaccctggttaacttataactaagagcatccccaacgatatatcttagcctaatcttagcaaacatcttagcattagattaagaagtagttcgttcttaaccattggagatgctctaagaacttaaaaaaattctcctaaacaaaaatatgaatcgaaatcctatcagaaaaagtctagcccggaaatctctggacgtgtgggccgaatctaaaccctcttaaagcccaatttgattaggatcaagagaaaggggaagccctaaagattggcgtcctgcgttcatcatcaccttctctcccgccgctttctttcatctttacaaaaccgattacttttgtcggaatctgacgtcagcatacctgctaccacttccagagttcaatcgatcttcgcctcgttgaaacgttttccctcttcgattatcaacagtgtctccactcgtatcatcaccgcctccaactaattttgccatctctctcgttgttccaatttgattctactagtgagctccgatttaatttagggttttgaaagatg

SEQ ID NO: 28479 - DNA, 3003 bp, Unknown; identical to SEQ ID NO: 28478
  misc_feature (1)..( 3003): 2750-1469P.txt file - cDNA_ID_2997021; gDNA_ID_2926273; Annot_ID_205215

SEQ ID NO: 28480 - DNA, 3003 bp, Unknown
  misc_feature (1)..( 3003): 2750-1469P.txt file - cDNA_ID_2997029; gDNA_ID_2926273; Annot_ID_143491
taaaggaatctagtttttcagttgccaagcattagaaaaaagtggtgaggactccagaaattgtagttacgataagctatgttatcggggaaggagctagttgatgtgatcctttggatttaggctcagctagacgtttagataatagcttggcatcgagtggttcagacgcaacattatctttcgtcttcttccttttgaccaacattagacaccgtttgaaacaatgaaaaaggcggggtactttgaagtccaaacagtctaaaatgagtgtcgtcttaccaaactaaaaacgacaggctgtgttgataacgtgggctctcttgggctttgaatataagttaatgggcttatatgaaacctgtattttctattttgaaaagaaagttataaaggacggtgtggaccagaagacactcttcgttttctctccacgtgggatatcacaggttcaagttccaacggtccatttttttgggtgcaaaattccaatggtccattaatccacgcatttaatcttacgacgttgtttagcataattaattaatttgaaatttagaacaaataaaaacgcaagagaacacaaaccacaaaatggaaactagtcaattagaagatctcaatatttcgacactactacaaactaacacaccaaaacaaaacaataacaatcatccaattctaaattaactaataagattaaacgtaaaccgtaacactctaattcccagtttttaacaaacagcatcacaaagaaataaaaactcgtcgaaggaagacaatggcagtcttcgtaattaaggttttgtttataacaagagagatgtggcggcaatagtgaccaatgcggtgaacaacgcaggagcgttaacgtgaaacgccgcgtttttcgcattactgttctctgaacttgtcggcgagtctgacggagctccttccggtgaagattcatccaccggtggtgctggcggagaagctgcggttggagaaggtgcttccacaggagacggtgacttagccggggtcggtgtcggtgcactcactggctccggtgccggcgccggcgatgaagattttccgaaaagctcagcgggaaggagcacattatccacagtgaatataacaacaggtgtctcatcgaccaccgtgtcggcgagtctcgacggaccaacgccggtatggagaataacctcgtcaccggaagttgacgtcgttaaatcgtatttaccggcgccgttagtggctaaagtggagatagcgtctttgttagtctttaacgatcctttgggtttgtattcagcgagggcgtgatactctaggagcgagaccacctcagcttgtgtgagattcgtcagatctggtacacctctagctttaaaagcttcatcggacggtgcaaaaaccgtcaagcctttttcaacggtggattcgaatgttttaataacaccgctcgatacgagcaaattcgcgaaggttttgcaaccggctttctcgagaagtccggtgatgttgctaactccggcggaagaaggagcaggtgcggttaagattccgggagcgatgatcggagcgttgatttcgagaacggagatgttgtaagggatttgtttaacggatttggtgtaagaggaatcgagcttggagccaggagcggcggagccaaagccgactttgcctcctttgagatcggtgacgttaacgaatcctaggttcccgagagcgtgtccggtggtttggtaaagcgtggtggtgagagttgtgcctttagagagctgatggagttttaaaggatcgtagtagtcgaggaggacgaggaggctgagagcatttttgacgacggagagtgggtgttttccggcgagggaagacattgcgccattgttgagaacaaggacggtgattgtagtgcggctgttgatttcgtcggcgagttttgtttgagaaaggtagttgttgaatgaggaatattccggcgtatcagagaggatttgagtaatgttatggccggagacggtagaagctacggtgaggagagataatgtgaaagcgaagagagtgaaagctcgtgatgtcgccattggaatttggaaggttgagttgaactgtggagaagagaaagtgagaagacaaagagagtgatgaagttaataagaagaagaagaggttaaatgttaaccatggttatattgaagagttaactatggttaatttgagaacacgtgctgcttccttttgctaaaaagcctgtaatcacgaaaatgggtgggctttgagcttctttctttatggttcgtcctcttccaaaagcaaccgaaccgaaccgttatatcattatcaatttatcatccttgttagagttaaccatggtcaagtagctaactaaaatttgagcttatttatggatgctcattagataatcatccaaaattttgtaaaaggcactcagataaaaaggatttagatatttttacttgacaactagtaatatcgttagtacttagtagactcataaataagtgtcgttatcagttttaaatacttggtcaatagttggtaacatcttttagaaatggaaagaaggttctaattgcccgacacagcactgataaagaaattattattttttataaaaacgacaaatcaaaatacgtagtttactactgtcatgtaaaaatctgcaaaagttttatcatttgattagaaaaaaataaaataaaccttcacaaatcagtaaactattactccgtattaattaatgggcggagatgaggctttaattccttactttgagcccaattatgaggctaataacaatgtgtgagcacgtgtcactcttcagcttcacatgattatgtattgggcctgtaataagcccaaacttcgtaagctggtcaaaaacaacgacgaagagaaaaagctccgccgcagaatctgagatcggatctttagagagagagagaaagatgcagagggacgtgtcgagctgcaacacttacaactatg

SEQ ID NO: 28481 - DNA, 3000 bp, Unknown
  misc_feature (1)..( 3000): 2750-1469P.txt file - cDNA_ID_2997033; gDNA_ID_2926274; Annot_ID_143493
tcagacactaatacattatactgcttttaattctcaaacctaaagaaaacagagacaaacttacagaagaaggagagaaaaacagagaaatgatacattaaaaagatttgagaatggatgtgtatatatatatatatatatatatataattatgttgttaatttatatatggatatataggataacaatatatcaagaaatgatttgatatgattttatcttccttataatttaagatacaacaagttgtggttttgttcttggtatttgattctctggaaactggtaagaaacttggtgttttatgtcagtgacagtgctttgtgatcttgtacgatgataacgaaaatccaaatattaatttttaatttcccatttgtttggcttttctaatcgtgcgtataatgaagatgcaaatttataatcatatttaattttcaaaatggatcacaaatctgtatcagaatctcagttacgaagtccccatgattctctaaaatttaagatatattatcatttttagtatttgaatttttaaactatgggcttgttcgatgtgtatattattatttgtcaattttaattatcgtgaaaacctcaaattttaatacgaaatctttgaccgatatgatagctgcatagttgcatgggccagccttgtaacgcgttataagtagctgcgagtcgcatttctttagttcaatttgttttctttcctgaaatataattcggactgtagaactttgataagccttattattatctgagcccatttatcgtttctcattaatgggcctctaatggaagagttggacccatcttatccgtagttatttaccatggaataaaaaatgaaactgtaagtaatcaataattaaataaatataagaaaatttggaattttacatcaccggaaagtaaatattttaccttttaatggctggtcctaaatgccaatcctgatatgacagaggaagattcgagtaaaaattgaatgtggaaataaatactaactgtagaaaacaaacaaagggtaaattcttcatatagatggaaagcgaagaacagtaaatgtgaattcgctacggtccggctcacactgcccaaaaaattcctcgaaagctcttaaaaacagtagtaaatttgaccctatatttttagaatacattaaaaagtaaaaaaggcctctttgttaaattgcaaatagaaacaaatagtaaattccaaaatttccatgaagggttgttttccttccatggggaaaagagttatttttcattgtttatttcataataaataacttttactgtcaaaaggaatataaaattttaaaacataggtatgggagagagaccgaagtctgataaaatgtcttgactcggaccaaatctcaaacgagaaagacaacaattaaaaaaattccaagagcatgcttaacggattataatatttttttcaacatcatttgttctattatctgttttttttaatgttttattttatggcaataagtgtttgacacttagttattcaaccgcatttcaatctgtaggaaaagtttacataatgtatgattccttgcacaaacagaagatccaaaatttacatctgtagctcctccaagtcaaccaaaatccttaggtttgtgatccaatttcaaaaccccataatttttcaagaaaatttgtaaacccataattaataagtttgatgcattgactactgaccaggacattgtacataaatgaacaataacattatggttgcaattattaatgatctctaagcaccacaaaatattttttccaggacaccatcatcattcctcaccaacttactttaatgttcttacttcaaaaaacaaaatagagaatcaaaataaaaaaatgaaaaaccaaaactatggtgaccactttaaccactgtctctttctgcataattttttacccaaaataccaattctctgcatgagaataacagaaccaaccacattccacattatttccattttatgtgaaagattattttctaattagttgaatcataccaagaggccacagagcagcatgtaaacccattaaagaaagtttctattatttgggaaggataatttagtcatattcaaatttatagtttctttctttatgagttggccaatcatttattcattttcccacttactataccaacacaaaataaaaataaaagccacgtgtcagccaagtcggattcgtcaaacccaacaaaataaatacacgtgtcaattaaagagttttaatgagtccacccaccttcctcgggccccacactctcttctttccagcccgttgataaaggcagcttttaattactctctctgctctctttttttttctttattggcttttttctcttcttcccaaattcactcttcttttaaagctacaaaacctaacaaagttgaagaagaagaagaagctcgtgctctctcactttcttttcctacggtgttttttttccccctgagctgcaacattcttcgtcggaaatcttcccggagaaaattcttactaggtgagaattcctcatttccagatcgtaactgtccaatgactcctttacttaaaaaaactcaagttattttgctcaacatttacttcagccattcacttgaaggttgaatatttcttcaatttctatgaatttcaagtaaactgtagctacttctattcatataactagcctttgttttaccggatttttcttcattgttttttgctttgttttgcttcctccgttggccgaaatgtagccgttgagatagatttttgttcttttcttctactaaatctaacgcctaagaatacgaacaaacaaagtttttgttttgagatgtactgtttttttttttctcttgtgttcaccaattttcttctttctaatttcagctctacataactgaaaatggaggtcttccgcaactaaaatctgttcaacggagaagagggttgtggaaagatg

SEQ ID NO: 28482 - DNA, 3000 bp, Unknown
  misc_feature (1)..( 3000): 2750-1469P.txt file - cDNA_ID_2997044; gDNA_ID_2926274; Annot_ID_143496
tagattcaagtccacaaccaataaaatttaaaacatttagcgagaagttatcatgtgaggtgagacacataaatatggaacggtgttggatgacaatttcttgattattttattttaaataaagttattaccttactgttggccattttgtagaaaattcaaaactattttaaaaataattgttggatatattttttttttttatcagaaactaaaatacaaaccattcaacaaaaactacagccattcgtatttggatacatgaatccgttcacaattatatttcatgaatcatgataggtctgtgtgatagagatatatgcgttgttctttctctatgtattatggctaactttaaataattaaatcgagatttagtcatagtttggcaatgcaatcacggataaagttcaaaagtttacaaatggaatttgaaaatcacatttttgtcccaaaatatgtatattctatatttatttatttaaaagatttattatagtaaataaataatgcaaaatggatatacttttaaaaagtagagatagagttagcaattcgttaatggaggaactcaattaactatatttaaaaagacagctaagcttcagatttgataaaacaaaagcttgattatagtatatttttaattattctttttattgtttattcccttgtcaactcctcttccccattgacagtttctcacatcatccctacatagaaactgtatataacagaaattaattattcctgtgactctaataaccaattgttatcatatggttattggatcctttctattggtcggctacgtgagaaacaatggattagcagtaaaaagactaacaaatacaaaaaaaatgccggcctaataaatgtgattacaatatacacaactattcttagtagaatatactaacttactacgctacagaaccaactggtttatcatagtatctcgcatattaacttaggctagagagccaacctttttgaattaatgaaaaagttgagacacaaccactaaactttacggcattaataacggatctcatttatgaacctgcgtacaaatttggtctgaagttaagtggtactatcccggaaataacttaaatcttatcctaaactatattctttccattttatagtacgagatgttttggaaaaaaaaacaaatagtttcataataaagtaatattttcaagttcttatgcaatattttatgattagttattagttatattatgcattttctttatgtttggttgaactttttaaaaatatgtaatttttaatatacgtgtttttagttaaacatcttatattttaaaacggattaagtatctttttagtcataatttatctttatacacaaaaaagtaatactttgtcgattcttaacccatgcaattgtttatgtgttctgaaattgattgatatgatcctagctcaactggcgttaatagacttcgtatgaagggaaaaaatttcaaaatcattaatttaaaagttcgacgtgaaaaaatgtaataatttaacattctcttataatgcttccgtaagataaatttatggactattatccgactttttgataatgggtatgcaaaaacttgtcatatctaaaaaaaatatcaccaatgttaatttatacttgggcataaatgtatcattaaaaaaaccttggtggcttggtgcatatagaagagagtgaggctgtgagggagcactatagaccaactagacatctctaagcgaggagaacccatccgcatcgcatgtatgcattgagatagctagggcctaggggccattgagtcgatcgaccacatacacctctttaaataatcttctaatattaaagttttaaatcaatgccccgcccaactctaccttttccacgaaaacggaataaagtgtttccgggtgaaagaaaatacttttcaacgatagattgtgttgctatttttatagaatatgttaaatttaagtataatataagataggttcctataaaaaaattgggtagaaaagtttagctttgatactccatatagtttatatattagtgcagcgaggtgatacgtttactagtctaacttaacaaaaaaaaaagagttaattagtttatatattgattctttcaacgtaatcaatctgatttagataatccgtcccaactcccaattatatctgtcattcaagtatttgattacaagggcaattcatttcggactagttgattgtaaatttcgtgtctcgttatctatttgaaatagtaggtctatttagggggtatacatctggattgatagctgataaggactatatacatgtctttttgaatttttgatatataaactactattcaaaattatcttcatagaaaaacggatcatatcatttggatatcaaatttaactcgagatttcaaataaataattcactattccaactgatcttactacatcagtaaaaaaaaattggtagtacaatctcgaggaacaaaaaagtttacaaatgaaatttagaatcttgtttaatctttaaatggatagtttttcataactcttttaattagtctagtttttgatacaaattttatccggttatagaaaacattaaaggaccctaagtttggatttcagcaaaattatatatattccattctcacttagggatgaaatgacatcattcatcactacgtcatttgagcttacgtcaagctcaccataagcaaaagaaatgggtggataagttcaagttccatctcatttcctcacacatctctctttcttccttctcatttcctcgcatcttcctctaaaaaaaaaaatcaaagaaaccaacaaaataaaaagtgcccatcattacaaatcttatttccaccttatatttacacacacttctcttctttcctttaatcatacaaaccacaccaagaggaaagaaaaataagataccactcaccaaaaacttcctcaaaactaacaaatg

SEQ ID NO: 28483 - DNA, 3000 bp, Unknown; identical to SEQ ID NO: 28482
  misc_feature (1)..( 3000): 2750-1469P.txt file - cDNA_ID_2997044; gDNA_ID_2926274; Annot_ID_205243

SEQ ID NO: 28484 - DNA, 3000 bp, Unknown
  misc_feature (1)..( 3000): 2750-1469P.txt file - cDNA_ID_2997047; gDNA_ID_2926274; Annot_ID_143497
tcttcatttgcttctttgactctgtttttgttctatgttactgtgagagatatcgccgtatgaacctatcagtgttcccatttctatatcacgatgtatgcgagttttgtgtatttctgatgttcatgtctgtttttgctcagtatgatatgaaactactggcggtggatattccgatggcgtctggtcctgatcaacgcttattccttattggtgatgaagaagagtacagagtcggtggtggtttgatctctgagttaagagatcctgtggtaaaagcaatggcagcaaccaaagagtttgataatcttgacagaattgaagaggaagaagacgccgaaagagaacttcaagaagccgaaaggaaggaacgtgaagagattgaacttcaagaagccgaaaggaaggaacgtgaagaattcgaacttcaagaagcagaaagaaagcagcgtgaagaaatcgagaagcttgaaaaatagagttcttagtcggttctatcgtacttgcacacaaactaaacatcttcagtggatatagaacaccacagtgaatctgtttaaagacccttacaaacttttgcagaataaatgttagagtatgttactgtttctggtttgtgattcttcagagaaggatggctttgtcctatataaaccggttttgacttgagggaggaaaaagtttttgtctttgcggttagtaccggtttaatcatgatggaaagaaaaccaatacagaatccagagtaaaagctgtatgagacttgcatatctatgttgtctttgaccaatttctatattacaaaattagcaatcagttattatggttcatcaaaaccacctgcatcgtgaagaagatatagttttccatcgaagaaccaaacataagccctcaatgctttttatcgaatgttcttgtgtttctttttgaatcttgcacagaaaattgtgatcttcgaatctgttgcctttagggtgaaactattctgaatgcaaaagcacaaatcatctgaagttgtaaggatttaaaggttaatcctctcccaaatcccttgttttttcatacctagattccatcaaggtcacaaatttacctcatttgaattccctctctttttcataattgttgtaacattaaagagataatggttttgattttcgtttgatttgatgaagttttaattcaggagtgaatcttgagccaatgagaggcaaatctggattagactgtgtaaagagttgatgggaaatcgttgtgcaagaacttcttgttgtagaaaggtaatcaataaaacttcttgtagcatgcaattcaatgtttcattagccatagtttcaaagggaagatgaagaatctgtgtccatatatgtgtgttacagttatggtcatgtatatgctgctgcagcaacaacaacaacaacagttatggtcaaacccgaagccaacacgggtccaaaggaaaggtccatccggtaagcagaatcgagaaatgggaagaaaagatcacagaagctaacaaccatggcaagatcgtaagctttcttctttaaataaatttcgcttttctatgattcttcctattttccatttaagtaactactagcttgataaattcaatcaaaacagctggtggtgaatttcagcgcgccatggtgtgtaccttgtaaaaagatagaaccagtattcagggaccttgcttctagatacccttcaatgatatttgtaacggttgatgtcgaagagctcgctgtaagtaaactgaaaacttgcgtgttgttgagaagatagataagactgcagttttatgatatgagattgaattggtgaaaaaacaaaacgcaggagtttagtaatgaatggaatgtggaagctacaccaactgtagtgttccttaaagatgggagacaaatggataaacttgttggtgctgaaacctcagagcttcagaagaagacagctgcagctgctgatctctttctcagaaaaccttaaactctaaaacacataacagaacagagttaggtttttccattgtctgtcaaaaccagaagttacttgcggataaagtaagtatcatgagctctttctttgaataaagatctgatctggtaagactgatgactctctttaacgttttgttctcagacaaaatcttgtcttttggctgacaaaaacacaaaacatgaagatgaagatgaagaggagtttagtgatgatgaaggtttatttgcagtcatggctctcttctttagagctcatttgtgcagatgcatcttttcaaatggttctgatattttcaacactaaacgaagtgcttcttgtgcatatttgttttattaatccttttacattttaatgttattttctatattactgtgtgttcttcaatttgaaaacctgaacaaacctgtcaaacacggtatagaagaaagtttaacgtatttttcaaactcgaaagggttttggtcaataaccatatgctttatgttggcaaattagtaagatgcacgttgatttctttctttttaaaaaattatgattaaatcatgatgatgagtgatttgttctttcttcgaataaaacagatacaaacaaattaaaaacagaaaataaaaaaaaaaagcaaatttgatctagaaattataataaagggatgtttcttggcgatctccaaagttgacttttcaaaatccaaatcgttaatactagaggaactggacctcaacttccaaatccaatggtgactactcaatgcaactctcagatcttaattttcttgaaaagaaataaattgaaagaagcaaaataatagtcaataaacaagtctgttaaaaccttcatcaccttgaccattattcattatagtgcctgatctgattcatataataatatatctcctcctcctacttgcttgcttgaaagatcatcaacaaagttttattcccagaaagaaaaaagaaaaagatcattcatcagagttaagtcaatcaccaaaccatg

SEQ ID NO: 28485 - DNA, 3003 bp, Unknown
  misc_feature (1)..( 3003): 2750-1469P.txt file - cDNA_ID_2997058; gDNA_ID_2926274; Annot_ID_143501
tctgattagaattttcaacacgatggacggaactcgtctgcaagaggtctgatatgtgataactatgaactaactagctttcattttcttaacaccattattgtaccatatgttatttaagtaaatattttggtaaggattctgtcaaggtaatggttgagcaaacaagctgtcacgatttatttagaaagactttggtagctattaataacaataatggaatcttatgcagaacatatgtcagttttgtttgcatattattgatgaattagtccaatgctgctttgttacaggtccgaagaggcgtggacagagcagatatctatagcattgctctatcaccaaacgtgcagtggcttgcagtatcaagcgacaaggggactgttcacattttctctctcagagtgagagttataggggaggacgcatactccactgaacatgagacttcttcaaattccctgcagcctcttgtttctccagccagtggtgccaaccctggttcgtcattgtcttttctgagaggtaagacagaaattaggagatatctgaaaaaatgactgttaccgtgaaagtacatatgatatgccttgtttctctttaagaactgcttatggagtgaaaggacagaaggctagattatattgagtgagtacataagtgaaacttccaagaaatagctttcttggttcatgagaaaatcagtgatctttatagaagtgtgtccctaaaccttgtgaaattttatgtgtcactaggaaagttattgtttttttttttttccatttcatagcttttctctaaaccagcaaatcgagaagtatatttcaaatatataattgtgcagttggatcatctcatgcttctgtctggtacctaacatcttcagacattgttgcaggtgttctaccaaaatatttcagctcggaatggtcattttctcagttccatgtacctgaagtcacccaatactttgcagcatttggtgctcagaacacaattgcaattattggcttggacggaaggtagctaatctctctgaatgtatattcacatcatccacaagtattatatgcttccatcacactagtcagaatagcaaaaacataaaataaccaacaaccacacatatgatttatcggccttacagtttctacaggtgcaatttcgatccagtgaacggaggagagatgactcagcttgaacatttccattttctgaagcaagatagcccgagatagtcagaccacgtgcttggtttgagttttatgtacataacaattggctctgtatatagatttggtgaaaccgcatacgattttattcttccaagctttacttgattgaaggaaaatgtattcttgattggaacaatgtatatacaaaaaggatttttttttggttataacactaatttctacagagaatcaaactgcaattcgattacgtttattaaaatttcaaatcagaatgttgattataggacagatataacaaatgcaagatggttcagcttacatggtcatttcaaggttacagaaccggatttctccatttaatttaaagacttatacatttaattattaatatttagtaactttaattttatagagacaatatagaaaattatgcaatggagatgctttaaaagtattaggtgccagagttaaaaaaaaaaaaaaagtattaggtgccttgtcgtcaccagattccattggattttacgactttttgttaaactcacaagtcgctagcttgtggtttaagcaatctttttttttttatataaaatttacatatattaaaaattttatgtggtttttttttacataatagttaatgatgcattaaatttaagcaattttaatgatgcattgattttattaattccccttgctcaaaatactttctatggtgtgattaacacaaattatattattattcttttagaaatttttgcttgtaaatgctagttttgattgcattattattcttttttcttttacgtcatttacgagaattttcaattttgttttatcaaaaatttctaattgaatatttgatgttgcacataaactgaccgtgatacatgtgcttgttctgtatatagatttgttgaaataacactagagtatgctaccaatgttacggatcacggtctccaagcaattggtaaaggatgcaaagaattaaaacatcttgaaatactaaactgtcctgttagtaaaacaggtcttatagaagcaggcgagagctcttcttccattagatatctttacgcatcaggtaataaagatggaaaggaaggaggagtgcaatcttttgcacaaaataatgataatatattttcttttcatttgttgttaagattctccgagatcttctcgagatcttttttggaaatacgataagataggctgaataattcttattctgaaattttttggtaatgcgaaacctttgttttatatgttcaagaagaaaagaaatattaagaattttttttttgttcagtcacacaactttagaacaaaattatgttaataattttcttcattttaaatccaaaacttcaaaagttagaaaacatatgaagtaaaataaaataaaatgtgctaagctataaattgattttagtttacataacaaattctaattgaaacttatttttttatatcgtcaaaaaacaacaactaaattctgaaaaaatatcaaaaactccaatttggaaagtataaattacaaactaacttgttttattttatgttttaatataatagtttagttggtttaataatagtaagtgttattttattattttttaaaagggaagggtttaaaaacccaccaaaaaatcccttaaatggatgcttaaaaatctctggtcgcgggcttagccccagtagactagttagatcactgtgtggtctgggcattgagttatcaaagaaaaaaagggaagggtttaaaaacccaccaaaaaagttgagggttttgtacatg

SEQ ID NO: 28486 - DNA, 3000 bp, Unknown
  misc_feature (1)..( 3000): 2750-1469P.txt file - cDNA_ID_2997062; gDNA_ID_2926274; Annot_ID_143502
gtttgtttgcttcatcatttggtttttagtaaatgaattttagcttgagcagttcatattcttgctcttaggtgccatccaatcgatgtatgctccagaaccatttgatgttgggaggatattacaggcagacattctttcaaatggtcaaaagttcacagttacaaccgatgatccagttgatcctggttggtattacggaaactttagacgatacaaagatttttaagtggactataagtgaatgtttggcttactgaaatgcagattctggcttgccatcccgcgtagagtcgctgatgcgaaagtctaacagtgaattcagtgtatgttacaacgttcttcaagattttcagaacttattcttgttttcttggaaatgtttgcattgagttcatgttctcaaactcttcttcaggtggttatatcgcagatgaatggacaagactatgcatctcgatcgcacgtttttaccgttggaaagacgaggataaagctgtctcgaggatggatcacaaaggcgagagaattatattcgacatccatgcaggtatctagagactctttcttcattctatttaacagaaacatctctttgacattcaatgaaaaacatttattacaagttttttggtatgataattattcagctctgtggagttagaggcaatattaaggctcctaccaaggcagtgttctggcaaccaagaaagagtctaactttcatactaacctttgagtcagaacacgaacgtaacgcagccatagcccttgctcgaaaatacgctttcgattgcagtgtaagcaaaagtagtcaaaatgtcgcctttctcagactctgcaaatcactatggttttgcactttatacagttttaagactgcaggtttacataacaggcttgcttaaatctgcaggttacactgcttggtccagatgattaagtgaagaagacaatgtcattaacgaaccacctgatattttttcccctgacgccggattttcttgttctgtgtgtttgtgtgcggctactttttgtttatttttcgcactggttcaaagaaggaaggtgcaagtttgggttctctactgatgatcatacaatgttgctgcgtagagttttattataggcagcagacttctttttttttcttttcttttgcttgatcatttgtttggtttggtttgtttgattgttttatttttttattcaacattgttaatcagcttatgagtgtgagatcaaaacccaaagcggtttctggtttgtatctgttaccattgtttcatcattttacctgcttctgagaatttccctcttttattatcagtaaatgagtaatctgtatataaaatagattgtacatgtgtttgaataattatgaacaagaattctctaactattactagatacgatgatcaaacaaagggagatcaatgaggttgagtggtggcatgatccagatattctcataagggttctgttttttccacttgaagcaaacctcactctcttcatcaaccttataatatatgcaagtcctcttgaatccatggaacacagagagacacaaacagttccatattccactctgcttctgctgctcggctctggattcagaagacaaagcgcttgcgtagatcgtcaagcctcccagtgttttcctctcagcccattcaaagctagtaaggtcaagtttaagcactgttgggttcatgtgtctgtacatataaatgagaaagatctctccttggtgttctgtcataaagcatccgttgcttccaggacgtttaggaggtctcccaggaagaacattccaataattcaaagatgggtcaaagagagctaagcatccggtgtttgtgaggcagtagaagacaccattggagaagacaatctgctcgaaagtgttgaagtttcgctgtaaccgattcttgaacacagatgttttccactctttagcattagcaaaatatgtcttgatggtgatgtaattccaagtgacagaagtgacagtgaacaagagacaactagttgatgtaggagcacaagagaaagccattctttgatcatatgccatccaaagcgtaggcatgggtacgcaatcacgagtaaagggattgaagaaaaggagttgataagaattgggattgtacatgagtaaccaaccatctttggagtaacaaactcgaaaaccggataactcagggaagtgaagattgcagtttttctgcattgatgggtcataaagttcataggaatcgtctgttttggagaagtaaataagccaaggagatgtatgtatcactcgaagagaaacacaagcttcgtgccatgttttgcagacagcagaagcacggatgttatctttcaacgggagacgagaaattaccagttgtaagagatcacaaggaaggtttatgaaagtttgatacttttctttttccttgctactctgtttcttccttttcgtcttcttcttcttcttcgacctgtaaaagtaaaacccaaagtctcaaaatctcaaagctacaaatcatatttttaagccgaatttgaaatttttgaaaactcaagatccaagctttgaccttcttctggtaaccatggtgaagaatgggagattaaggattaggttttggggtccgacgaagtcgtaacgggaaagaagcacaagatatcggagaagagtctcctggccgttagattaggacgacgacgactgatccaacggtgatctgtgatcgttctcttggtctcttcgccgttgaattttcagattagtcataagcaaatcatccaaagaggaccggttcggttttatacggtcttaaagttattaaattatactattaattacgatgatctaaacggcgtcgtatcaaatccatctcatatgcttacgataacgtcccattgccaagctggttctttcactcttcaggagaaagagagagagagagagagagagagagagagttatcagagatagcaaaaatg

SEQ ID NO: 28487 - DNA, 3000 bp, Unknown; identical to SEQ ID NO: 28486
  misc_feature (1)..( 3000): 2750-1469P.txt file - cDNA_ID_2997062; gDNA_ID_2926274; Annot_ID_205250

SEQ ID NO: 28488 - DNA, 3003 bp, Unknown
  misc_feature (1)..( 3003): 2750-1469P.txt file - cDNA_ID_2997065; gDNA_ID_2926132; Annot_ID_196971
atcatccaaaagtcgcgtcggaaaaaagtgccgtgtctatgtttgtttttcttttgttatttgttggtttttttttggtgtggtttctatagacttttcttttaaaaaagattacagtccaataagaaattgaaatagtaattgggctaacgtgggttagccagagttacagaaagagagaattttcggtgaagctaatcggagtataaaaggaaaaactgtcaagcttttatgcaattttctttcatcgacctattgagttgccggtgattgcaataacaacgaaatttcagagttgtgcttaggactgcctagtcctgaaattttggaaaccaaagttacaaaaaacgtttttgaggttatttcctaagatttagaaaacatgggttctttatattataaaattaaataatttgggcctattttatactgtaaaattttaaaaacaaatcagaggcccaaagtcaatgtttcacgaggctctgtttaggaccggccatgtccgttttgttgatggatactaaattactaatgacctaacgggtttatttagaccgaaatagttttattagctaaaaccagttttcaaatggtttgtgaattgcagcatgcaatgtgtgagcatgatttcccaattgttctatcagtgtcaaagtgatatgggccaatccgaacgttttatccaaatggatcaaaagttttgattttataagattgatgagttaaattagaaattttgaatcataatggactaattatcaagaaaatgacactggtaatacatttcttaacacataatttttcctatttttataaacggaatctgaccataagtataaagattgatagaagttttttataaactattgtgtatatcacatttgtttaggaaatatgttagtaagaccttggtccaattggttcacctgatagtcaaaaatgtgtggtggtccttcaggaagaagtccaatctgaaacattttgggccgtttctagaagaactgattggatcagctgatagaattttattaaacaaaaaaagactatttgtatattgatttcatttttagttcccgagaagagtagaacaaatgctaaaatgtatcatgcggcccaataaccaacaaaactagttgaaagatggatcaatggtttttacatgaagaaagcccaaaccatacactaataatctaatattctattaaaaggacttgctgttattcggcccaatagccaacaaaactaattgaaagatggatcaggggctatggaatacctcagaataaaaagtgttattcattgcagaggaccccttaagcggacatggttgggtccttgttcgacaagacttagtcctccatcttggcctcaagagtgctcgacgaagtttatcaccgcttcatgcggaattttattccttgctatgggcaatagaatgcatgatctctattagcgatacttctggcgcttttgcttccgactgttcagacctgatttctatcattaacaatcaagaagattggccgacattcgcagcggaattgacatcctatcgctccttagtttatttttctccttcttttcgtattagatttcttcctcgtagttctaatactcgagcagattgtttagctaagaaaactcgggctcgtaatagccttttctcccatgtaagcacatcggttcctgaatgattctttctagcggagagtctctttccgataacttaatataaatggtgtttgatgaaaaaaacaaattatcgtaatgatcctaaaaaggagttagaaaatattaatatcttatctacatctagatgataattgtttttatgatccttattagatagtgtttaaatttaattatccactaatttaagcataaactatatattctatcaccgtttaaccaatccatataaatctcttttaaagcttctagaaatgagtctcacacatcagaaattagctattttcttattttattacaagaagagaaaaaaacaaacaaacaaacatgtgttactctcattttgccacatgcattataacgtataggtaggtgaatcacctaacttgtttcagcttatgtaattaactttaccaatatattaatttattgttgataagtatattttaaattaagatatgggaccagaaaaataacaaaagtttctattaaaaaatgcttgcatttaaaagagaagaatgtataaaatctttatcaaaaaaaagagtatatcatagattcataataataaaaaaaatttgataaatgactttttatttaaaaacttaagatattacaagctattactctctttgtttatttttaattgattttctaacaaaacacacatattaagaaaacatattaaaactgattataaatgtatcgatttttgtgatttatatttttctataattctaaatcaatgatatttaattatttgtgttgaactttaaaatttatcattaataactaataattagtgcatagaaaatctaaaaatcaatctttttgaaacaattttttttctaaaaaatcaattaaaaagaacagagagaatattgttttaataataaatgttttattggtaatccaatattaaaataattatatggattaaatttaattataaattttaaaaaatttgaacaaaaaattatttagtgaattgattccaacatgtggaaaaaaggaaacagataattaaaaaaattgattggttctgccaaaattgactaccttcaaatcagagatgattttaaaaataaattcatccaattaaacttgccacatcatcaacttggaccagaatattcgcagtcaccaaaaacaaaccaatgtgtccaggttcaatgaatctggaatcacctggttcttcgtatttttgttatataatgccacgcttctcacaaatcatcttgaattgaaaataaaaaacgaagaatcaaaacaaatcttagagaaaacaaaaatccaatttttgctgtgaagatg

SEQ ID NO: 28489 - DNA, 3003 bp, Unknown; identical to SEQ ID NO: 28488
  misc_feature (1)..( 3003): 2750-1469P.txt file - cDNA_ID_2997065; gDNA_ID_2926132; Annot_ID_138775

SEQ ID NO: 28490 - DNA, 3003 bp, Unknown; identical to SEQ ID NO: 28488
  misc_feature (1)..( 3003): 2750-1469P.txt file - cDNA_ID_2997065; gDNA_ID_1620846; Annot_ID_50937

SEQ ID NO: 28491 - DNA, 3003 bp, Unknown; identical to SEQ ID NO: 28488
  misc_feature (1)..( 3003): 2750-1469P.txt file - cDNA_ID_2997065; gDNA_ID_1620846; Annot_ID_170220

SEQ ID NO: 28492 - DNA, 3003 bp, Unknown; identical to SEQ ID NO: 24393
  misc_feature (1)..( 3003): 2750-1469P.txt file - cDNA_ID_2997079; gDNA_ID_2926132; Annot_ID_138789

SEQ ID NO: 28493 - DNA, 3000 bp, Unknown; identical to SEQ ID NO: 8151
  misc_feature (1)..( 3000): 2750-1469P.txt file - cDNA_ID_2997082; gDNA_ID_2926132; Annot_ID_138793

SEQ ID NO: 28494 - DNA, 3003 bp, Unknown; identical to SEQ ID NO: 17642
  misc_feature (1)..( 3003): 2750-1469P.txt file - cDNA_ID_2997086; gDNA_ID_2926132; Annot_ID_138799

SEQ ID NO: 28495 - DNA, 3003 bp, Unknown; identical to SEQ ID NO: 17540
  misc_feature (1)..( 3003): 2750-1469P.txt file - cDNA_ID_2997096; gDNA_ID_2926133; Annot_ID_138806

SEQ ID NO: 28496 - DNA, 3000 bp, Unknown; identical to SEQ ID NO: 15417
  misc_feature (1)..( 3000): 2750-1469P.txt file - cDNA_ID_2997100; gDNA_ID_2926133; Annot_ID_138825

SEQ ID NO: 28497 - DNA, 3003 bp, Unknown
  misc_feature (1)..( 3003): 2750-1469P.txt file - cDNA_ID_2997104; gDNA_ID_2926133; Annot_ID_138830
ttggccatgagattttggaattttgcgggaaagtattcattcaatttataaaaagaaaatattttgattggggaataataatgatgattgttgcgttggaatatttggataaggtaaaagcaacataagcgtgaagtaccagctaccaaacgaagatcttgacgcgttgatttccgtatcaacggacgaagatgtagagaacatgatggacgaatacgaccgcgtcgcacagaatcaaaacccacgcgcctctcgtcttcgtctttttctcttcaccaaaaacgtcgccggagaagaagataacgatagtcgagctagcagtatcagctctctcctcgatagctctgttaatcgggagcaatggttcctcgacgctcttaacctcggttcttccgccgccgcaaccgcggtatctaacggtgggtccggtagagtctttgagcgagttagatctgaagtctcgtcgattgtttctgaagttcctgattatctctttggattggataatttcgatgaaactgctccgccgcatgagcttcgtgatcgtgatccgagagctaagatccaacgagaagtctcgacgctttcggatcctggttcgcctcgtcgcgatgttccttcgccgtatggttcgacgtcttcggctcctgtgatgcgaatatctacaccggaacttccaccaccagtttttattaaaccggaaagtccagaaccggtttcgactccgaaatccaatcctcaaccggaacaagtaatgcaacagagtaatctcccggttaactcgcaatggcaatatgcccctggcccaggccaacaggttcattaccagggtcataccattcaccaatcaccggtttattacgttcctggttcggttccgggtaatcatatggtccagcaaggaaatcatatggttcaaccgggtaatcatatggtacaaccggttcaaatgccgggtcagtatcttcaacaataccatcatgtaccaatgggataccaccaacctcagactcatcagatggctggtccgggtcaagtatatggtggaacggttaggccggttatgatggcagttgatggaatgaaccggacgggttattatggaatgaaaacacccggtccggttcaaatgtatcagcatcacactggtatggttgttcctggtgtagaagaacaacaacaatacagaaccgaaacggattcggatacgggtcgggcttcttagctgtttgaagaagaaatatgaaaaattatcacatccggggttttcgtcttttcattggagtcgttcttattcgttactgtgtgaactgtgtattattttttgttttacttttgtaaaatttatttttgtgtgtaataattttgtattacaaaatataatgaacagtaaaacccaataataataacattataatctatcaatagtgaattacatttgctaaacttttttttgtcatcttattactcgatttatcataataatgttaatggaatataatttgtcaatcatatgttcctcttcgtctttgctggtgacttgtgaggaagtagatatgtcttagaaaccacaccgaattcaatctcatatgtttgttggtgatgtcttcatagttgtaacttttaatacaatctaacaaagcataaaatggaagggaggtaaggatattgtgttgcatcattcttctcacaatcacttcttctttaccaagattgtcgaagcatgcattataaccattataaccatgcatcttaaacacatcctcccctttttttccttttttgtcgatacctttttatgttcatttgaactttctctttatgttcatttgttctacaagtactattcttgtaaaacatgttatttgtttaattgtccctactcactagtcactacctattttactaaaatcacaatttctacttttagctaccatactattcataatcgtaacaactaacacacttacatgaccaaaaatagatttttgtaccatttaatcttaactattaatttgtaaacgatctcactactattgtaacgtttagtccgtccttactagtgtgctccacgttctttctcaggtctatggactcatccctgtccgacgatcggtccgccaaatctaagaggttttaaagacttgttaacgatcctacaaatcactatacgatatttcatcatgttttatcctcatttacatggttctgataatcatttctcggaaggtcacctatcttaaaactacttcgactcaaacacgtttaactgtggagttctccgcataaattaattattttattctctataaaagttatagaaatggtctcgtcattgtactgattgacatcatcaactggagagacatcaactttgggagctgccaatctcagaagaagtttatctcctttacatgccgaggtggaagctctcctctgggcgatgaagtgtatgattggtgccgacaaccaagatgtagtttttcttacagactgttcagatctggtggagatggtgtcttccccaaccgaatggccggctttctcatcgtatttggaggagttacagagcgacaaggatgagttcacaaacttttttctatctttaatctctcgtagtactaatgttaaagcggattttttggcacgaaaagttcgtacccaaccgcttcatattacatctgtaaacaacattcctcaggattggctcgtttgagtcctaattaattttcggatgacaaaaaaaaaaggtctcgtcattgttaattattattctaattgactattcccattaaagcaatcatagagttacttaagtttgacattcataaatttatgcgactatgattaattattgactaagaaaaaattaaatactaatagtactaacattaaagacaaatgtaacgttttacgtgaagtaatcagaaaccagaaatagtcttcttcttcttcctcacacacatacttctctcaccttatcctccgagatcggaaaatatg

SEQ ID NO: 28498 - DNA, 3000 bp, Unknown; identical to SEQ ID NO: 15454
  misc_feature (1)..( 3000): 2750-1469P.txt file - cDNA_ID_2997128; gDNA_ID_2926134; Annot_ID_138853

SEQ ID NO: 28499 - DNA, 3000 bp, Unknown
  misc_feature (1)..( 3000): 2750-1469P.txt file - cDNA_ID_2997177; gDNA_ID_2926139; Annot_ID_138943
aatcttggcctcaacatctatggtatgaccatcgacaggttcctcttgatctacatcacaaatattctgattctcttccaacctagtgacagttccctcaccactttcaaggccttaagaaaaacagatataacaacacaacggtaaatcaaccgatactcttcaataacatttgcagatctcctatatactattcaataacaaaggttaccttttgcttccgttggcgtctctatggagagtttctttctactattgttggcacttttcgattttctcttcctcgtttttttctcaactgcttcaccaatctgcagctcacttttctcctggacacgtacgaggtcaacggatagaaaaaagtcctcgttactgaggccttgaagagcttttttcaatatcatagaatcggacaagtgataatcattaccactcacgttaacctacaaaccaaaaacaagtactccttccttaagttgttgtcgttgttgattccaaaacaaaaacgtgttgttagagaaagtgttgttaccttcaaggcagaaacagtgatgttgccaacacttggaaaacacagttcgtgttctttgcagaatttgtctgtaaaataaacaaacaacaataaacatgagtttaagagtttagttactacaaaaagttaccaaactaaaaaaaaaaaaagggaagagattatgaagagtcacctttgaaagaagacacgctatcatgactgtcaaggagtagccccaaacgggtatcaatactagtcttcacaaagacacattgcgaaccggaatcagccatcagtaagattattgtaagagaaatgcaaaatagggttttgatgaagttgagaagaaaatgaaactccactctctctgtttgatatttataagcgagtttctttcgtagaggaatatgaaaagctttatgttttttttgggaaatcaaaaacgcttaattacttgggaaaacacaacgtgtaggtcgattctctcttttcatcgtcctttcgtcttctctcttttggtttatgactcattgaaagggtttgaccagatcataacttctttctctatgggccaaataagtgggcctcacgttatatgaagacagagattctctaaggaaaccaggaatactaggaattgttgaaaagcaaagctataaggcgaggaagttagctaagggcttttcacaggacaatgggttggagcagatggattttatcaagagagatgcaagtctatctcaagcaaagaaccataaattttcaaaagacaagtacctggtgtagaatcattgaagaaacagctccaagtaatgccggtgtagaatcattgatctaaagtgaagtgaagtttatggttttctcttcatgagctaaaatgaagttgcagggagaagctcgggatcaatgggtgcctcagacaagcaaagaaaacggtttagttttctggtttaagctcaagtgggaaattgagaaactgacaactacgtgtgttttgtagttacaagttacctgagcggttttttgcagtcgtatagacatcaagacagggttcgaaagattgttcttgttgagctgcattgctgcaaggtttaagaaattcaaaacagtgaggagatgttgaagataagtcacagatgtcttcaatgtttaaggtacaaagaaagtagacaaggcaaacaaagtcatacatagttctatttcatgtacttgaacaggttctaagatcaaacatcagagtgtattagagaattacctgggcctgtgaagaagttgctgatggagttagaaacaccaaatatttatttattaaaacactaagaaccatacatatatagatttctctatttccaaaaatagaattaaccatagtcaagatctttctcaatgtaaaagaaaaatactaatatttttgtttagagttcagactacgtacgtaatatttttcatatcgtatatgaatttttattcgagtttcttttttacctatttggatcgacaaagaattttggatcgagtttattggccgacaaaagacaattaagattatagttatttgttagtagtatttgattatgaaataccaacacatcttgaatgttttctttatgtcaaaataaataaataaatgcatgcattcttttttttttcccttgcccttaactatgtttaattttgctgtgatcaaatttataggattcgaaatcttgacatgaatgaatggtaggaaaaaaaaaaaagcactgtttaagagttaaaagctgacggtgtcaagtcgccgcagcgaatatttttttgtaaaagaatggtttacacttaaaacactcgaatctcaaatttatatattacctttccttttctctaatttctctacttggtactttttttattttaggaagacgtaatatttgttaccagaggcacacgcatgggtaaaagcggaaacaccagaacgcggatacacgtgtcattgatctaacggtgagttagccaatatcctttgacctctagtctcatcaccaatatgcctggaaaatgattcacaaccgtccacgtggcgatctatatatccacatttacttttataccctctttgcccgttttccttcgggcaacttcagtttttgtttccttgtatttattgacttttgaataaaagaattatttcttctttacaattttagaaaattggaaagctttatttattgtctgacccttttactattcttcgggcagctgttcttaaagacatcttccctcttcctcagacacagcttcttctactggagaagaggaggagaacacaaatccaattcacactggaaacgtaagaagaagcgatcaaagcttaaacttctctttgactcatcattgttgttctctctgttttatttttcttctcaatttcttgtttgaacttgtgaaaatcattgaattgcaattgtgtagtgttgggtcggatcctgagtgatatttcgagaccgatgatg

SEQ ID NO: 28500 - DNA, 3000 bp, Unknown
  misc_feature (1)..( 3000): 2750-1469P.txt file - cDNA_ID_2997185; gDNA_ID_2926139; Annot_ID_138946
tcagaggaagctggataaaaccgggcgcagtcctcatcgatgttgggattaatcctgttgaggtgagtggaattttctttttgacatatggtcatggcgtaattcagtgatataataagtttcaaatcaaccagtatgcaacattcatacatgtacataatatgaattgcaggatccaagtgctgcgcgtggatatcgattggttggagacatttgctacgaggaggctagcaaagttgcatcagccatcacacctgttcctggcggtgtaggaccaatgaccatagccatgcttctatccaacactttaacatcagctaagaggattcacaacttccagtgacgtcacttaaaaagaagattgctggccttttgggaaacaaacaaatcgtactctgttttttgaagccaatgatttactttggtctttaaagaaagttatcgttttgttctatgaaacaaaacatgtagtttttaagtcacataaattgtcttcaacattgtttgtctcttcttggtattttgagtcagaactagttttaacttatcccagctatgatatatcccagcctcacccatcggtctcttcgtcattatactttatttataactacctttcaacgaaggttaatttgaaacaagaaaacacagtcacttgttctacattacttttgttaaaccctaacttgagctcgaagccacgaccactgttctgttttcctagtaaaataatggcgtcgttgatgttaaccgattgctccttctccacgacctcgcgtctcatcgatttgaaccgcctcaacggtgctttcctgccccgctggtgcgtcagccaactcaagctttcccaccactgcgcccggacgtggccgcatgcgctcctcttataccactgtgcccggacgtggccacattctctccattcgctcctcttgtatagactaaaccttttcatccaattgcttacgtattttcagatatccaactcttaagattttacttttctgttcagctgatgaggcgatggtatttgatcaaacggctgtggaactaagtatcatgcaggagatcagagtcgaaacttcaagaatggagaaactaatcagtcctggtttagcagtaatcctttttggggacagagagttctctgaagaatataaagaaatttaaactctagcatctttgctccaaaaacaaactctatagagtttaaatttctttcttcttttttacaaaagagggattatagtattatacaccataaaccccgtaaaattaaaagaaggtattcagttaccaaaatcggatttagtagcatttagtttttttgaattttaaatgtacaccataaaccccgtaaaattagtcaaaacaattaatgtgatttatgataattgtaattaaataaaaaagatattactcgattagtaattactgattaactgaatcattgatctcattaaacaattaaagaaagattactcgattagttagcatttagttttaatttttttaatatactaaaaataccaatcggaaattcagttaccaaaattagatttattaacatttactttttgaattttagatgtacaccataaaccccgtaaaattggtcaaagatttatgatacttgtaattaaggaaagaaccaaatgcaatatatggtttcggtgcaaaaccttaaaactgaccaacttctcaattttttatttaaaaaccctaccaaatttctctctcgtttctctccgatggccaagaacaagactttggttactccatcaacggtgaagaagtcatctgacgtcgcatctacgtcaaagaaactgtcgggagtcgcatctccagcgaagaaaccgtcgggtgtcacatctccggtcaagaagccgttggaagccgtcgcatcaacttcatctgaggaggaggaggaagatgagccttccagcgattcagagtcgggatcggagagtgagtctgacactgaagctgagccgatgactcttgctgctgctgctccttcttcttcgaatgagaagagacaaagtgaaggaaaaccagaggaggaacgagccaagactgaaacagagacggggaagaagccactgttgtttcagagattgtggactgatgaagacgagatcgtctttcttcaaggaatgatcaaatttgctaaggatacaggtaagaatgtttccgaggacatgaatggctttttcgaaaaacttaaagattcgattagctttgaggtgaagactgatcagttcgttaacaaaatccggtctatgaagagaaagtatattgagaacaagaaaactactacagagcatgataagaagtgttacgaattggctgagataatttgggtaagtgatggtgatgctactgctcttgtgaagccaaagaagaagaagcttaaggttgatgaagaaagtgattggttcgagaggtcgtttgttgatggtgcgtttaaagaattgggtccgggggttgatgaagagacatggaagaagaattggagtttggtaccggtgaagaagaggaagaggatagaagaaaaggtgaagtccatgcaagctgatgagctcaaaacgacgtggcagaagattgacgttgtgcatgagatgagatctttgatggctaaatatgtttagtctttatctgtttagagatgcatttgcctatgtttttctttttggttttgtgttggaacctttatggctttctcgtttattcatatgttttatgttaaagatgtttttttggataacaaaaataggtggttttttgtttgcatcttagtcttcttcctttgttactacagacatgaaatcgttagataattatgatatgatataaactaataatgattctaggagataattcctaatggatttaagataagtacatatcttctatatctacctttacacacacgttaacttagaaacaatctactttgttttcttctgtttgcctagtaaacaaatggcgtcgatgatg

SEQ ID NO: 28501 - DNA, 3003 bp, Unknown
  misc_feature (1)..( 3003): 2750-1469P.txt file - cDNA_ID_2997201; gDNA_ID_2926139; Annot_ID_138951
acatctcaagtagtttctttattctctttggaagtttctgcatctgacggatcagaggttttgtgctggaggaaacatcttctgcgctagtgctgacaatatttggctgttgtggcagctgattgttccttcctactccgttggaatagattgccactctagaatgaatcagaaaacttgctattaaaaaaaaacagacaaaaaagtttatggtttatcataattcgtcaaaacaattgagtatccaactaaccctgccccaagaagtgtaaatccaagaattagcttaggccactgctgtttcgcagattcaactaaactctcaaaaactgttgcggttccatccccattggaagagaagaaagatgcaggaaagaaacgagaggatttcttcaatgatgtcttggtaccattatgagatgaactctcccttggcagatctttctgcacttcctgtttttttgtcagaacaacattctttgacttctctgcttctccttcagcctctttagcaaaatctgcagttggctttccgttctcattatctgactcgtaagactgagtcccaacatctgatgaaactccaactactactaagtctctttcagcctgatggcttacatcaacaatttcactcaagacttcatcctcaccaacaatagtattctttccatccaatacctttccctgggttgtttcttgggtttgggaaccaaaaagagtcttctctgctctttgcaaagcaatctctgcatcattcacacgttgagtagcctcaagctcaaatgccacagcttgttcggccaaaaccatgatatttgcaacatcctcctcggctttcaatgcgctgatctgcgctctctcggcagcctcattcaatctatctacttccttctgcagctcgtccttcttaacttgcaaacgcctgagttgttcctcacagcttgctaaattttcttggcattcttttatgtcagccttagcagataaaagggcttcctctttatctttaacaccatctctaacctcactctcttcagaagtattgtacccttctgcttctagtgattcaagtgcaacctgcagccttgcttcagccagagataatgccatagtagccttctgaacagcttctttagcaacggactcttcatcaacagcctcttgaaccacattaagtgtttggtttacatcgttccacgcactggctgcttcatccttaagtgctatcgctacctctgaaatcctctgagccttttcttcaaacatggtactgttgagactagccacttccaattctttagttgccttattcagtagatccctgagttcctccaaactaggtgcagaatcttgctctcttgtgtctttctcttccttagaaaacgtaacctccctgtcatcactaccttcagcaaattccaaattccggtcattcccaaccaaatctcctacagaatcgctactttgacaaagtaacctaaaccccagcggaacattttggggttttgcaggaagcaaatgaccgtaaaatcttccattgaaatcagcattcaaagtcaaagaagaacgatacgatacatttcgtttcgatctaatagctgagcgaactttagaatcaatcatcggatcccaaaatctagtgccgccgagtcctttgggacagagtttcgcacttatcattcgattcggcaagcagtaactcgcaaaatccgcaccaccgtgaaacatactctggcgctgaacgctagacgcaaaatccatattactgctgcagaaagacggagagaacaagagactgaccgatcataagagaagagagcttcaaggcttcagctgatgaagaatcaatggcggcgagagtgagtgagaatcgagtagttactgagaggaagatgaaacgtatctcctgagaaaaaacgtaagagagttccgtttcaacagtatttttctcggcggtcttcagattttccgtccaactctctctttcctctttcagtttttttttgcccaatcactcgtggtaggatttttttataagaaagttacgaaaatgccctctcgtgcttagagagattcaattcgtgcacatataatatgccgtgaatataccaccaactctcttactcgtactcgcatgtggtgcgtgcaatatacacgtggttcgaatcaacggctacgttttactgataggtggctcgtttagttttgcactgcctttgggtgcgcgtgaccaagtcattttccaaatgtgttttaatatttgtgaactattattaataaaaaagcgagcgacgttgttcgttgatgagggagcgaccgtacgcttggcgaccttctctgattgcgtagagtcgttttccttattgggcttacctagtaccgtcagcccacaatgttttcatttctttcccacctaaaactaaaagtactcacaagtcacaacttaaaccaagtacacaaggattttatcatgggattatcgtgtttgaagactaaaaagagcacaccatcacccccattagtgcaggtagagtaagacagtaacttttgggttcatattaccgagcaagaaccgttatttgtgattagacatgttataaaccactgctttagtgactatttaaaacaatatattacatgtcgtaatcatgcaacctaactatgttttcattaatcaaatacaaagaataaagagaaaagtgcgtagattcaattatttggcatagactcaaaagagtgtatatatatctgacttttattaaattattaaacacaaatacatattttcataagcaaaactataaaagccctaaacatataacgattacctcaaaggaaaaagtcgttttctcctaattaaaagataggttacttcctaattaatatataatttatgtgaacttcacaatatacagttcaataaaatttggtaatttgaccgatttaaggagagtggaaattagggcttctgcaatcttttttcttcgccgcaatctcatg

SEQ ID NO: 28502 - DNA, 3003 bp, Unknown; identical to SEQ ID NO: 28266
  misc_feature (1)..( 3003): 2750-1469P.txt file - cDNA_ID_2997205; gDNA_ID_2926139; Annot_ID_138952

SEQ ID NO: 28503 - DNA, 3003 bp, Unknown
  misc_feature (1)..( 3003): 2750-1469P.txt file - cDNA_ID_2997212; gDNA_ID_2926139; Annot_ID_138956
ttttttcttatctagaagaagttgttgataagcttttagaattctgttttattgtttagtgaaggaataatcttcaattttgtaccctggcctgaggaataattttaagtttggtggaaaattgcagattgttatgcaactcttagtctataccataagataacctcatgaatgaatgtggtaatagtggttgcagagcgtgtaattacaactgctttgtgttctgttgtttagtggaaatatgaatctccattttggcttgagtaattgcatattttgtgatgtatccatctctctaagtctctagactaacctgaggtgacaaacgcagcgatagagtcgctggataaaatgcgtaaaggaagtaagaaagcagcactgcagatggttgacatggaatgcagttacctcactgttgatttacaactcttatgcattgtgtttggtggataatgcatatcaaacgtgcagagagtactgatcagtttacaactcttaaccggaaactgagattctcggttcggtttaaccggtttctaccgaattcacaggactacaaatattttaagttaggtaagggaaaccaaaagtccacatgtttctgatccacgtcagcatgaaattctaaacgacgtttcagcgtaattcatcttctcttgtataacacttccgattctaattagggtttatcgtttgcatcgctcttgccactacctccggagtctgtttcatttgtttaaggtgagtgaccacattgattttagaatgattatatatgtatggtttgaattcttgcttacctcttgttagctaaggttttatcttaaccattaatttagtaatataggattcttgttttcaaacagtgaatggaggaattaagccaaatcttgaagaacaataggaccgatgatctcacttggttttgctctctctcagaatctgaactggtaaatatattgtttaatcattctctttctttctgcagtcaaaaactaacattgatcaatcattttttcaggatttgctcatcagcttaaaaaagctagtcattcgacgtgccaaagtaagtggtctcgaagatctagtagctgacaaatttgatcttaagatgctccgatctctcggttatcttctaacttccgacactttttgtttttttaaatcctgaaatctgttattgtgaagctattcatctttgatcttgtgacacaatcatatggtatcttgcagggcttgtgctaatggagtatgtaagaaaaagagtagaagatgatacttctcttgccccaagtgttgtccaagaactcagccttttggatagttgtaacttgttgaaaacgcatgtagatgatactgtagacattgaggagattctgactgatatctgcaacaagaagtcaaaaaagaaaacacggaaaaggttgtgcttggtacatagtctaaagagttaggggaaggacctttggataatattccatgccaaatacttatatgcatttctttcgtgtttgaaggagccggtaggaaccagcctgctgcgatggacaagtaacagtgagagagggttgcaaaaccatgagacaacagtttttccatacaaaggctgttggaaaatcaatgtacgttactttccttgcatctggttccgactattcattttcatccactccaaaattattgtctgttttaagcatcttttttttttttttttcggagagggttttaacatctttgcttgttagcgaacatctcttcttctttttgctattcatgagtatgttactcatacactcaaaaatatctaacgagtgtaatattatgtattagcgagtgttttacaattgactgcatgcattttagaattatatcttgattgagtgaacaaaactcaaaaggtctaaaaagaattagttcgaatcggctgaaaacttcgagttccggtttattaccggtttacacttaaccaatctataaattggtaagcaattctatcgactaacataaacccttgataagttaatagattattgtttatacgtattcctactagagacgtgttgcgaaagtgatacgtctcctaattaaagagaaaacgagatttaatcgttattaagaagaaacttcaaagtctttcatggatttttagactctgaagtagacgcttttgtcttctctgtacgtatataatacgttcttattttgacttttatttggcgtttttttccaatttcgttttaaaaattccaaaggtagctaacttttggcactcaactgcgacaagctgttcaaaaatgatacatctgttacatatgatttattaaactaagacatttttataatatatgtattcagatattgattataacgtccaaaagaaaaacagagatgctctgatttttataacccaagaaatacgttacctgacgttaataattgcctaacaaacgattaggcccaacaaaaaaacgtcttataagttaaaactttggtttgggtcaatgcttcatatgattggtcctcagttgggctacaaaagggacacgtgtcaagatcagacggcggttctcaaagcaacccggcaatttccatggaaacagaggtatgaccaacatagtaagtaccgtagagtaaaacagaaaacgaactcacaaagaaaatcttttaacacttgtttttatttgccttgtttttctaagaaactaagatttgtttattcgtttaactggtttggtcacgacaggtgattgatctttaaaggcgagttacgtctttttggttctcgtcttctgtttctgaagaggcaagttctctttcctccctttttggttactagctctttcttgttcttgcaactcttattcacctcttcttatagaagtccatggtttttcgtgtttcagagttttctctaacttagaaatctcttttcctctgcagttgtctcttcttgccttctattgctgataaggtgttttgaaagaagaaaaaaagcctaaaatg

SEQ ID NO: 28504 - DNA, 3003 bp, Unknown
  misc_feature (1)..( 3003): 2750-1469P.txt file - cDNA_ID_2997216; gDNA_ID_2926139; Annot_ID_138957
ttgggatcgttaaattcgatctccgtgaggttcagtctcgcgttcctcctgatagtcctttagctccccagtggtacagactggagaacaagagaggcgagaagaagaattatgagataatgcttgctgtgtggtctggaactcaggctgatgaagctttcggggatgcgactttctcagactcattggtagattcagacagctccaacattatatccgctaacctgcgctcaaaagtgtaccattcgcctcggctatggtacctaagggtgcaaatattggaagctcaggacgtcatcatcgtgtctgacaaatcccgtgttccagaggtctttgtgcgagtaaaagtcggtaatcagatgttaaggactaaatttccccagagaagcaataatccaaaatggggtgatgagttcacgtttgtagtcgcggagccgtttgaggataacttggtcctctccgtggaagatcacactgctcctaacagagacgagccagtaggaaaagctgtgattttgatgaatgacatagagaaacgtatagatgataaaccttttcatgaccgatgggttcatcttgaagactccatctcagacgctatggatgttgataaagccaagaaagtgaagttcgctactaggctccggtataaggcggttctcgatggaggctaccacgtttttgatgagtccatgtataacagcagtgatctcagaccttcgtcgagaaagctctggaaaccagcaattggtgtcttggagctcgggatacttaacgcaaatgtgttccattcgatgaaaactcgggaagggaaaggtacttcggacacgtacgttgttgccaaatacggtcacaaatgggttcggtcacgaactgtgatcaacagcatgaatccaaagtacaatgagcaatacacatgggaggtttttgatcctgcaacggttttaaccatctgcgtctttgacaacgctcatttcgcagcaggagatggcggaaacaagagagatcagccgattgggaaagtccgcattagactctcgactcttcagacgggccgtgtgtacacgcatgcttaccctttacttgttctacaacctactggtcttaagaaaagaggagagcttcacttagcggtgagattcacctgcacatcggtctccagtatgctgatgaaatacacaaaacctctcctgcctaaaatgcattacatactacccttatccacaaaccaacaggaagctcttaagatgcaggctatcaacataattattgttcgtttaggccggtccgagccaccgctgagacgggaagtggttgactatttgacagattggaaaagtcagctgttcagcatgaggagaagcaaagccaacttcaataggttcacgacagtgttctccggtgcgctgtctgtttggaaatggatggaacaagtgtgcacatggaagactcccgtgacgacggctctggtgcacgtgctctacactatgcttgtgacgttcccggagatgattttgccgactgtgtttctgtatatggctgtgattgggatgtggaattacaggtttaagcctagatttcctcctcatatggacgccaaactatcttatgcagacaatgtaaattctgatgagcttgacgaagagtttgataccttcccgaccgtaagggctccggacattgtgaaaatgaggtaacaaaaatcaagaatgatcaaagaaaatcgaaaacgaagaaagacttggtcattggttgatagttttcctccctcatatttttcaggtacgaccggctgagatctgtggccgggaaggtacagtcggtggctggagacatagccgcacaaggagagcgagtgcaagcgttgctgagctggcgtgatccacgcgccaccgcaatattcgtgacgttctgtttcattattgccatggctctctacattaccccttttaaacttgtcgctctgttatccggttactacttcatgcgacatccaaagctccgacaccgcattccctccgctcccgtcaactttttccggcgacttccagccatgaccgactctatgctgtgaatcttcttctggatagagtaatcaacaaacatgccatgtatataactctcttctttgaatctgtatctatctatcgatatgcatctatatgtgttgacaatcatgcgttcgtgaactcgttctccgaattaacaatggtgatcgcaaacaaactctgatgatcaaatcaaataaattgcttccacactcgcaatgttgaaacagagaatctaaaagctcaaaacagagtcggttagatcctaacaaactctttaaaccttctccaattcgcaaccaaagctaaaccatcgcttccacaaaactaattggtcgataaccagcctaaacccggtttgatttaagctgaaccagatccgtgtgatcaatatataaaaagcccatgggccttgaacaaaacaacgtcacatcggtgattaacactgtttttagtgcttaattagttccctccctgattacaaaagtccgttagtgattacggcatgaagagacaacgggaaagaggaagaagcatatctctctctctgtcttgttctatgaacgagaccacttgctttaacaggcggtgctaattattttccagaaaataaaaaaccccaaaaatctgtacgacaaacaatttattaatcaactctttttttttctttctataaggttaatggccagattctttcttctctcacacccattaaaatatttcatcaacttgtcggtaaaattaattcttggcttattctatctttctttctctgtcttcttctttcaatttttcaataacaataatacagatgtgtatacattagatacacgtatactagtactaaacttcactgtgtgatctgatctagagtttttatactatcagaataaataatagtcgacaatttgggatttgtttatggtttacttcacatgaatcacatacgttcatg

SEQ ID NO: 28505 - DNA, 3000 bp, Unknown
  misc_feature (1)..( 3000): 2750-1469P.txt file - cDNA_ID_2997220; gDNA_ID_2926139; Annot_ID_138960
ttgggatgtcttacgaaataattttggtagaagagaatgtaaaatttttcgaataaaaagtagtcagcaaaacatatgatttttggggagtttttagataattaaatcagagaatagagctggacatatgagtaacgtcgggtagaacctgttcgggtttgggattaatgggtatatgatttactacccaatagaataattcgaaatatttggttctggttcgggtcgggtccatttggatttgggtcagtttggataaaaagtttcaggtcctaaaaatactcaaaaaaatagaaacgggtattttctatgtagatagcgggtctccaaaaaaaaaaactttaaaatttgttaagttttaatatatttaattatatttgaatatattttactaaattttgacaaacataacaaataatttttgaatagtttagttgttttggatatttaggtacaaaattaattgacatatttagatttataattataatcttagataataatctattaagattaaatataattaatattttagatattaaattaatgtttgggtttttgaataccctttttgggtaacgggtaatttctggaccaatcggatatccacgggtttaataaaactctacccaataaggaaatttcctaaaattctaacccgctctaacccggttttttggttcggatattggattggttatcgggtccgttttttcgtgagccctatcaaagataatctaatataggatccaattagatccacaaatataaccaaaatattatacaaagaataattctaagttaggccaaaaattaaatcttctaatacaaaggaaacatgtttcttaccaaaacaactcgtatacaaattttacatttacttaaaaactacatatgttgtatttattataaaaataacatttttaaacaaagtcaatccaatgcagcattatatccaaatagtaaaaacattaaaaaatattatgacatcacttttatactatactatttcttatgtaattcaaataaaatatataatttaatttatataaaatattaatgcccgtgctgtatagcacgggttatgatctagtctatatattgttccacctacattgattatttaagtatatttattttatcgaaatttgctaattttccataaatcgatctattaatttaacaatgttattttgaaaaaatggtctttggttattattgtatagttggcactgctttggaagttaatccataattattaagtactattaaatagaaaatctctattgaattgttctatttttttgggtatcgtcataaattgataccatttaaagagatactcttaaaatagaaatctaaatttactttgcaactgattagtgatactatgggtccatccatgatggtgatactaaagtattttgttcagatgattactatcccaagcgacgctccggagacgcgtagcacgtgaatggcttcgacggaatttattacaacgttgtacaatatggaatgtggactagtgttgtgtgtgtgagtactgtcttataaaaagtggaattcaatttccaaaaagattgaaagatatttgcagttgctattattatagccaacgccacggttaacctaatatgacaaaaatcagaaagacgcgtaaattgattattttatgttttcatatgtttgaataagctatcttccatgtagagagaaagagaaatctctttttcacgaattaagaaaatgatacaagtaagattctttacaagagatataagatcatgcatatctgattctagtagtatctatacacgatcttagaggaatagtatgagaatatactagcatgaattgggatttactgctttagatagtatgaagagcttgcatttggagaatgtaacatttatctctttttgttgctgtctttcactagacaaaccaaacaggtctatctttgaacatcaacacaggaacgcatgaagttgctagaagcgttgtggctgatctacgtacgtctaacttcctatcatcctatgtcacgcaaggatatgaagggatcaatatttgccaaacagaaatttgattaccatttaccaatgtgagctttcttctatttttttcactcgtttgctttgggcttcgtattgtttcatccaaatgtaattaaccaaaaaatctcgtatctattgtaatataggcctcggcaaataaaccaaactgaatcaaaccaaatcgaaccaaaattggaaattaaccaaatggataataaattctgtaaccgaaataactgaaaccgaatggatacaaacagaaatataatattttgggtaaccgataatatccgaaatataaatatattttcaaaagtattagttatatctagaataaataattaaaaatacttgagaatatatataaaatagtaaaaaactcgaaaataacaaaaatatccgaaaatatccaaaaataattgaaagatccgaaaatatttaaagcaaaataaccgaatggatactacattttaaaaccgaaagaactgaaatcaaaccgaaccgaaccgaactttcaaacgaacgcctatactataatgtaatctgaatgttctatcttgaccgtcaaaggacgatccactggtatattatttctcataagccagcccaaattacatttcaaggcccaaatccattagcctcaaaaagttaaaaaaactataatcaacggaacattccatttttttttataatattcttaaatcaatttatgtattcaccgtgcttcgccagacaccagagacgcttactaaagcactgagaaaaaactaaatgagattttgatcacactcacacaacggattgcgaaatagtaatattttataatcgccgacaaattcttcagatctccaaaattgaatcttattataaaccctaagatttgcatctgatctgctctcgaagacgaaagcttcgagtactggttgaagctaaagctatg

SEQ ID NO: 28506 - DNA, 3000 bp, Unknown; identical to SEQ ID NO: 28505
  misc_feature (1)..( 3000): 2750-1469P.txt file - cDNA_ID_2997220; gDNA_ID_2926280; Annot_ID_143595

SEQ ID NO: 28507 - DNA, 3000 bp, Unknown
  misc_feature (1)..( 3000): 2750-1469P.txt file - cDNA_ID_2997236; gDNA_ID_2926143; Annot_ID_139030
tgtctctgggggatctatcaatacttcttggcaaaagggtcaacttctgcgacaaggatcgtttggctctgtgtatgaagccatttcagagtaagtcttactggttgcttatgtttgttgaacttaaatcaattacttagttttacgttatgcctttgctgatggatggttttgctgaatgtagagatggggacttctttgctgtcaaggaagtttcacttcttgatcagggaagtcaggcacaagaatgcatacaacaacttgagggggtatggaagtttcatatatgatcggcagtatatatctcattgatcagacaaaagtaggttgctaatccaccttaccttagccacatgttttcattttctacaggaaattgcactacttagtcagcttgagcatcagaatattctgcgatatcgtggcacagacaaggtatggccctggtgtccctttcttgttctcagttgcagttgcctaagcattttgttctgcaattaataacttatttcgttgtttgcaggacgggtcaaatttgtatatttttcttgagcttgtaacacaaggatcccttctagaactctaccgaagataccagattcgggactcgctaatctccttgtacacaaaacaaatccttgacggtttgaaatatcttcaccataaaggtttcattcacaggttagactagtaaactctcttgtcacagctgtaattcccaagcctctgatttcctgcacatcctaggttacttacttttctcatctgatgcgacaaagggacattaaatgtgcaactatattggtggacgccaatggcaccgtcaaacttgcagattttggattggcaaaggttcttttccaataatagatgtttatagcttttactctaacttaattacttggtccatcgtttatcccccttactcaatatatatgtcatttttttcatttaggtgtcaaagttaaacgacattaagtcccgcaaggaaactctattttggatggctccagaggtatacttcgggatccttcctcctgttttgattgttgtgaatacaatgacaaacatatcatatatcaatagcaatgatggatgttatactgttgcttatatatgttgttgcaaccgttgtgatatgggcttgatagcctcaaaaacccccgattatgtttccttcatagtttgattaaatttcctttatttctgtttataactgtaagtatgtttgtgtaattatacgtaacagatatatttgaattccttccactttcattgtagtttaggctatacttgatcaggttatatgttacagtttttcctaaatggaacataataatttgatcaggttattaaccggaaggataatgatggttacagaagtccagctgatatatggagcctcgggtgcactgtgctggaaatgtgtactggtcagatcccatactctgatctagaacccgtaagtcttcaggattttcaaacttttgaactgtcttataatcttaaacgacattgaagggtctacttaatgggattttatgagttaaaggtcagaatttgtgcaaacgcgcaggttgaagccctgtttaggatcagaaggggtacgcttccggaagtacctgatactttatcactagacgctcggcatttcatacttaagtgtctcaaattgaacccggaagagcgtccaactgcaactgagctactgaaccatccatttgtgagaaggcccttaccatcctcaggctcaggatcaacatctccgctaatccgtagatgaatctaattttattagattgcctccataggtgaagcctctagtttcgttttattgagaatatattaggatcaaacgctatattctaacattgatatcttaatgtatgagagcaggggtaaccagaaggtttatgagatattagaccccatagaaactttaggggagacacgagatatgattctttgatacatatgctgttttggttgcgcagcaagagctaaactttctcgagacatatcttcaggtagtttctgtctcattcattggttggttgttgtaagttgtgtcacttgtgtgtgttgagcttatatttaaaactgaagagccttggttaaattagagttttgggtgcataggtttgtttagttttgttaaattatagtatcatgtaatgtataagaagaaccttagttgatttagagtttcgggtgtataggcttgtttggttttgataaattatatagtgtatgcatgtaacccatatcatgtaatgtgtaattatagttggctcttatatagttcctgcttgttgcaactgtttacacatctcatgtctcgatggatttaatctccaatttttcttatatatatatctgaattatacatgcatacatacactataatttaacaaaactaaacttttcttttgggtgcaaaaacataacctatattcatctcttaattattttacgctgaagaaatctgctgtttcaattaaaaaagtatggtcaaaccaacattttctttgaaattttggtgaaagccactctcattgaagtgtatatatgattcaacttgtttcttacaatatttgccccgttgaaaacttttttgccatcgatgagtttctttaagggcaaagttcctttaagaaatgcttttagatttctttgtatacctatgaatttttaatcaagtgatgaagacacggagaaaaatcctaaattgatgctaaatattttatctgtggacttaaccaagtctcccacaaaaataatacaagaatctgcaacaatttttaaaattcagtattcaattattattcagatactattactagattgaaaattcaactcttgtcataagtcgtcgtcaacttcttttgtttgcttcttcctttttctctaacaggtgcagtgttactgccagttgtttggatatttccacttgtgtatttattctctctatctctttgacgtcgtctacagactacaatg

SEQ ID NO: 28508 - DNA, 3003 bp, Unknown
  misc_feature (1)..( 3003): 2750-1469P.txt file - cDNA_ID_2997244; gDNA_ID_2926144; Annot_ID_139037
tagattataactatataatttaaatttaaattatatatttttttattaatattgtttgttttgttttgtgttttagataatgtaattgtatcttaattgttatatctaggatttcacctttagtataccgtcttgtattactatcaacccaaacccgtcataccatctaatcatgttcaatgaaattaaacatatctaatggatttcacccgtggtatatcgtctcgtattactatcgacccaaacccgtcctaccatctaaccccgttcagtgaaattaaacattattttgttatttttgttttaataatactttaatataaaaatatataattcaaatcaatttaaaagttttctttcaaatggttatttaatttttataaagttcatatgatatattattataaacccatcctaccatcttatctcgttcggtgaaattaaacattttttttaataatacacttattaaaaaaattataattcaaatcaattcaaagttctttcaaataattatttaattttgtaagattttccatattataaatattgtaaacgttttccgttaaatattctaaaatgtttaataaattatagataactataatatttatcttttaataaagtataatattaataatgtgctaaactttctcttctttgaagtaattagaatttatgaaaatatattagataaggaaatgctagtaattaggaatattagtttattgataataattaatgctaatggcattccttgtaacttgtaagtgagttccaactctaggatttatttcacaaaatggctgcaaaaatgtatatgtagattgttcataaaagtatacaagtcattttcatgaaatcaaaacttataaaaatccacttcatgtttttttttgtttttttgaaatgttgggttaattttggaaacaaaaatcttttagtactatttttgtcaatcttcctacattttatcccaatttctatctaatgaatttttattaattgttttgggtattttggtaggcatatgcatagtacccgaacccgaggaaccaacccaaaattgacctgtaaactcgattcatatccaaacccgaaactttcaaatacccgaatgggtctaaacttcaaaactcaaaaaacccaaacctgaacccgacccgaataggtacctaaacatacctcaaatataagtatatattaataatatcttagttatatttatacttatacatacaaaatattctgatttttaagttattcttgtgtattgtcggttacttctggatatattcaaataaaactatatgagttggtttggtaattttttaaatttttaagtaatttgatagatttgcatacaaaatttttatattttaatatttaaattaattcaagcccgaacccgactagaaatctaaaaatatccgaacgggtcttaaattcaaaaatctcaaatgaataaaaaggattttaactagtatttataaatcatcgaatcaataatatataattttaattagaattttaagatcaatgattgaataacaatttttggttgaatttccaattcctaagctataaaccaataacccatcctaaatatttcaactaaaccgaaccgacaagaaatcgaaccaaaaaaattctggttcccttatcgatcataggaggcaggaaccaaaaaaacaaaaaaccgaatgaaaccgaataaccgaacgcccaacccttttgtacatacttaaaccgaccatattccatgtttcatgttacaaaaatagttaaaagattttacaactacagtagaaactctataaattaatactcgataaattaataaacacgataaattaataaattttgccggtcccaagtcgggccaatgtaaaaattaaccaaaatcgataagataataagataataatttttttgaaatccctatgtaaagttatagtcccactaatattataaattaataatcataaatcttaagtatatattttaagactaatttttatatgaattttttgttcaagctacaattacaattctttttaaaatacaactagtatgatatctgttgtactcacataactatttgcgtatttgatccgtcatagttgattttgtaaaatattttatttgagaaagcattgctaagatttgtgtaaagagaaactggattaagcttcatgtttacgtttacgttcacgttaatattgtaaatatacatacacaatatcttgccaaaaaataaattaaagaagtcaaataaaaataaaaatctaacataattatatatgcaaacaacaaagcatatagataattaaatctatatatacatttttacagccattttgtgaaataaattctggagttggaacttatttacaatgtctgccattagcttttaattattggtttttttttggcaaatatattaaaagcatatagataattaaatctatatatacatttttgcagctattttgtgaaataaatcttggagttcgaacttatttataatgcctgccattggcttttaatatatgttaataaacattttcaaaataatataatattgtattttacataaatatttctataaattaatatttattaacttatacgataaattaatatttattaacttatacgataaattaataaatattaatttataagataaattaatattattataaattaataaaattttatggtcctaacattatagagtttctactgaagaacaaaccgaaaagtaaaaaatatctaattctgtattaaaccagtaaaatttcgtaccgcagcgataccggtttactaatcaaacccgaaaaaaccactccgtatccgtaatcttcatctctcgctacgacacaccaactgtttaatttcccaatttgtcgccgactcttcgaccttaaatcaccggaatctttctctaggtcgccgtcaagcttctctccggagaatatggttttggaataaacgatg

SEQ ID NO: 28509 - DNA, 3003 bp, Unknown; identical to SEQ ID NO: 17074
  misc_feature (1)..( 3003): 2750-1469P.txt file - cDNA_ID_2997247; gDNA_ID_2926145; Annot_ID_139074

SEQ ID NO: 28510 - DNA, 3000 bp, Unknown; identical to SEQ ID NO: 5314
  misc_feature (1)..( 3000): 2750-1469P.txt file - cDNA_ID_2997251; gDNA_ID_2926145; Annot_ID_197702

SEQ ID NO: 28511 - DNA, 3000 bp, Unknown; identical to SEQ ID NO: 5314
  misc_feature (1)..( 3000): 2750-1469P.txt file - cDNA_ID_2997251; gDNA_ID_2926145; Annot_ID_139083

SEQ ID NO: 28512 - DNA, 3000 bp, Unknown; identical to SEQ ID NO: 5314
  misc_feature (1)..( 3000): 2750-1469P.txt file - cDNA_ID_2997251; gDNA_ID_1620778; Annot_ID_167826

SEQ ID NO: 28513 - DNA, 3000 bp, Unknown
  misc_feature (1)..( 3000): 2750-1469P.txt file - cDNA_ID_2997255; gDNA_ID_2926146; Annot_ID_139086
aagttctcatgaagtttgacttctcattgagtctctttgcagaaaagtcatagaatggtagatatgatgcacttgagagagagactatgctagtccacattaagtttctcttagtactatgaaatataaaatgtccttccatatcgcttttctcgctgaaggtgataacttgaggtggatatcaaatgggtttgtcatatatcctctattgttagttgttttcaatagcctgaggtggataaaggtagttgataagtttttggttgtctatgtgcttcagagattgcttgttccatccaatgtttaatggtactaatacgaggtgcatatttatcaaacaaatagaaattagaaagatctgttagagtcaacattagtaagaaaatgtatctattagctgctacttataatcatttcaatatagtttctttgtggtctgacagaactctgtattatcatttcataagtatccatgttgtgttcctttgcagaaagtcttacaattgttgatattatccagtagatgcacttaatagagagactctaatggtagtccacattatgtttctggtttttataattgtcagtccatatcgttttgctttctgagggtaataaaactttggattcttctgatatatcaaatgggtttttcatattattcatatatacagtattgttaggcgtttttgatagcttgaggtggataaaggctgttgataagtgtttgattgtctatgatgcttgagagattgcttgttccatccatgatttatctttctgtatccttgagatgtagcatattttatcaaacaaatgaagattagaaagatctgttagtgtcaacattagtcagaagatgtatctattagttgctacttttcatcatttcagctggaaacatagtatctttgtgttctgacagaagtctgtattttcatttctctctaaaggttgaaaactgtactacaccgttagaagaagatttgcttgattcagttttgggatcactcataagcaaagatgaaactataatggggcgtctcttcttggaggcaaacatccacgaccaatcgtgccaagccttgctgagcaagtgggatcacttaaagccttcaacgcaaaaggttctttctttagtttcaaaggcaaagaaattcgaaaaggaaaaagaatgcatcatcatgaatctcgctaaagctgagcaagaggtaataatcataaacgataacactctattgttcttaaatgattccacttgactcacaaactttttacaggtggaacttgtgagcacgctaaaccgaaagctggataaagaaaatcgtaagttgctaaggcaacaacaaagccctctttgctccgcagacaagaaccgaaacagcgcatctgcaaaggtaaaagtaccacaaaaagaaagaagtaaacactgcgaaggaaaaagcagctatgtggactctctctttgattctaacttaggagtgttgttctgtttgcagtcaaacaagagaaagagtccgaagacgatgagtagcccggtcgagaagaggcttgagtttagcagtccagaaattagcaggaagcctctatcacctgtatggaataactcaccagattctaagatgaacaacaattgatgataaacaaaatcaaacaactatctgtatcattcatatgtgaaaccggattatattgttgcttctctgaagctactaacaacatgtatcagtattgctatgaacaaatttgaccagaaaatcatgttttcaaactggtaaataactagcttattatatacaacagcagtgtaaaactgacatagcttactaaacactggtgtttaacatttcttacaaaaacgcaaccgttttcggtaacctacaacgacgtcgttgcgtctacaagaacagtgaaatttatacaaacgttgtcgttttcaagtacattttctaaacgacgtcattgcttctacaacaaacagtgagaatcatgaaacacgtcgttttaaaactaagaacgacgtcgttagtctattccaacacaataaatgtgaaattgcgttgcttttcgatttcttcttcttatccaaaactctctcagtcatggctcttcttcgtcttcctggcatttccctccaaattctaggtcacaaatcaaaccagaagaaccctaatcccaatgttgccttcaccaatcactctctctctttatctactccttcactatgtcgtctccatcgtcacgcgacgtttccagactcaattccagcaaaatccagaaacctcacttcgtacttctccaccacaacacaagagccagtcctcgaatcttcttcttcttcttcttcagctcctgaggtagtagaagaagagatttctaaaaccagattgattgctcagaatgttccatggacatctacacctgaagatattagatcgttgttcgagaagtacgggagtgttatcgacattgaggtttttggtttttctcgtttccttcttttgaaatcgatgaattgaatcttttgtgttttggtttaacgaattgtgtttgatttttgatttgtagatgtctatgcataagaaggaaagaaatagaggtttggtgttcattgaaatggcttctcctgaagaagctgcaacagctcttaaatctcttgaatcgtgtgtaagtacaacgcttcctacatgtctatattggaatactatcattgagatttggttgcgttatgtttcatattatctggctttacgattagtagaagttatacattgtgcttattgggctcttttatgttgcagttatctcaatttgattgattattgtatgtaagaacattgcaattcgcttcctccatctctaagttagcacagaatcattgagatatttctctcatttacattactttatgagtagtggaagtgtacattatgttattagactctttcaggttgcagtatcccgtgtaaacaatagatttttctggcctaaaacttgatg

SEQ ID NO: 28514 - DNA, 3000 bp, Unknown
  misc_feature (1)..( 3000): 2750-1469P.txt file - cDNA_ID_2997259; gDNA_ID_2926146; Annot_ID_139087
ttcctattgaaaccctaaattctcttcttgaaatccaaatcttgtttcaagagtaaaccatgcggagcgagagaattgattcagatgaagcagaaacaaaatcgagaacaaatctctcgcaagaagtcgaagaatatatcaaagatacaattgatcattctttaggtcttccgatctccatggaatctcttcagaagaagctttatacggctgaagaatctcaacgccgtcttcgcgaacagtatcagggtctgatttcgcgattaaaggagaaagatcatgtaatcgatcgtgttagggttagtaatttctttctgggtatctttcgttttctgggatttgattgatttgaatctgaatctttttttttttttttttttttataagtctgaagcgagtatgaatgcgcaagcgttgaagaagtttgttgaagagaatcagaaattggctagtgagtgtgggaatttgttgagtcagtgtaagaaattggagaaagagtgtttgctttatcatcaagatcgtgatgcgttgatggagtttgggaatgaatctgatgagagagctagagaagcagaagctagggttcgtgaattggaggatgaaattggaagaatgtctgaggaaatgcagagatttaagcgtcaaatcggagatggtgaagtaagagtttcttcatattaaccctaaattttctttaattgggttaagttgggtttagaattgcattgccctcgagtaaattagtttgctttttgcacttgctggtttatagtttggttagcttgttcttgatgaaatggttactcaagtgctattgtcttctctctactctttaattagcacatggggtaccatcatttggttttctttgttaagttgacaacttgatttatctaagttctcatgaagtttgacttctcattgagtctctttgcagaaaagtcatagaatggtagatatgatgcacttgagagagagactatgctagtccacattaagtttctcttagtactatgaaatataaaatgtccttccatatcgcttttctcgctgaaggtgataacttgaggtggatatcaaatgggtttgtcatatatcctctattgttagttgttttcaatagcctgaggtggataaaggtagttgataagtttttggttgtctatgtgcttcagagattgcttgttccatccaatgtttaatggtactaatacgaggtgcatatttatcaaacaaatagaaattagaaagatctgttagagtcaacattagtaagaaaatgtatctattagctgctacttataatcatttcaatatagtttctttgtggtctgacagaactctgtattatcatttcataagtatccatgttgtgttcctttgcagaaagtcttacaattgttgatattatccagtagatgcacttaatagagagactctaatggtagtccacattatgtttctggtttttataattgtcagtccatatcgttttgctttctgagggtaataaaactttggattcttctgatatatcaaatgggtttttcatattattcatatatacagtattgttaggcgtttttgatagcttgaggtggataaaggctgttgataagtgtttgattgtctatgatgcttgagagattgcttgttccatccatgatttatctttctgtatccttgagatgtagcatattttatcaaacaaatgaagattagaaagatctgttagtgtcaacattagtcagaagatgtatctattagttgctacttttcatcatttcagctggaaacatagtatctttgtgttctgacagaagtctgtattttcatttctctctaaaggttgaaaactgtactacaccgttagaagaagatttgcttgattcagttttgggatcactcataagcaaagatgaaactataatggggcgtctcttcttggaggcaaacatccacgaccaatcgtgccaagccttgctgagcaagtgggatcacttaaagccttcaacgcaaaaggttctttctttagtttcaaaggcaaagaaattcgaaaaggaaaaagaatgcatcatcatgaatctcgctaaagctgagcaagaggtaataatcataaacgataacactctattgttcttaaatgattccacttgactcacaaactttttacaggtggaacttgtgagcacgctaaaccgaaagctggataaagaaaatcgtaagttgctaaggcaacaacaaagccctctttgctccgcagacaagaaccgaaacagcgcatctgcaaaggtaaaagtaccacaaaaagaaagaagtaaacactgcgaaggaaaaagcagctatgtggactctctctttgattctaacttaggagtgttgttctgtttgcagtcaaacaagagaaagagtccgaagacgatgagtagcccggtcgagaagaggcttgagtttagcagtccagaaattagcaggaagcctctatcacctgtatggaataactcaccagattctaagatgaacaacaattgatgataaacaaaatcaaacaactatctgtatcattcatatgtgaaaccggattatattgttgcttctctgaagctactaacaacatgtatcagtattgctatgaacaaatttgaccagaaaatcatgttttcaaactggtaaataactagcttattatatacaacagcagtgtaaaactgacatagcttactaaacactggtgtttaacatttcttacaaaaacgcaaccgttttcggtaacctacaacgacgtcgttgcgtctacaagaacagtgaaatttatacaaacgttgtcgttttcaagtacattttctaaacgacgtcattgcttctacaacaaacagtgagaatcatgaaacacgtcgttttaaaactaagaacgacgtcgttagtctattccaacacaataaatgtgaaattgcgttgcttttcgatttcttcttcttatccaaaactctctcagtcatg

SEQ ID NO: 28515 - DNA, 3003 bp, Unknown; identical to SEQ ID NO: 23375
  misc_feature (1)..( 3003): 2750-1469P.txt file - cDNA_ID_2997273; gDNA_ID_2926146; Annot_ID_139098

SEQ ID NO: 28516 - DNA, 3003 bp, Unknown
  misc_feature (1)..( 3003): 2750-1469P.txt file - cDNA_ID_2997289; gDNA_ID_1971905; Annot_ID_58530
tttattcactggactttcccatatataactgctccattgttttacatttttagaaccctagtttgttctttccaggtcatttactatgtggtttttagatgtggacaataatatagaggttatgaaattatctgaatccatactttttgaatatgtgaaactcggataaacatcaaaatatccgtatcagaatcagtaaaatgttagtagaaaatatttgaaggtataaagagttgggcaagatgtgttagcggcaatgattttgaatgtgatgagaagtaatatctaagaacaagtggttagatacacaattatgtgaatagctgatatagtagatacaacaaaaaaatgattgatgagaaggagatagagaaagggaactttggtccattgaccaatgtgtttgcgatcactttttcaaattttgaagtaattgactacattgtacaatttatgtgtaatcatgcatatagtttctacatcgattcatcatacaatcatgagttttcatatatctagatcctaattacaatcaaatatatgtttgtgagaggttgtatgtgactttgaataaaacacaacatcctccattatatctcttttgaggatttcagataattttgaggatttttttagttgaaaacacatatatctaactaacatgatttaagtggaatttgggaagattttcaaacaaatcattacaactactctaaattcacttaagatcaacaaaatcataaaaactcaaatcatttaaaacaaatggttggatacactttgaaacttgcaacttatatttcgattggttgtttttttatagtcgattgttcttaaaaaaaaactatatacttgatacatatattaataaataaaaaaattaaaactatagactaaatgttttgctgtgaaagtgtgttatttatatcttcaacatgagagaatgcatcattggtggtgtgagataaaaccattgtgtctttctaacccacatctaacaaatattttatcgaattgggccttaaaataataataagtgaagactcaataacactaaaaatgcagcgaatattctagctctacaatgttcttcggtataattagagttaaaaatttgtggagactatatataactcattttgcctcccatgggtcataagcaagcaaaaaaaatggagcaaactttcatcatgtagaaaacttgtctttctttctttaatacatatttgaaggtctaaaagagttaggcaagatgtgttagcgacagtgttttcgaatgtgatgagaaataatctttaagaacaagtggttatgtacaaatttatgcgaatagatgataaagtagatacaacaaaatgattgagtagcaagagatggagaaagagaactttgctctattaaaaaatgtgtttgagatcattttatcaatttttgaagtaattggctacatcgaataatttatgtacttatatatagtttctatatcaattcatatacttgatatatatattataaaaaataaaatccttaaaactacaatttttgtttagaaaatgtgttgtgtatatcttcaacatgagagaatgcatcaaagtggtgtgatcaaactcttttaatccaaatctaacaaatatattagggttttgtgccaacaaccctcaaaaatatttttttttgcaacataacctttcatattaaatacatgtaggtcaatactctgatatcaaaagtcacccacagtataaccacgtgcatagattttatataatctttgggcgtgcttagattttgcaaaccgtataagtatgtatataagttattaaactacgtcgtttgagcatcttttcggaaaataatacattactagagtggattggaaccaataacctataatactaaataatgcacttaaccaattgtgctgcaagatttattgttgatattgcataccgataaatatatattgtgaacattgcattctgggtttcttcatcttcttaggaaattaggtttattagcaatccgaaatctctattcacgtgaactagtttgtttatcaccactgatttcattatctttggccatcatcaacaatttgtagagcaagcaagggctcattctcatcgcaattaatctattcttcatcgaggaaagctctgagacgaggcgtgggtggaagaattgagcgtgttcagacttgggtttgatccgatcgtaaccgctcgcgctgtttgtcaagttttatgtttacaattctgaaataatgttattgttgtattcgattcatgtttaaactatatatattaatcggtttgtaaagttaacaaaatcactctgctcaattggttaagtaatctttgaatagttcaatatgccatgcgttcaaatctattttccaacattattttgcgtttttgtttaaaggctcaaaacaacgtagttttaataacctatatataaacatacggtttgcaaaatctatacacgtctaagagatatactataggtgacttttgagatcgcagacctgcatttatttaacttacatgattgagttacaaaaaaaattacttagagaattttttggcacaaaatccaatttttataactaattgaaccttaaaataataataagtaaaagccgttttttttgttaaaagaaggctcaaaacgacgtaattttaataatcatgtacagatttatatgatttgcaaaatctatacacgtgcaagagttatattgcgaacgacttttaatatcacagtattaatctacgtttgtttgacataaataattaagttgcaaaaaaatattatttgtgttttttttatgaagcccaatattttatttaattgggcctaacataataataagggaagcccaataatttgtagcaaatattctagggttagaatattcttcaacagaattagggttacatgtgcggactctatataaatcttttttgcctcctacgaatcacaagtaataagaaaacaatg

SEQ ID NO: 28517 - DNA, 3003 bp, Unknown; identical to SEQ ID NO: 28516
  misc_feature (1)..( 3003): 2750-1469P.txt file - cDNA_ID_2997289; gDNA_ID_2926146; Annot_ID_197754

SEQ ID NO: 28518 - DNA, 3003 bp, Unknown; identical to SEQ ID NO: 28516
  misc_feature (1)..( 3003): 2750-1469P.txt file - cDNA_ID_2997289; gDNA_ID_2926146; Annot_ID_139113

SEQ ID NO: 28519 - DNA, 3003 bp, Unknown; identical to SEQ ID NO: 28516
  misc_feature (1)..( 3003): 2750-1469P.txt file - cDNA_ID_2997289; gDNA_ID_1971905; Annot_ID_176968

SEQ ID NO: 28520 - DNA, 3000 bp, Unknown
  misc_feature (1)..( 3000): 2750-1469P.txt file - cDNA_ID_2997297; gDNA_ID_2926146; Annot_ID_139119
tggatgaggtctcctttaccaggatatatggggccggattttgttccagccccaagagatttcgtcccaagtgaagttatttggcccgaaaagttttttggtcaaacgaatctatttccggagatgcatgaagcatgtcaaatgttcattcaaaaggtaaatgtaagaatagtgtttcgttgttgccaatgtggtttggtttagggtttaatcaaatttcaggtttagggtttagttgtgttgattgttcgttatattaggtgaatcatatagtggtggtatagttgtattgatggatatttagcgagaaattgacatttatattgttggacaggtggataatcaacaccaagcttatcgaaggcgtcaccgccaactactcattaagttgcaagacctggagagaggtatgaggcggttggaggctcatccgaaagactgggtgagatacggtttcgacaaagttgctgacattccactgccactaaggagatggtgtgttgagcatgatggatcgtcaccgaattatgcgtgtttcgcggagccaattcccattaaggaggacgatgaaccagatgatggaagttactacaggagagtggatgagcctccacgcgagtatcctcctgactctctctttcaataaacattatgtctttgttttgcttaagtttgtaaaataaatctaaatctaaattgtggttttaaatctttattttgctaactatctgtgttttgaatacaatatatgaatctaaatgtttgaatataattatctgtgttttgaatgtaaattttgctaacaattatataatcagtcgaacggaggtactttattggtcgaaccatttggacaacttagtcgagccatttggactattagtcgaaccggatgaactatttgaactaatcagtcgaactggatgaactatataggtcgaaccgtttgaactaaccagtcgaacacatttgaaccatttgaactaatcagtcgaaccatttgaactaatcagtcgaaacgtctcgcacgcattcaaatcgccaacaatccttaacagaaactcttcaatgtttccatcattctttgcaccagcttttactaccttgaccaagaagtacaacagcactaacttcaacctatctgaaccatgcttcatcttcgagcacttagcaagaacatctaaaacctttatcctagattcttttttgaatatcctcgaacaaagttaatattccccattgtatttagttcttttggggaactgtggcaatcaaacccacttaacaacgcatgctctttaatggaatacctaataggtactccatttaccacaaaccaagcctcctcgagcaaatttgtcttcactatgcgtaacataagcacccacatgcctgacgattaacgttctctaccccttcttttagaattgtattcaccatttcctcctcctccagctcctccccattcccgtctttcgcttcttcgaattgttgaatgacagcgtcaattagaggtttcaaagatgtacctgtctgatcctcttcaatttcggcggttcctttaggagaagcctcatcaccatcacgcggttcctccatagccttttcaatcttagcggtttcttttgtagtatcattcgccgcaacatctcgtgctgctggttcggtcggaaccaagtcgacggcatctccgtcgttctcaatttctgaagtaactggttctgatgtcgaaactttaccggacggcttgtccgtcgaagtaactggttctgatgtcgaaacttcaccggacggcttctctgtcgaatcatatacagggccacctttaccgtctccggcggcatctccgtcgttttcaatttctgaaggaactggttctgatgtcgaaacttcaccggacgacttctccgtcgaatcatatacagggccatcaataccgtctctaacacgagtcatcaaactattacacgaatcaagaattcgtcggaaaattgtgaaaggcgagaaattatgaatttgattttggaaaatttgaattgaatgagagtagaaacggtttgattttagaaattagggatttcgcttaagtgtttggaatgggttttgggttgctaggcatggatcttaattggatcggatattttgttgggtcgtctgagtttttggtcttttgccaattatttggattttctctcatttatctttaattcgacaaaaattgggaattagaagagtggcattcctggttactttttcgcagatagtggcactccagacatttgaacttttatcacttatgccacttttttgaaaaaactgatctggactgccatcagttaatctgaatgccaccgaaaatgtgatataccagttgtacccttaatgagttgattaaaaaaatgaaaaagaaattcaaaagctaaataaagaaaatcgagttcggagattctcctcttcgtcgtcgtgttcttcttctttggtcgacgttcatcttcttcgttggccaccatcgatttcctcatgccgccgacttgaaatccggcgtaaaagccacgaattaggtcagtttcttctcatatttcctttgacattggtgcattgtgattttagattgggattttgaattctatataattcccagctcgattcaatttgatagtttgatgattggtttgcaaagtaaagagtaatcgattagaggttgccgaaacgttatttgaggtgatgagcaaaggaatgtaggttgaatgtgagttgaatttgaattccgagatttcatattaaagatttggggggtttgtgtttgcaaagtttagattaaccaattagtttaacgaataggtatgtattaacattggaaatcaattgaaaggtaacgaattaggttcagtagaatcgagtgcgacgagagattgatttcaacgtatgataagagtacatgtggtataactattaaaatgtttgattggagttgaactggttgtattttcaggagcgatg

SEQ ID NO: 28521 - DNA, 3000 bp, Unknown
  misc_feature (1)..( 3000): 2750-1469P.txt file - cDNA_ID_2997324; gDNA_ID_2926147; Annot_ID_139132
agaaggacctatactttgtgctgctcttgatggaatgaagcttccatcattccctgagtatgaagttagagtcaggttgttaaatatgtttcctttcgtctttatggtttcggatttcgagtttttgactaaaggaagtttttggttgatagatatgcaacggaacatagatgtggagtggttgtaaaagggccaaaacttagtgggaatatatctggaacagatccattgaaggataatcgtttgcttcttgaagctaaacctttggatgaatcagaagaagctaatcacacagccaaagtcgtgaacgaattatcccgggagatatcgcgcattcttgtttcccacccggttaatgtaaagagagctgcacaaggcaagaatattgctaatcttgttcttttaagaggctgtggtattcgaatcgaggtttgtgttcactgtctcttacgaatgcttttaatgaatctatttgctccatctacttatctgttatgggttttgtatataaaggttcctccttttcacgagaagcatggtttgtggccgtgtatggtagcaccaacgaagattatagccggacttggtatgtcccttggtattgatattcttgaagctctgggagccactggagattaccggacgcttctcacatcgaaagcgattgctatagcgaatgcgctttcagctcctttgaatccctgcccaaatgtctttgaaccagcagaggacgggcataaaccgggaaggtcagatggttacgatttcggcttccttcacattaaggtgaaaacatgtctctgtcttttaacacaacataaaaaatttcattctgattctaaattattcgtgcaggctatagatgatgcaggtcatgacaaggctacattgttcaaagttcgaggcttggaagctgtggataaagcgatacgtcagctcgctaagcttctatggcaagctgaatcttcttcaaattaccagtatttcttgtgtgtgactggtgatcattctactccagttgagtatggagaccacagcttcgagcctgtcccattcacaatgtgccggttaaaggactttgtgagagcggttggaggagaatcagctctattagagacatctttagacccttttccacttccaacggatatagcatccagtgaaaatgtcatcggaaaagaagaagaagactgtgggaggagggaagcttctctggcgattagtggagattcagtctcagagttgaacgagattgcagctgcaagaggatgtcttggccgtttccatggcggtgaaatgatgggagttatcaccaagtttctgaagttggatgtataaatcaaatttcataaaattttgcattttttctttgaaaatttggattttggaagtgtaataaaaaattatcaactctaacaagctcaggaagttgaaaaaaaaatgtctaacaatgtttggaggtgtagttgcatgttaaagtttacactttggctcttaagatatacacatgaaatttcctttttacattagctcgacgagaaattaaagatatcgaaaaagaagaattttttttctctcgtgactcaattgcctacaaatttataaaaaatgatggtcacttagttaatgaagacactatctttactagatctaaacaatctgtaatgaaaattacttcacgttaatgaaagtcaatcatgcatttcattgtccaaacgaatgcttttacatttcaagcacataagtcaagatttatcgaaggttgacagctcccataattggcgtgtcttcatttgatagtgtataaaaccatcatattcctgagaaatcatcattcctttccaggaaccataaatgaaatatatgaacctgtgtttctgtaactatctccatttgagttaaagtctacgaattggcttcattttactctaattggagaacctcacttgggtctttatccacattttcataaaacttctcatttcaggctttccaaatgtattagatatttagatgatccaaaaaaacttgaactatgggagccacataattcaaagcaacttgaaaatgttagttaatttatattgaagctctctcatcattctacaaataaaataaaacattaaataaatgtgatatatatacttattaattatattgtctacctaccagactaacaagcttaccagtccaccactgtgtttggtttatatgtcgagaaaaaacaaaaatctataataaagaaaataaaagtgactggagaccgataaaataagtatcccaagcgaaaagtccaaaacccaaaatcagaccagtaatataacttgaccgtttcttaaccggtaattaccggttaactccgtctcttccgtcgacatttttccttaccagacccgttttgtttttgtcttgtttcggtctcttaacaagtcccgttttgtattcttcttccttacttcttattctatctataaaacaacaacttcactcatcatgactctttttccccattttcttactctcttgccctttcttctctcactctccggcgactgttacgagtttttaacacttccgtcgtcttctcaggtttggttcttctcatttatgttaaaccattatgtatggtaattctagaatgtagatctggttcgttctcatggatcttgattaatatgtttgtttaatccacgtattagcactaattttggattattatttggaactgttatcattagataagttttgaattatttgcttaagtaagtaaagaagataagagaaaataatatttattagtctgaacataatcttatcttaagataaacagaatttatttccaaaaaaataagtttttgttaaactaaacacaatttattaccagcaataaaaagattctgtttaatgttgttatcttaataactgatcttttgtctgttttttagttgttgttgttgtttatgacaagatcttgttctatccattaaaaccaaagaaatg

SEQ ID NO: 28522 - DNA, 3000 bp, Unknown
  misc_feature (1)..( 3000): 2750-1469P.txt file - cDNA_ID_2997328; gDNA_ID_2926147; Annot_ID_139133
tataacaagcttatataggtaactatgccgcacaaggtcattgacatgcacttccacgaaagagaagaagaagaagatactggtgagagtagatcatcctcaagaacaccgagagggcatttcgtcgtttacgtcggtacgaagaagaagttggaaagattcgtgatccccacaacgtttttgaagagcccttcattccaaaagcttctagacaatgcggccgaggaattcggttacgcggaagctcaccgggacaagattgtattgccttgtgatgtctctactttccgaagtcttgtcatgttcctgacttctcatcaggacaagtcacattaactatatgagcccactactacgtcgtctgaatgataaaatggttatatgttatgtatctcatattgtatgaatatggtttaattcttataatgtacttatatgctaactttattcaactacgaactacgagtgtaagatttttatttatcatatgttgaatattagttcaatgtgcttttgattggtaactttaagactacgtaaaacttatagcagttaggtattttatatcaagcataaaaaaaaaagtcaaataagggacgaactttgaatatagtgacacatgttttatcaacattttttaaaaataagacaaggaaggatttttgttttacatttactctagaggtttcgaaatttatgacaaattaaagaagtgcaatttgtgttgatccaacaaatattgccgaaacacatcggcaactgcgtcgaactcaaaaatcacattcgcttttctacctagaacaactcgagtagccacattcgttcacaggaagaactggacaattaaggttcttacattttggttgatgactttcatgccactacttaatagttatgacctccatgagtaattattttggttccgccattgattgtaagtccacagaaaacttcactgagtttatgtttacttctcctcttccatttagttgagatcatcaatttagctatactcatatggattaacttggactaatcaatcggaagccttttttttttaatgtaatgtcaaattatatttaaaagaaaaatatatacggttttacaacttgtgcataagaattttgaaaaaagaaatcaaaagaattttgaaaattttagagaataattaatcgaaattgtgcaacaaaaggtatctagctccgagattgaatccagtggaataacgttataacgcttgtcacctgaaagtcgaatagctgaaatctgatttcgaatttgtttatccatccatcctgtgatacgctgagccggttgtgaggtttcaccatgtttccggccaatcaatcggaaggcttattatgatttatgaggtaaaaatgttcaaaacctgcttttctccatttgctttataaaaattcgaaaatttattttcttaaattccatttactgtacttcttactgttcatgtaaataaaatattatatgaattaatcaataaaatgataaaatcatgtattaacaggcgagtttctaatttaatgctccatgaatatgttaaatcaatctgtttttattttttatttttgtttttgttgattttcttcttattttgtttatattttttattatatatcaaaatataattgatttgactgacgaatatgacaatcacgctagatcatccacattagttagaacccctcatgggtttctttaaaattaaaagaaaaactatatttatgatctaattataacattacaagtgttaagagagatgcttaatgagagatcattgtatcttccccaaaaaaaacctctctcactcttttctcacagtcacaattctttttctttcttcaataatttaatagaggataccacctccaatggaaatgctctaattagaattttcaaaaagtatcaaatatattaattaagattttacatcattcattttaaaaaaaattatagagtagactttagcaaaaaaaaaacatattactcaccaccatatcattattttcttaaaccaaattctggacaaactctatcaattaaaatacagctacaacactaaccaattaaataacttaaaaagaaaaatcaaactaatttataagacgttgaaacattaaacaagtgcgaaattcttttaaaaaattgtaggtgatggagaccaaacagtaaaaacttacacctcaaatttgaatttaaagtgtttgtgtaaaacagtttttagttttacccccaacaaaatcaaatcaatcaacaacaaaactaatgatgctaaaacctataagagcattcacaactgtggaactctcattttaattattaaaatattataaaataatgaaaagaaagtatggaaagagacaatgggagagaatcgtcaaataaaactctctctagagaaactttgagccatatgagagaacctctactttacagatgttaagattttattggtaaaaaccaattattttaattaaataataaaattataataaaaataatattttttattcaatacatacccatttttgaaaacccaccattgtggatgttctaatgggtttaaatccctttaccaccaaaacgacatcgtttacttaatgactttaaacttagcctaaaacgacatcgttttacgtaatgacttgcatctttctaactgagcagaagccgacaaacgacacacgacgtcaccacaattctcaactttggagctgcagacacaattccggcgacgtttacgattctgacaccgccggtaagggttaaaatggattctgattctgattattgtagattcgttatctaaagattcgaactttctgaacatttcatcgcaaatagctcattcatagaattagagatctctacattgctttgtaataagagatcgatcgttatgtgaatcattgataattcttaaagtctcagacttttaatttcctctttaccaattggaacagaacccacttgtagcaaatg

SEQ ID NO: 28523 - DNA, 3000 bp, Unknown
  misc_feature (1)..( 3000): 2750-1469P.txt file - cDNA_ID_2997336; gDNA_ID_2926147; Annot_ID_139137
cttcaatatttactcacccaagtctttaagtgaaaactgatagctagattttgtaaaatattttcaaatgcatccaaattgtttcatgtgatgattatgtcattaacatagaccaatgaatagaggatggtataacattttgtatgtacaaataaggaaataatgcattcagacacttagtttctaaaactggatttgatgagataattattgagctccaaataccaagcccgtgaattgctataaatatctttagcaatacattcttaacaatattttcaacaatgtatcactcacacaatctttaaacaatttttgtgctatagcaattttataaattataatgttataattatacaaacctcaaaaatttgatagtggagctactcacatactctttttaaaaattctgaagaataacctactcgaactattagctaattcaatatactattatttattccatattttaagttaaaattataaaaattagcagaaaatcctagagcatgagaaaactaataaaataattttaaatattaatattgatacaattaaatatgtaaaattaaataatatgtataattaaccattatttacatttactatttagagaacatgtgataaatgctaaaatgatgatgtatcattcacatgaaaagttaaccaactttcataaatactagatgaattcccacggtacgcgtgggtttgttttgaaaattgtttagataaaaatatgttaattatttttgttactaatttatgttttgtttgttattttatacttagtaaaattagattcatcttatgtacttgcattttttattgttatattcatttttgactctaaatattaatttctatatactttcatgtataatctgattatttttatatccaaaattctaaaatctgttcattatcatgaatatatcacaacaagaatataaggtatttttatttcaagaattttcgtatgaaagaaagaagcaaaaattaaagagttattttagtaacactttttagattttatgctattgcatatagccatataagacaaatggatttattttaaatttcatagtatgtctaacgtctcaaaagactattacttgaaaatgttgaatgtcaatgttacgaaattaccataagatataaaaatgaaaagacagaatttcatatgatacaatatgaaccataacgtaataataataaaaaatcaaggtaaaataaataaactattaggtagcaaacaactaaactacaacacaaataactatttagtcattatagagtgatgaccattgaccattaaattttttaaaaaataagaaataataaaagtaaaataaaagtactaattgatttatttaaataaataattttataattttatttttattttgaaaaaatcatttaaaaaatgaattaatggaggatttaacacaatatgagacttttgattttctctcaattaattttgctgattttttatttaatcaatattcaatgatacatgtcatttttttgtgtgatgatatgtcacccatatggagaaagttagccacctttcatatatgatatatgatgattatcatttcgtaaattatttcaaaagcatataataaaataaatactatacaaaatttcttcctaagactattgttcttcgaaagccataaatagtcatttggactggtcaaatggacaataagccaagacgagactataaggctataactttctaagatggttgatataagtttgtcaaagacaatggtctcattgacaaatattttatctttttcaatggttctcaaaggagagcgaagttagtaagataaccattcaagttgacagaatggtcaatggactctatccaactagttgcatcacttaatctgagttcaatttatgtcggtgcagtggatactaattgtcttccatttaatatgctttgataccagatccatagaaactataggggtagtaaactaataatgataacatttgttttttttaagaaatttgatattgcaaaatttgatatactaattaaaaataaaataatggataatttggatatatcctcttatatttaacacgtttttcgttatattggaataaaacaaactaggtgttttcaatggataattattccaagagatatgagtatggagtatggaccatggtcctagaaatttgggatggggattggcgggtaatccttccggacgtggacaagtttatttttatgatgcatatgcttaataatctattactccagtaatttccttaaaatcttaaacaaattcaaagaagaataattcaattttacttgttaaaacattgaatctttgacaaacttgaaaatcatattaatttattttattaatagtattaaaatattaaacgtcaaataattttctcgtttcagattttgtggtccacaattgctcacaattacatatagaaaaaaatatttagctattatgttagtcaacttatttgtaatatttcaccagattactgtattactatttaaatcttgaactaattagccatccataattcataatcggaaatttatttatttgacacacatgactggacaaatgttttcccaaaatcagcaatatgtaatacttttttttttgtttgggcaaagcaaaatattttgtttttcatgtgaaaattattttaaggtcctttttagcagaaaacaaatgttttgggtacatttcgcaataattccaaagttaactgctgtaaaccaaaataaaaacaaaaaataattattctgaacaattctagatattctcttcatagtctctggtctcttaactcgccttctatggaagctcaagtgtttataatcttccattaaaaccctaaaatactttttcaatttcttcttccaatttgcttcttttctcttccgatacaaatattcatttttgggttacttcgattcctttaaagctttagaaaacaatg

SEQ ID NO: 28524 - DNA, 3000 bp, Unknown; identical to SEQ ID NO: 4761
  misc_feature (1)..( 3000): 2750-1469P.txt file - cDNA_ID_2997344; gDNA_ID_2926148; Annot_ID_197862

SEQ ID NO: 28525 - DNA, 3000 bp, Unknown; identical to SEQ ID NO: 4761
  misc_feature (1)..( 3000): 2750-1469P.txt file - cDNA_ID_2997344; gDNA_ID_2926148; Annot_ID_139177

SEQ ID NO: 28526 - DNA, 3000 bp, Unknown; identical to SEQ ID NO: 4761
  misc_feature (1)..( 3000): 2750-1469P.txt file - cDNA_ID_2997344; gDNA_ID_1620729; Annot_ID_49356

SEQ ID NO: 28527 - DNA, 3000 bp, Unknown; identical to SEQ ID NO: 4761
  misc_feature (1)..( 3000): 2750-1469P.txt file - cDNA_ID_2997344; gDNA_ID_1620729; Annot_ID_166035

SEQ ID NO: 28528 - DNA, 3003 bp, Unknown
  misc_feature (1)..( 3003): 2750-1469P.txt file - cDNA_ID_2997347; gDNA_ID_2926148; Annot_ID_197881
tgtcgaagactgttttctttttgggagagaaaggagacacagactatgaggacttactgggtggcctccacaaaaccatcattctaaaaggtgtagtgggatcagacagtgagaagcttcttcgcagtgaagaaaacttcaaaagagaagacgcagttccacaagagagccctaacatttcctatgtcaaagagaatggcggatctcaggaaattatgtccactttagaggcctatgggatcaagtaataattttctatttcagcttattatctcaagatcatatacttcaatgggttggtaaacagtgaaaaaataacaagactacatactttcatatattgtataccgaaataaaaaagttgaatattaactttgcttagtatagattcaataaaacaagtatgcacagcttctttagacgttcacacttagaaagattgatacctgaagaatcatggtactctatctagtgtggtatcgcccatccttcggtctaccatagaccaacaatttgttcctcatcacatccatatttggcagtgtaaaaacaatttctgccacaagtggaagttattgtgacaacaaaattgaaaaccaagttgagcctgaaaacaatattcaaccaaaacacaaggagacacctcaacaataacaaaagtgaatccagaaactattaacattaaccttgatctaggtctttcaacaaagtcgggactgcagtaacctgtatcagtccctgcagaaatcataccacttaattctctacatctaatctcaatcaatttcaccgtaaacatcagataaggcaagatataaccacagcaaacaaattcagtagaaaatggaaaataaattcaggtgaagaagaaataccattcttttgagaaagcacagtcctgatgtactactgcaagtacacctacatcacttcttctcagtcaggttcttatccgcaaacgtacgcacagtaaaactttaagaaggttctgaatcagatattcgcaagaacgcaaaaataaagataatttcacgtgaatattcagcttccagcaaatttaaaaggagacataactgaaaccagagagggaaaaaagagtagcaaaaccaaagggcccttttgtttctcattataatttaagttccttacaaactaaaagttgttcaacaactatattaaatgagtacaaaaaactcacaacagaaaagcttgcaggagatcacattggtcacaagaaatcatctccatccatacttttcctatatgaacctatccacacaatcacaaataaccatcctcaatcagaactcctcctccgaaccagaccatgacgatcacttcagtcttaaaaactcatcttgaatagagattactcaattctgtaccaacccaaatcaccaccttgctcacaatagaccatcctagataggaatcttcatatcagaatcaacccaaactcgtgttttcaaagaacaagaaccacaaggaagaacaacagacgccacaaaagcacccaatctcttaacataaacaaaatcaccatctctcaacaaagcaaaccccattgttcctaactcactagaatcaacacaaaagtaatcaccacacctacactgataaaaaagatcaatcacatcaccagtaatctccactgacatatcctcaatactaatctcatcagcagtgattccatcatgtcttgaagatctaagatcattatcataaactacacgtagctctgcatcgcttagaacttcccaagctttttgaatcttcagaaacttctcgtcgtctgagctagaacgagaagtattgttgagcttatctggatgagagtggagaatcgcagaacgatagctatttcggatttcttcatagctagcatcttctttcacggagagaatctcgtagtatgtctcgtgaacacaattctcaccgacaagcatgatttgttgaatcctccttaattcacgacggtgctagggctcaaaattcaccggcgacggcgagaaaattcggaggataaagagaccaagagtttttagtgtgttggtttcttcgtctgaccattcgggttttcgggtcgattcggatcagtctttcttccggatttcgggtaattctgggaagattgggtctatataaaagagaaccgaaattgtttcggttagctcggtttggttatggtattctcggattcgggttggtttttgaaatttgattaaaccccaaggtccccaacctatgattgaacgatattttgattcggtttttttaacccgaattattctataaaccatgaaagtcataaaaccaaacaattcaaaaaaacgtaacattttcaaagttttaaacatataaatctgaaccgaaccgaatttgttattttgagtcgattcagatattttagatccagtatactcaagactaaaatataccgttgaagtataaaatataccgttttgacaattatcaatcttaaaagtaatatcaaaagtgtcacttaaaacattacttttagtatttgtataatttttatgtactatatttccgtacatttttacattattccataaaaaattatctctcatgtttgtaattaaaatatttgtacagtcatatgttatccatcggacatatgattatcatatgtatattgttttgggttttttacgaagacatgttcgaattttagatctgacccggacaaaactgaaacccgaaacaattctaatttgggtatatgctaaccgataattgaaccggatttttcgaatcgggtcgcttaaatcattttgggatcttaaatgtttgggcttgggcctgatttaaaaaaatcaatacttgacccgattacgcaaacccgtttacggaaatacccatcttcaactggttccgtgaagagacgcgcaaaagacgatcgatcaacgttcatttgtgtgaaatctgttaactttttctggggagaattaattttcgtgaagattttgtagaatcgtgatg

SEQ ID NO: 28529 - DNA, 3003 bp, Unknown; identical to SEQ ID NO: 28528
  misc_feature (1)..( 3003): 2750-1469P.txt file - cDNA_ID_2997347; gDNA_ID_2926148; Annot_ID_139195

SEQ ID NO: 28530 - DNA, 3003 bp, Unknown; identical to SEQ ID NO: 28528
  misc_feature (1)..( 3003): 2750-1469P.txt file - cDNA_ID_2997347; gDNA_ID_1620670; Annot_ID_48140

SEQ ID NO: 28531 - DNA, 3000 bp, Unknown
  misc_feature (1)..( 3000): 2750-1469P.txt file - cDNA_ID_2997347; gDNA_ID_1621195; Annot_ID_174724
cgaagactgttttctttttgggagagaaaggagacacagactatgaggacttactgggtggcctccacaaaaccatcattctaaaaggtgtagtgggatcagacagtgagaagcttcttcgcagtgaagaaaacttcaaaagagaagacgcagttccacaagagagccctaacatttcctatgtcaaagagaatggcggatctcaggaaattatgtccactttagaggcctatgggatcaagtaataattttctatttcagcttattatctcaagatcatatacttcaatgggttggtaaacagtgaaaaaataacaagactacatactttcatatattgtataccgaaataaaaaagttgaatattaactttgcttagtatagattcaataaaacaagtatgcacagcttctttagacgttcacacttagaaagattgatacctgaagaatcatggtactctatctagtgtggtatcgcccatccttcggtctaccatagaccaacaatttgttcctcatcacatccatatttggcagtgtaaaaacaatttctgccacaagtggaagttattgtgacaacaaaattgaaaaccaagttgagcctgaaaacaatattcaaccaaaacacaaggagacacctcaacaataacaaaagtgaatccagaaactattaacattaaccttgatctaggtctttcaacaaagtcgggactgcagtaacctgtatcagtccctgcagaaatcataccacttaattctctacatctaatctcaatcaatttcaccgtaaacatcagataaggcaagatataaccacagcaaacaaattcagtagaaaatggaaaataaattcaggtgaagaagaaataccattcttttgagaaagcacagtcctgatgtactactgcaagtacacctacatcacttcttctcagtcaggttcttatccgcaaacgtacgcacagtaaaactttaagaaggttctgaatcagatattcgcaagaacgcaaaaataaagataatttcacgtgaatattcagcttccagcaaatttaaaaggagacataactgaaaccagagagggaaaaaagagtagcaaaaccaaagggcccttttgtttctcattataatttaagttccttacaaactaaaagttgttcaacaactatattaaatgagtacaaaaaactcacaacagaaaagcttgcaggagatcacattggtcacaagaaatcatctccatccatacttttcctatatgaacctatccacacaatcacaaataaccatcctcaatcagaactcctcctccgaaccagaccatgacgatcacttcagtcttaaaaactcatcttgaatagagattactcaattctgtaccaacccaaatcaccaccttgctcacaatagaccatcctagataggaatcttcatatcagaatcaacccaaactcgtgttttcaaagaacaagaaccacaaggaagaacaacagacgccacaaaagcacccaatctcttaacataaacaaaatcaccatctctcaacaaagcaaaccccattgttcctaactcactagaatcaacacaaaagtaatcaccacacctacactgataaaaaagatcaatcacatcaccagtaatctccactgacatatcctcaatactaatctcatcagcagtgattccatcatgtcttgaagatctaagatcattatcataaactacacgtagctctgcatcgcttagaacttcccaagctttttgaatcttcagaaacttctcgtcgtctgagctagaacgagaagtattgttgagcttatctggatgagagtggagaatcgcagaacgatagctatttcggatttcttcatagctagcatcttctttcacggagagaatctcgtagtatgtctcgtgaacacaattctcaccgacaagcatgatttgttgaatcctccttaattcacgacggtgctagggctcaaaattcaccggcgacggcgagaaaattcggaggataaagagaccaagagtttttagtgtgttggtttcttcgtctgaccattcgggttttcgggtcgattcggatcagtctttcttccggatttcgggtaattctgggaagattgggtctatataaaagagaaccgaaattgtttcggttagctcggtttggttatggtattctcggattcgggttggtttttgaaatttgattaaaccccaaggtccccaacctatgattgaacgatattttgattcggtttttttaacccgaattattctataaaccatgaaagtcataaaaccaaacaattcaaaaaaacgtaacattttcaaagttttaaacatataaatctgaaccgaaccgaatttgttattttgagtcgattcagatattttagatccagtatactcaagactaaaatataccgttgaagtataaaatataccgttttgacaattatcaatcttaaaagtaatatcaaaagtgtcacttaaaacattacttttagtatttgtataatttttatgtactatatttccgtacatttttacattattccataaaaaattatctctcatgtttgtaattaaaatatttgtacagtcatatgttatccatcggacatatgattatcatatgtatattgttttgggttttttacgaagacatgttcgaattttagatctgacccggacaaaactgaaacccgaaacaattctaatttgggtatatgctaaccgataattgaaccggatttttcgaatcgggtcgcttaaatcattttgggatcttaaatgtttgggcttgggcctgatttaaaaaaatcaatacttgacccgattacgcaaacccgtttacggaaatacccatcttcaactggttccgtgaagagacgcgcaaaagacgatcgatcaacgttcatttgtgtgaaatctgttaactttttctggggagaattaattttcgtgaagattttgtagaatcgtgatg

SEQ ID NO: 28532 - DNA, 3003 bp, Unknown; identical to SEQ ID NO: 28528
  misc_feature (1)..( 3003): 2750-1469P.txt file - cDNA_ID_2997347; gDNA_ID_1620670; Annot_ID_164078

SEQ ID NO: 28533 - DNA, 3003 bp, Unknown
  misc_feature (1)..( 3003): 2750-1469P.txt file - cDNA_ID_2997358; gDNA_ID_2926149; Annot_ID_197918
tttatatgaaatcatgtggtctagaacttatactagaatatatttcaacattagtccacaacatcaatctgaatataagggtgagtttcaaacttttctttaggcatatattatgttcacatcagataaaaattacattgagtggctcgtgaatacactcaacagagttttttttaacattaaaacatgcatagaattttttcaaataattttctcgtacaaaatatgcaacaaataatgataaacatatttttaaatgcaaaatagttttatataaaatgaaaagaattattacttgcgatagaatctataagccttaatcttttatcattgtgcttataattttgtccaatcaaatttctcaacctttattggtttattatagactcattgcgatcgagtaatttttacttattctagtttttcttataaataaatcattaattattgctatgtgatatattttctttcaaaatattttatgaatcaataattttagtggttaaaaaactatgtgaaagtgaaaataaaaacacatgtagttggctttatgcattcatataatcattttatacgtggtgggaatgagaatacttcaacaagaaaatatgattgtgagtaaacacatttttagtggtaaagtagacgatagatttgtaaatagatgtaaattagatgatgatttgactagtaatttccatgtataatatttttcgaataaggaaaaaacgaatatataaataaacaattctcaaaataaaatattatatatttattttctacttacaataagattttaatatatctttttgttaaatttattttagttttaaaaattaaacatgcatattggatggagtttaatctagttgaatctaaaatttaatagttttacgaaagatttgttattaattttagttttgaaattgagaataaaactaatgaggcatcaatccattaaatatatgtaagaacaaatcttcatatattatataatatgtttggcaaatatatataaagtaactgaaaacaaagtgaaaatttgagaataattgtgggttttttagttttatgtattaaaaaaaatgttgttaatgaaaatccatattattatgatataaaacaaattcattatgaatataaacataacagatatcttctataaaattcattatgatataaaacaaaagattaaaataaaataaacataacaaatatcgcttgtgaaatgagatctatatgactattgggctgaagttgggccttgagaaataagagtgcgccttataatataggcccatttaaagtatgtattggcgaatccacgccgaaagagagagcgaaagggacgatgagcaacagaagaagaaccggagacgatgacaaaggattgctctggaaacttccccaagttaggatcagagacattggaaaagttggtccagcttttggactcggtgtcggttgcggatttggtttcggcgccggtcttatcggaggtaaatttctaatttctcccaattttgatcgcagactcgcgaatcgctcgaagctatttatagatagttttggtttaagagagtagagattggtttgatgaaaacaggtgtaggattcggaccaggagttcctggattacaatttggtcttggatttggagctggttgtggaattggtgtaggttttggctatggtgttggaagaggagctgcttatgatcactctcgttcttattacaacgttggaaaaccatctctgtgagtatttgtctgcaattagatttttagtgattaaggatttgaagaagaagatgatgattttgactttggtgatttgttgacaggaatgaagttgattcactgattgatgaacttgttgttagcacgaagaagcttgtgaaagctactacaaatgaaatcgacaagtggttaaaatgatgaacttttaggatttgttgcagcttccaagtaaatggtagtgtttggtttgttcttagatcaataatgtagatttggggctagtgataatctcctttctttttgtacaattttacgtatggtataaagatggattcgcataatttaggtggctgatttatcattctggtaatgtgtatggtttgagtgctgatttttggtgctatgagttgttctttatggctcaacttggatcaatatggaggttgagtttgagattttctctcagtttaaggaggtagaatagtgcgtatagtggcacagtgagctcagctctagggccaaagggcataaattcattatagctctttcgattctaccgtagtactgtgtgtgaaccggcactgtgaaccaagatgattaaattttcgtattctctatgtacatgatcctgcggctcaatcgcttcagtttcgatccacatgatgtatatgttatagaattgtgggaaactccttgtagaaagagtatgttcacgtctaggactagtcggatgattcgtttctctttttggtgtaatgagtatgttcataactgttgatacaatgtgaaaatctaaccgttgagcttgggagttttacgtctatatgaaaattccggttgtcgtctacattacggtagtaaacaggaccacagtgattccaaatgtcccaaggaatttactgaaaaccccaactaggactgtgaaaggcttgtggatgacatttaacagttgagattttcatgtgtttgagattcttgtaacacattttgctgtataggtgaaagcttagccacacaaaaggagaaacagaggatatggataaaataaattatccaacaaaaaccaatctaaaagccacatcagcatccacaaccaatcagaggacagaatcatatttcacattttcaatccagaccaatcaaaatcctgaacgaatcctactctccaccttataggagcagtttcgtctcttcctccttctttcacttagctcttcctagtgttaaaccagagtaaagcttgaaactttggactaaaagaatg

SEQ ID NO: 28534 - DNA, 3003 bp, Unknown; identical to SEQ ID NO: 28533
  misc_feature (1)..( 3003): 2750-1469P.txt file - cDNA_ID_2997358; gDNA_ID_2926149; Annot_ID_139215

SEQ ID NO: 28535 - DNA, 3003 bp, Unknown; identical to SEQ ID NO: 28533
  misc_feature (1)..( 3003): 2750-1469P.txt file - cDNA_ID_2997358; gDNA_ID_1620659; Annot_ID_47927

SEQ ID NO: 28536 - DNA, 3003 bp, Unknown; identical to SEQ ID NO: 28533
  misc_feature (1)..( 3003): 2750-1469P.txt file - cDNA_ID_2997358; gDNA_ID_1620659; Annot_ID_163753

SEQ ID NO: 28537 - DNA, 3000 bp, Unknown; identical to SEQ ID NO: 4120
  misc_feature (1)..( 3000): 2750-1469P.txt file - cDNA_ID_2997362; gDNA_ID_2926149; Annot_ID_197935

SEQ ID NO: 28538 - DNA, 3000 bp, Unknown; identical to SEQ ID NO: 4120
  misc_feature (1)..( 3000): 2750-1469P.txt file - cDNA_ID_2997362; gDNA_ID_2926149; Annot_ID_139229

SEQ ID NO: 28539 - DNA, 3000 bp, Unknown; identical to SEQ ID NO: 4120
  misc_feature (1)..( 3000): 2750-1469P.txt file - cDNA_ID_2997362; gDNA_ID_1620685; Annot_ID_48438

SEQ ID NO: 28540 - DNA, 3003 bp, Unknown
  misc_feature (1)..( 3003): 2750-1469P.txt file - cDNA_ID_2997362; gDNA_ID_1621141; Annot_ID_172848
catcgaatgcatgcattgacgtttcagatgactgtgtcttttcgataacttaatgaaattgattttttcacaagataatttctaaacctaaacaaatctatcatttttgaattttcgtttaacattaaactcacatctaattacttcacaatacttaatggggttgaccgatatcaagtgttgtttcgaatttctaacttgtgtttatgttttttttttctgtttttaaagtttcagtcattggccaattgtgtttcttccgttgatcagtttgttttcatctcaaataatcaagcctatggcaaggtaatattcaaatctttcatttctacaaagaaaatcagagtattatcaatacatatatccgtttctcaataaatatcatttcacataattaataaagtatataaaaaatatctcgtaaaaagcaattattcttggtattgtatttattatttttatatttgtttagaattggattggaattatgtattttctatggaaattcatattgaaatctaaacaatactagtcattttaaaacagaaaaataatttgaaaggagtagtagcaattaagattgccagtgcactggttattggtattagttaaatattttagaccaccgaccgcatttaaagaagtagttaatatgtataagacaaaataagaaacaattattgaaaacaaaaacaaaaaagaaaagaccattaactctagattcacattgtgacatggtatttaatgaaaagaccattaactctagaccgcgttattgaagatataaggtaaaactacaaaaaatataacaaattgaaggagcctttaaataattaggcaaatgttatatcttgcgttcctgcctccgggcatgatgtgctaaacatttgtctaccaactcttgctttcacttgcattgataaaccaaatacgaccaatttaaacacatgaacctcaaccttaatgttggcctaagagtctcctaattgaatgatccaagattgaagtaatcaaaaaaggcagtacacctatttcaatgacaaggcatttgtatgaaattggttagtatattttttttctagacgagaatatttaaaaacgtaacgtacgcaatatgacgtcaaaagaaacaacgcagcatttatgaaacgatattgtattgttgtgcttggttaaccaagtgacattaatacattaattcgtttttatgtacgtttataagatttcgtttttaaacgcaccaaaaatatataaaaccatctttgcaatgaaggaactgcttactacactgctcgcttgtccaacaaaggttttttaattgatctttcgggaaacttatgattccaatggcggttttatcgaatggtcaccggattttgttgaattcatcatattttgtcaaaacaaaattcagatcttagaaaaatttataacattgatttgtaaaaagtgtataagatagtcctttgggattaccttatcgttcaatggaccataaaaatagctcgtttaggttccattactttccatcggagtaaatacattagtccaaataattcgttttcgtaaatatataagcctaaataattgtgtccaccaatttgtatgttggtgtgttttcacttgcacactggtaaactaaagacaaccaattctaacgcatggatattggggtcgtttagctaagggacaaaatttgataaataatgaacttagagacaattagtttttctatctttgtaaaaagacaaataaagtaaataaatagatatgaagttgaaaaagttcaaaaaaaaaacagcctcagcttttgccttgcgtgatagaacgagttcacggacatgcaacgagcaagagcgagttgacatgcatttaataacggctagactaacttaatcgcacacagatattaacaaattgtctgcttgtataatattgaccttttagtgctttatatatgtgttttcacgtgtacacattctagaatcgtataatatctgtttgtatgttaaaacttctccaatctgaaaaaaaaaacaataattaatagtctagccgttactaatatgcatgttaactcgttcttttttgttgtatgtgtattatttcacatgacaagctttaacctttaaaatgcactcaactcgttccttgcacaaaaagtcaattgaatatacgtattgtcccatacgcaaggcaaaaaagcagagataattattatttttttaaatattttccaacgtcaaatctattttttttgtcaatataccttaaaaagaaaaaaaactaattgtctctaagttaattatttattaaattttgtctcttaacttaacgacccagaaagcctccttggttcaatggttgatcaagggttcattaatacttatatactaagaggtttggagtttgaatcccagctactgcaatttattaatagatttgcagattaattgaggcaagtgtgcaggagatctacaacgatgtacaattatagccgttcgccaggattatacgcagagaagatatttttggtatccatcaagcgcatggagaagaagaatgaggtgtcgtatatcgtggatctaataagggaaagaaattatgcataataaaattgtctatgtaacaactctcgtaatctgtaatagaaaaaaaaaaactaaacgacctagatattcatgcgttaaaattggttgtttttttagttatcaatggaaaacacaccacatcagaattggtggacttgggctaatatatttatgaaaacaaatagtttggggctaatgtattatctaatgggctaattaataaaacttaaacgaactatttctaaggcccattaaacgatagggtaagcccaaatcactatcttacgcccctctttatattcatcgccactgaaactgagaaaagggttagtttcgctgcgctgtttcaagggttttcgtttttatcttttcctccgaagaagaagataagaggttgaagaagaagaagatg

SEQ ID NO: 28541 - DNA, 3000 bp, Unknown; identical to SEQ ID NO: 4120
  misc_feature (1)..( 3000): 2750-1469P.txt file - cDNA_ID_2997362; gDNA_ID_1620685; Annot_ID_164581

SEQ ID NO: 28542 - DNA, 3000 bp, Unknown
  misc_feature (1)..( 3000): 2750-1469P.txt file - cDNA_ID_2997366; gDNA_ID_2926274; Annot_ID_143504
actaaaagagcttcttctcacaaactctaagtcactacacccaaactaaagtattgcacgttcaatacggagtactcatcaatcgttacagagttaaccgaaagaaccaatttcacaactactacatcgcagaggacagccattacatttgttttgtccttacaaattttcagctacacaagcaggaacaataaagctacaactagatccaaagtcaaatagaaattcatttcattcaaagagtcaacccaaacaaatcacagtgatctacatacaaagagaaagaatcaacaatagaaggaagatcgaaagaggaggagagaaagatgtaaaaaggcatacatggtgggagaatcggaaggagtggcggcgagagcagcttctttctcggaagccatgacggcggaggcaggtgagaaatgagatgatagaatcgaaacacggtggctcattaacacaaattaaaccctaaattcgtagacggcacaaacaacttcacccgccaatctctttcttccaaccaatgatatcttgccacgtcatacccttatttttccgttgtctgaacctctttcttctttatgggcttactactagcccaccaaagaccaaacccatttctttattgcctaatcaaaattattgtcttcatccacaattaacccacaaagtactagataatactagtaaacgtctgttcattcactacaaactcttaactaaataagtaaaagccaacaaaataaggaaaaaggagacaagaagtgaaaaaaagtgatggcgagtaggtttggtatcattggattctacatggaccccgttgcatatgcttaatgctcagagttaattatagtcatggataacacaaacacatcattaagacacaaagtagagttgtattatctaagaattaagtaagaaatgctttacagcttacgaaaattagtttataactaaagtgattggtatctaattaaagtcaaatgcatctctcattatagtacagagtactctcttgttataccacaaacagaaagtaaaagtgcgattatgatgtttgaaccatctattcatgttaacgtgacctgaaatatcacatgctctgcttagccttttttgtcactttagtgaggctaggatattaaattcttggaatttaattaagaaaattccttaacattaaagtattataattctagagagacccactctactggtctttaatgataatttgtccaattgttctatttatttgtccaaacatgataaaatgcgtgatgagttattgaattaaacaaccatggaccacgaaaattgataaatatcaacctaactaattgtttaattcattcaatcttaatatgaaaagagatggataaattttagcaaaaacattagtgtataagtgattattatgccatacgaattgatgaaatgaaactgtaacgaaaaaacttgttgctattattgtcattcgaagaagattatgctccaaaaaactgtattcgaatcttagagactccggtcatgataaaaagattcgtgaacttcgactaggaaaaaagaaattaatgtaattcgaaaacaattgtaacttatagtactaattatatactagctatatatgtaactcgtgaatcgtgatgttaacgcatttgatagctcttaggaggaaaactaatttgagtttgacctttcaactaaaaacatagattccaccaaatgtagtactcatgactacacgccaaatgttacagtatctctcaccactctccaagatggtctaatacaataatgtttgtaactttggataagcttttgcatattattgattggttagttaagaaattgagatatcctaattttagtaatggatctaaaaatgtagtattacaggttgtaaaaggattggacacatatatccactgtttttcttgaattttgtatctgattctttttatacattttgttaaaaaattagtatttgtagcttagagtcatataacatgtatctctacattaactctttatcatatattggatttgaaagtttagtttcttagatagtttgcttaagattgagaagaaataataatggttgttaaaggaacataattagatccacacgaaaagctaaactagaaaacacaaaatcaataatgtgaaaaagagaaaaagaagagaaatccagtggagccaaagggtcggtcgggccccgacgacaactcgcgccagagcgtgtggttcaaacaccatgtaacagcgcgtggtcactttttttcatcccagcaaacaaaagacgagaccaggcattgacaacaaattataatcgttttcttctttctctttttgcactctttgggttttctaacgatgatggcgtgaaagaaagagagagagagaacaagcagtgttcaagaagagagagagagaggaacaaaagtgtctcttttttcttctctgcattgcccatttatcctgtcgtctttgacgcttttgtaaaagctaaaaaagaaaaaagatgccaaacgacgacgaagactagagagagatagactaaagaaccagttgtctttattcttcttcttccttcttccttcttcactcttgagattctctgtttcttggtcttgagtttatccgtaagtttgtttgtgtttttcttgagttgattgattctactttcatttctcctgatttttgtcgtatactgtttcatgacatcaatgtttggttacatgagttagaaattctccacttttttaaaaatatatataaaatgtttgttctgtttttttaactgccctttgatgttctgattctttctcatttagtgtaatcgatagtataatgcatttcttgttctgccttaaatcttttcctatgaactagattagagctaatctagtaatcttccttccaattcaaatcatctaatgattttttgatttgctctttgtttattgttgttgaaacagataaagatccggagataaaatg

SEQ ID NO: 28543 - DNA, 3003 bp, Unknown
  misc_feature (1)..( 3003): 2750-1469P.txt file - cDNA_ID_2997385; gDNA_ID_2926274; Annot_ID_143514
cttagtttatggtcatatagatgttttccttatttctctgttcacttcccagacttgtgagtttttattgcatcttgtatatcggccaatttgcctagttgttggaccaacatttgcttgtttatgttgtcctcaagagatttccgctgtgtagattttaaggtctcgttaggttcaatcactttgataagaccgagtatgttcccagtcctgtcagtgattgcagataatctatacagttagcaatcaatgtgctgatttttttcacagccttcttctggattgcagcatcttattggttatttacttggatctgtgcttttccgttttgattttttttttcatgtggaaaaaatgatccttagaagtcggtttcgatgaactaaatgtgattctagcatgctaggtgaatttcctgacaaatgcttgatgatttactcattgtccactcttcttagtattgcctgtttatttcattttgcagctttaatcataaaactggggcagaagacgttcacttcactcatgaatccgattctgaagctgatgaatctgacaacgatgatgctgcaaatgagaccactgatgaagacgagccttccagtaaaatttcttcctcgcctgagcagtcttttgaggaagttcctggtgaaaacactgatgacgaagccaaagaagaagaagaagaagaagaagaagaagaagaaggagaagaagaagaagaaggagaagaggaagaagaaaactcttcaatgctgcaaaatgatcaatccggtctaaaaatgattatggtgaaggatgtctcagctggagctgaggtatgtatgatttttcatttggttttcaagttagaattatatgtcatttgcattgatgccatgattttctgtgtaggtattcaatacatacggtttgatgggtaatgctgcattactccacaggtacggatttacagagctcgataatccatatgacatagtaaacatagatctagaattagtaaccgaatggagcacatcctcattcacaagccggtacactcgagctagactggccttgtggagaaaactaggttacacaggatgcgagagtcaaaactcagaatactttgaggtatcttcaaccggagaaccccaaaccgagctcctgatcctactctatatactgctcttaccagacgacacatacaataaactggatctagctgaatcaacaacaggagcttctccctcgaaagaaggaaaaagatcttcttcttacgagataacaattgggaaacacaagtttgtgtatggagaaagcggaaatgatattcttctgacagatggtgtttgtgaagctcttctaactattgtggataagcgagagagtttatatggatcattgagctcattggaagatgacattgttagggtgaagacttgttgtcttccgagagacaggagactatatcattcgcttgtgttgcgtgtgagtgagaggaagattctaaagaagcttaggagctacatccatacccagaccaatgagtcttccagcggaaagcgccggaagaagatggttccaaaatcctagcaacatctttagtttgcttgttgaattttcacttttcatccccaagttaccatttttaaacgacttgttctactaacattgagtttcatctataatggtgatcgaatcttagcagatttgatcgattcttttttgttctatttatagaaattcttgaggtttaaaaataaaagaaagaaaggattttatatcgtgagtagtatattgagtaatcttcagacggaagcaaagaaagcgtgacaaaaagccggcgactgtcagacaggtagaactgtaaatatggagaaagatggggttactttaacaaaggtagacacgtggcacgtgggaattaaaggatattacagactttacacagaattacacagagataagacaagttcttttttaagcttttttttttttaacagtcaaaaagactcaatagagtgtaacggagagattcttctaccagagttgctctcttttggttcgttttcttcctccaaaatccaatcttaccacagtttctttagggtttcttcttcgtcttcctttggatctatgtgaacaggtatgtaactgattgagctgctctttctgattaaccaagtaaattgttctcttgaatcttatcattttattttgtttcatttttcttgttggatttagatccttggatcaaatttgctcaaatgttgtggtaaagtctgtgcctttgattgtatttcggatattttctgtgtgttttactctgatattgattaggatttgtgtatttcgtattttttttttccattgaagcgttttctgtgatctggtttttgatcgatcttattcctcttgattaaccgaacgaaagatgttttgatttctgtagatctcttgcattgtactttcttcattgttcttaattcgattttctctccattgctggatcgcctgatggctcatttagagtttttttttctagctcaaatgtggttgaactatagagtttctgagttcattatttggtcattttttaattgagttggcttgattaaagaagaatttatttgttaatcagctagattagatttgaagattgtagtagattagtatgatgtgaatgttctaatctgggaataaagggtctagtgttgagggaaacatgagatttttcataattgggtgaaatatgtgttgtaaagtttggtcttttatttgcttaattatgacttgtggttccattgactcttgtagtatgaactaagctctgaggtaagcttgggaagtagggatatggccaaaatctctttggtttaccaacttagcaaaaaagttagcaggagttggtgatcagttctcctaccggcttttgcaggctaataactaatacctgactgtaaaatcttccaaggtttcaaccacacagggaccttgtttctcttgttattgtaaaggatg

SEQ ID NO: 28544 - DNA, 3000 bp, Unknown
  misc_feature (1)..( 3000): 2750-1469P.txt file - cDNA_ID_2997396; gDNA_ID_2926274; Annot_ID_143518
atgatataaatgcttatgaatatgttatctatgattgatctacgtgcattgtattagtatgaatcagtcaaacttcattatttatgaaagcaattctctttttgaacacttttgtaaaactaattaatatacttgttttcttttacttccttagctttttcgtgaaaaacaatatatatatgcatatatcttatttgagcttaatctttgaccatcaaatcatcaatagtttgtgttacgatactttgaacagtttcctaataattatttggtattattcactacagaattgactctctaacaaaaccgaaacaatcaaaattggattgttaatttcagttactttcactttggtttgaatgtaacaaacgagagcatgcaaatatatatcacgctgtacgttgccgattattatttggcacaaagatttttctagctgctggaaaaaagggttgtatatattttaggctttttagccaatacgatcaatgttcacatatataaattctcatcaaaatataaactgtaacgtgaacgtacaacattgtgaacctttacttgaatgaatcaatttatacgattgttactatatcttttagcggaggaagagacaaacgaaagagagctgcagaagcaaaagaggcccatttcgcttttcacatcccataattccaaagtattggccggtggaatctaaactttattttatgtttctcttcattttttatccatatcttttgcacgcctttaaatcttcaatttatataaatttacacgggaaaatcgtgttaacataaacgataaattctataaaaataatataaagtaggagaatgacacagagaaaagtaagagaaactcaacccaatagagtctacagtctagttcagtttaggtttgatttatttttttaactatgttttttttctgtttaaaatatatagaaatcaaattagtatctatttccaggttcctcgacattagaaggaacataaagcacattgatggcagaggatcggatttatagttttgaaccttctttcataccctccagatagcatggtctttcaacatattattatggagggtgattgtaaagaactgcataatattttaatacaaagaagtgtactcgagtattcttcatgttctatataaattttctctttgatgtataaaatttgctcaaggattatgtagaacagtatcatataggcttgtttttatagatgaagaaggtccgatatacattaaaatgaaaggaaaaaaaaagtaaagagaagacaatgaaatgtagcatattgtttgatagttttgttgttgtatcaaacactctgttcaaattcgaataatacatgttaaaaaatccaagaaataataataatgtaagcatgtttaacattttatgtgagagttcatactgaatactttcgatgtgagcatgtttaacattttatgaattatggaataagagtcggttgtatatataatgtaagtggtaaattcaaccacgaagccattaacaagaaaaacttgagtccaaaaagtgagtgggtagagagatgaattagcaaatgctggaatgtgattagatgcccatttggaattgtttgcctctttgtttccatttctagttggtaaccaaaaacgcacccacattcttcatcccactttatccttattgtctatctaatttttttcctaatcaaatctataatcacaattatataatcgagaatttagcatctccatatatgtacccatgttttattcccatgggaccgggtcagttcatttcgtgtgtcaattaatatagttcagatttatatgcatgtgatccatgggtttggaagcataaaatctcaaatctaaaaagccagaatatattcgaatcgatcatatatgtcgaagcatttggaacagttatctatagatgacgtctaaatggatttttttatatatatttactggtaaattaaatagatttgaagatgagtttcacaaaaatcttccctaactttatcaagaagtatccaatagtctcacataaagtgatattaatgcatattctagaggaggtaatggatcatgcccaacttgatttttttttaattattaaataatgaagcacttgcaacatattttcataagaaaaacatatcgcaataattaatctctgagatttgctgatctttttaatttattgggttctctgttgctatgtattgcatcagcattcacaggaaatattttaattaggatcacattcctatggatatggttactcaccaacaaaaacaaatccactctcgtaattaagcagtttttgcaacaaattacagacattatttcatctgcgggtcccacaaacaacgtaagcctaggtcccactttatttctgctgccacttgtaagtcactccgtccacttgttttttctttcttctttgctttccctacaaatccaaatcattcgtcacacttataacgatagagttggaattgattttggaatttgtgtgttcactgttcgtcatttacgtgtgcatttttatttccatttccgtcggtttaattttgacttttgatcatatgtatatattgaaacaaatgttaattaaatttgtatatgtacacaattgatatggatttaacaactagtactatatagttatggtgttatgtattgtcctgatttgatctgatttttctgctgttgatttggtgtaagccgaaaaaataaaaatgccaacgtcactaaaaaggaaagaaataaatggagtaattaattattttcaggaaaaaaaaacaaaagctcattcgaactcatgatccggaatatgatgctctatataaatagaaagaacctctctcaccaatttgttcgtaggaagagcacaagcctccacaagtggtgttgcccctctgttcctaactcctttctcttatataaaattgtgtatcctccatacatacaacaaagagagaaacttttgatatg

SEQ ID NO: 28545 - DNA, 3000 bp, Unknown; identical to SEQ ID NO: 28544
  misc_feature (1)..( 3000): 2750-1469P.txt file - cDNA_ID_2997396; gDNA_ID_2926274; Annot_ID_205266

SEQ ID NO: 28546 - DNA, 3003 bp, Unknown
  misc_feature (1)..( 3003): 2750-1469P.txt file - cDNA_ID_2997408; gDNA_ID_2926275; Annot_ID_143527
ttttatgccaatcaccatcaaaactacaacttgggatcttgtatgcagccttagctctagtgatcactggaacagctgggacgcggttcatcttggcatccgcaggtgcaaaccaatataagaaacctaaagaacaaggaaggttcttcaactggtactttttcacactatatggtggagcgattactggcacgacagcaattgtatatgcacaggacaatgctagctggaagcttggattcggtctctgcgtcgctgctaacttgatcagtttcatcattttcgtcgctgggaagagactctacgagcatgaccaacctttgggaagtccttatacaagtctagttcgcgttttagtcgctgctacaatgaaacgaaaggctgtgatttcatacaaagacgaagactatcatcaccgcgagctcgaaaaagagaccaagacttatgttgcaatgccctccaagagcttcaggtgaaaacaaaaagctttcctgattcatggaacttaaaaagagagctaataaagagggatttttattatgcaggttcttgaaccgtgcagcattgaagacagaaggagactcaaataataacatgtggaggctatgctctgttcaggaagtagaagatttcaaagccgttctccgacttgtccctctctggacatctgtcatgttcctcagcgctcccctagcggtgcaaatgagcatgactgtcctccaagctatggtcatggaccgtaaacttggcccacacttcaaagtctctgctgggtctatgcaagtcatagcactcgtctctggatgcgtctttatcatacttaacaactggactacctatcccatgtatcagaagctaatccgcaaaccgctgacaccgctacaaaaagtcgggatcggccacgttttgacaatcttaagcatggcgatatcagccgttgttgaagcaaagaggctgaaaacagttgaaaatagccatctcatgtcagtgctatggctggttcctgctctcgtgattaatggaataggtgaggcctttcattttccagcaaatattgcaatattctatggagaattccctgagtctctaaggaacacagcgacttcattgacctcggtggtgatgggaatctctttctatctgagcacagctcttatcgatgtgatccagaggaccaccaagtggttaccaaatgacataaaccacggaagggttgacaatgtttacttggtattagtcattataggagtctctaatttcggctacttccttgtctgctcttggttttacaaatacagaaacctcaagaatgatgatcatgaacaagatcttaaagatgttacaaactaggacactaacgtgttctgtcctcgttttctctatattgtagttgtgtcttcatgcaactaacttatgtgctacatgcaaactcactgtttgccgtttgtgtttacttttaccaataaatgttatttgtatcaaactcatacctcaaattattagtatcctagctccaatggaccgattagagctcatgagctgttagctagcttttttaaggattcttcacctcctttatattaaccaaaaaaaacatgcaatgtcaattcctacttaaattacataataaactaaagctataattataatccaaaccgatatataatctcgtttaattacaaaatctaaaccctaattcttctttgtaaacccaaaccgccatttaaactcatctaatcgtaaaaaaactaaatcctaatcgtaatttctaaacctaaaccgacatttaacctcgtttaattgtaaaatctaaatctgtttataaacctaaaccaatatttaacccgtttaatcataaaactaaaccctaatcgtactttctaaacccaaaccttttgaaataaactcaaaccgacatttaacctcgtttaaccctaggggtgaacccaagtatttttcatcattaatcaacataactaaaagggccaagagataattagtattgtacttaatcttaatcatctaacatagatattccacattggttgtgtgaacaaaatctaacaacatatatacaccaacatacggcaaatggtttgtcccgtcgaggacatctgataagattggaacgatacaaagaagatctgcaaggatcacactcacaaatcaagaaatggtccaaattgttttgctcttttttgtttctagaaaaagaaagtgtgtcatttacaatcttgaaagattcaagcaaaatcaattaatacaaacgatggtttggagaaaacttaacaccataaatcactttgaattttgtatgtcttataagaaagatgtaagatttggcttgagaatatataaacaatataattagagatatcttgggaagcaaggcgtttatcttgcgaaccaaatatagggtactatgaaatgaagcccgtgaaacccgagagaagaaaatcttaatatatgacagcgttggtagcatggtctcgtgatttgttgtttgacatgaatatttggcttcagaagatttgacttttgggaacgaaaacagagtttcaaacgtgagaatggtgcttagattttttttaaaacattttttgggcaataagaaaaatatttatgcatctgctgatacaaacgattttgacacaatattcgatcgtgcgttttttatttctttattaacattattcaaagtttctttttagaatatttttctgatgattatgaatactacgtactattgaagatttggtcaaataattttattgttttctataactgtcaccaacggtagatggactgtcagaatctgattaggtctttttgggaccaaacaagattagtaccaaatcactgcacctacataataattgttatggatttgcttatatatatagtttcaagtcttttatctaactccattataacacacaaacacaagtcaactttgcattataactccatttgccctcctggttcatcttgttctctaccatg

SEQ ID NO: 28547 - DNA, 3000 bp, Unknown; identical to SEQ ID NO: 16870
  misc_feature (1)..( 3000): 2750-1469P.txt file - cDNA_ID_2997423; gDNA_ID_2926275; Annot_ID_143533

SEQ ID NO: 28548 - DNA, 3003 bp, Unknown
  misc_feature (1)..( 3003): 2750-1469P.txt file - cDNA_ID_2997427; gDNA_ID_2926275; Annot_ID_143534
gcaattaaaaaatatttagttattcaatctgagacgtatcggcgctatgccattgctagtctatatttgttacaccgttaaactagttacacattgctttttagaatatgcaaatgatcaaatgcatggttgtttaaggttggatttttatttttttatccaaagtttaaggttgtatttgtgcccatgatttgatagcataccaaatcgattgggttaacaactgctatatattcttgcaatatattttgtttatgcatcgtaatgtatagggaagttatctgctaattaataattagagtgatttttggaaaacaaaatagagacagaattaataaaaccattttaaagagagaaagttttgacaaaaaaaaagcgagagaaagttttgataaatcaaccaaaaatgcatataacaatgacatgtgattgctttttaatttgtttgtgatttctgtaccgatctccatgttcgatttcatcactaaatcggataaaagtgtatgttcttctttaatgtttttgcatgaaatatcttgcaatgcataaagactgagatttctaccattacaaaagtggaaagagaacatctatgtaatattgggtctctgcatttgcatttgggaacggttttggcgttttcaaatgacaactcactcccacttatagtcactgacacacacagaaacttttaaaagaacaaccatcactccacacacttatgtgttcttcaaatgttttatttatcatttacttcaattatacgcacaagttacaacaagcaagtttttttgtgcaatattctcttttataatcctgtttgtcctataccaaaacctagattaatcactgtcaaaccaacatcataaaattgttggttaagtcatataaaccattcgtttccaataagtgccatagaaattgaatattgagcatagtcagaatatatatttatgtttggtctggttttgtttgacaaagagagtatattcaggtttataatctaattatcaagacagagttatacagaagatagataaacgatactagtgttacgtttctatacaatcttttgaaagtaaacaaaagaagccatgtggaatcaaaaacattcgaagcatgggaagatcaaataatccagtgatggagctagaacggaactaaatcaatcatgaaacctaaatagttttttaatctttctagaatctcttcttatcaaaaaatttccttatttgtataaaaagcctcgggaaagttaacttctcatcccaaactcattcctcagtttatctctcgactagagagtgaaggaaaaatcgaaggataatctgtttcttccagcacaagttaacttgcaaggtagttttctcccttcgatttatactgtcttgctcactttcttaggctatttttaggacgattcatttttttaatttgtatgttattcatctttttagggttcttgtcacattttcggccttaatttgtatgtgtaaaaatataaatagtgaagtagatatcattttatatcgtctagcactctagctactagcttgatctgaaactagtatatatataaattatttgaatgtcagcttttttttgtgaaagtcacacatcacatggtagttgcatatttcaagaactcaactgaattcgatttaaaatttctccaatcataattcataaagatatgtatttcaatttttttaaataaaaatagattttcctatttaccatgaaattttttactctttttatttgttctcatataaatagagtgataaactattttacaaagttcatttatgtggaaattgataaaatgacaagaacatgaaaaaaagacaaagatttttagttgaaatctgtgatcgatcgaacagaatcggttcagctactgtttttgtaatagaacaactgtccatttttataccaaaatgactaaaccacccttagaagatgcatgtgttgtgtggtactaaaaactcaaaaaagcattgaaactttacacctttgtgtcgttttctcaattttacccccgcttcatttggaattgtcactctcaaaattggcgtattttccagttcatatcttcattcatctatggccccataaaccataactctttgaaccatatttaataatgttacctgcatgcatatacattcatataaaacatgtattcattatcatgttagatatgtctagtctattatttcccaaaagaaagacacctaagagagcaagattcttgttattcatgataacatttttgaagattcaaaaaaaatgagtgattgatgaattatttatggtcagcatctagtaaaatcatatcgacatatccagtcagccttagtagaaatgcaccaaagtgatatagagtggatttctctcgatccgtgtagaaatggaccaccacattgtctgtttagaatattatatttttttgtataaaattgtagacataatctcttattaataaatatttaatgcaagttagttatttttaattttatgaaaagaggttaactccaatatgtaccatactacttgaagaagttaaatgacaaaaaaaaatataagtaatactaccatttccatatattgtactgatatttcaaactttaatcaactttcctttctatttctccttctttttttatggtcaaacccattctgtttatgactaaacatatgacatatctaaccgttattaattagttcacatatcacatatttgtatagtgttttcattttcagtaatcaaaccatccatctaccacaaaagaacttggtcatgtgtccatttttagaaatcaataaaatattataccatatatttatagtatctaactttaagagaataaatatttttatttgccgattcatatacacacacatgcgtgtggtatctatgtctatccattaaactaattatatataaacttattttctggccacaatttttgtttcgtgtatagagagagctcaaagatg

SEQ ID NO: 28549 - DNA, 3003 bp, Unknown; identical to SEQ ID NO: 28548
  misc_feature (1)..( 3003): 2750-1469P.txt file - cDNA_ID_2997427; gDNA_ID_2926275; Annot_ID_205307

SEQ ID NO: 28550 - DNA, 1826 bp, Unknown
  misc_feature (1)..( 1826): 2750-1469P.txt file - cDNA_ID_2997435; gDNA_ID_2926276; Annot_ID_143536
aagctttacatgttgaaacttacaatatttcgagatgagctaatttttggagctctggtgacaaagtcccggagagattcatattcatcagcaggctgcttggcaataaaaggaaggatcagggaaggaatatctggtcatgtaagcaactgttccgagaaaagagaaaaaaaaaagacaactgaaccagcttctcccaaaagtaaagccttttagttaactccagcatatatacaagcagactaacagcgaaagcaagaaggtacataagaagaaaaaaaagaagcaaattcatacagttctcggacatgcaggtagtcgtcagtaccaatctcattaaagcagataactccagtccaatttgatctgcaagggtcgcctctattccagtttctcaaataatctttagggtcaagtagacttcttttaacagatcgtaaagcagtgacttctgaagggtgggttctttgagcatcggcaagcagaaggacgcaacaacaggcaacaaggagcgcatgtagatagagtctttgagggaacaccatggtgcctttggaaagcgtaacagcgtaagaagcagataaatatagactgagaccaaatatccaagcgcacaaggagctcgtatttaagacagaaatagacacagcaggtctaaaattcaaccccacgcaattcaatagctcaaagacaagatcattacctcactattgagatcagcaatactagtactagttccctaagagaattttccaaaaaggcaagcggataagagaaagcttctgggatggcaaaatccctgaaacgggcgagagaagtcaaaatatgcagacggcaatgcagatcaaatcaaaacatcgggaaaatgatgcaattaatcgagagagaaaaggggggaagaaatgaccttgatgggtgtttgctaggtttgatcttgacttgtctgccattttaaaaagcttaaaccttcttccgtggtcataattcggaactgggttgactctacctacctgctccacaagtaccctcgtgtgtgtgagcctttttgaccaatagtaaagtagaaagtagaaagaaagaaacccctttagccattagcctgcatttattagtatcagcaacccaacattgacggcgtttcgagacgcgctcttgtccctttcttctcatgtcagtcaacttctttctttcttctcagtcagagtctcagagagagagagagatattttattcctccccaatggctgggggctgtagtcacgcatgttattttagtaggcttgcattaaagcccatttaggttataaggcccataatgtatttaataggctgcccatttagagaagactgtcgtcgcttcctttaagtcaaccaaccctttggattaaatccacaatgcaattcgtccaactaaaaaactctcaaccgttgatttgattcacacacagacgagacaagacaattccgtcccctctctctctctctttccgcagctcgccggatctcctttgtcttcttcccctgggttccgtttagctcaatccctttttaggaaagactccgtggctcgatcctagtcttggcgatcgcctctaccctttttgactctattcttcttcttcttcattcatttcccctcttattcattgcctttagggtttcttacacgatatgagctaaatacgattttgatttcaccctaagctttcttctattgcttctcgtcgttgcaggtactctttttttttgttttttggaaaacgcgttttctttccaccactgttagctaatcatcttcatatatgcttttagggttttcttaaatg

SEQ ID NO: 28551 - DNA, 3000 bp, Unknown
  misc_feature (1)..( 3000): 2750-1469P.txt file - cDNA_ID_2997443; gDNA_ID_2926276; Annot_ID_143539
acaatgaatgcgtcctctcttcaaagataacacacacattcaatacgtgaagtgaaattcaataactcaataagtatcaataaaaattttcttctatgttttcatttacatttaacaagtttgataaatgaatggtattagccgtataggcttccataatgaccacaatttggtccattcttaaggataaaggtagaaagtgatgctttgtctttggttctaacccaacccaaatctccaacgttttccttgtctttgcgtgtgtattacgatcgagtggtcacaacacgattttttaatatgaactgtagcttcataattatctttatttatctcgaatttcatagatttttttaaaaaaatttacttgtgaaaatagtttcaacctatactttttgcttagaaactaggagaagattttaacattttcaaaatccctaaacttttcttcttgattgcataatttatactatatgtttgccaaaaatttctcatttttcttgttttttccaattctataacttcttttcaaatatataagatatagccatagttgaattatggaatttttcaagtaacgtaatgtcgtgattaaataggaatatgtagatgttgtcgagcatttcaaacaaagataatgttttgtcctttgttctctatcagttgtcgtattgcacgtcgttgtttcccttacaaaacaaccctaaaaataaggtcaaaactcaaaactgttccaccttttgtataacaaacgcaacacgatgacaaaagtatctatttaataatacttgaacgacttaagtatcatgattttgtcattgcgtctataatcataccgagagtttgagttttacacaatactaaagtgatagttaattaatcatatataaaagaatattatctactctacgtactcataatattcttacaaatatttcatcaactttcaatttctccttacgctataatgctatatcattatttttaacaagaacattactttcaacttacactacccaatatccttaatcaaaaagttctccaaaaaacatatcccatttctttgagctatataaaccatgttatttttatatttatttgtttacttcccaactgcactacaaaagtttagagattatgataattacaaaataagaactattgaaaattttcaaatacgaactagaaaagtctaattaccacggaccacggtgcataacgttcattgatggaccgaagcaaaccagttggttcttcataagttcttacttattgcttacgtttgattacatcatttcattggactatcatccatgggcctaataaaacttcattatgggccatctagtgcaaacccgtttggaaaaagtactttacggtgagatcaaaatcgctcttctcatattattgtacgtacaccaagctaagctaacataatattttatcaagaatcttttttctttatccttttatcccttgaaataatatcttcaagcgtgatccaataaaatctcacaacaaaaaccgaaacacgtatacaaaagatacatttcaagacttaatccattagctgttctttccggcttttcggaatttgactccatcaaaaatgagaaaccaaaatacaattcaaaacgagaaagcaaataaaatgtgacatgtgatatatgcatgtgatatcccaagagcttggcgataaatacaactcagttagctacattatgatattatcagggactagtgtccaaactatatattattaaaaatttgatttataccaccaatcccccgatcccatcgagagatttaatttgatcagacaataatcgtgtattcattctcttatattattgcactaagagctcacatgagctgctagctgtatatcaattagaatctacttgattattgttaaaaaattaggagcaagagatcaaatcttatatatctataactagtcgtagtagatggagttttgggaagtgacccggtaactaatagtatggagaacgaggtgggatggatgaatgaagcgtcgaaggatagcagcaacaatggtgaatctttcattgaaatacaaatcaacaaagcagtcagaaccacaggattgagcatctcttcttcgccatctcccgagaacgaaatgcagacgacgacagcaatcttctcatcggccactagttgcttctcagcatacagcagcgtgacgaggttgatgatgaaagtggggtgtttgagtatagtgggagtcataagagagaaagtaaacgtgggagagaggtgggtcctccaagttatacagagacgacgaaacaagagccccctacgatactactacgaaggcagcatgagtaataataaggatgaagcattaacggacgattccctcaaggcagctatcgcttactgcaatgcctcatctctctcccctctacaaacttgattattattattataataccttttctacagaatcatgttggaaccaaccaatatttgttgatgtgtccaaatcctagggcatcatcaactatatcattgtttttttttctttttatctttttgcttttatttccgtttaagaatatattttatagttgtgatcctcattatcccaaatcccaagtcaggtcaaacatagttttgaggcttggtcagctgatatttttacaagtttgttgtaaaaacttgtaaacttgagtattttaattaaatgaaaataaaccataaataaatgaagttctaaacttgagtaataataaaaacagaataaaaaaaaaggtatgtggggaagttttgaaggggcttttgggcttagaaaaggaaagaagtaaaggaagaagcggcgcacgtggcaggcagtcacgagagtcacgagagatcgagagaagtctttgattctcttctctcatcaaatcaaaatatcatctcagagactccgattctctctgtttctcctccacttttcaacccaagtccaccctcaaaattctcagaatg

SEQ ID NO: 28552 - DNA, 3000 bp, Unknown
  misc_feature (1)..( 3000): 2750-1469P.txt file - cDNA_ID_2997443; gDNA_ID_2926276; Annot_ID_205316
cattcaatacgtgaagtgaaattcaataactcaataagtatcaataaaaattttcttctatgttttcatttacatttaacaagtttgataaatgaatggtattagccgtataggcttccataatgaccacaatttggtccattcttaaggataaaggtagaaagtgatgctttgtctttggttctaacccaacccaaatctccaacgttttccttgtctttgcgtgtgtattacgatcgagtggtcacaacacgattttttaatatgaactgtagcttcataattatctttatttatctcgaatttcatagatttttttaaaaaaatttacttgtgaaaatagtttcaacctatactttttgcttagaaactaggagaagattttaacattttcaaaatccctaaacttttcttcttgattgcataatttatactatatgtttgccaaaaatttctcatttttcttgttttttccaattctataacttcttttcaaatatataagatatagccatagttgaattatggaatttttcaagtaacgtaatgtcgtgattaaataggaatatgtagatgttgtcgagcatttcaaacaaagataatgttttgtcctttgttctctatcagttgtcgtattgcacgtcgttgtttcccttacaaaacaaccctaaaaataaggtcaaaactcaaaactgttccaccttttgtataacaaacgcaacacgatgacaaaagtatctatttaataatacttgaacgacttaagtatcatgattttgtcattgcgtctataatcataccgagagtttgagttttacacaatactaaagtgatagttaattaatcatatataaaagaatattatctactctacgtactcataatattcttacaaatatttcatcaactttcaatttctccttacgctataatgctatatcattatttttaacaagaacattactttcaacttacactacccaatatccttaatcaaaaagttctccaaaaaacatatcccatttctttgagctatataaaccatgttatttttatatttatttgtttacttcccaactgcactacaaaagtttagagattatgataattacaaaataagaactattgaaaattttcaaatacgaactagaaaagtctaattaccacggaccacggtgcataacgttcattgatggaccgaagcaaaccagttggttcttcataagttcttacttattgcttacgtttgattacatcatttcattggactatcatccatgggcctaataaaacttcattatgggccatctagtgcaaacccgtttggaaaaagtactttacggtgagatcaaaatcgctcttctcatattattgtacgtacaccaagctaagctaacataatattttatcaagaatcttttttctttatccttttatcccttgaaataatatcttcaagcgtgatccaataaaatctcacaacaaaaaccgaaacacgtatacaaaagatacatttcaagacttaatccattagctgttctttccggcttttcggaatttgactccatcaaaaatgagaaaccaaaatacaattcaaaacgagaaagcaaataaaatgtgacatgtgatatatgcatgtgatatcccaagagcttggcgataaatacaactcagttagctacattatgatattatcagggactagtgtccaaactatatattattaaaaatttgatttataccaccaatcccccgatcccatcgagagatttaatttgatcagacaataatcgtgtattcattctcttatattattgcactaagagctcacatgagctgctagctgtatatcaattagaatctacttgattattgttaaaaaattaggagcaagagatcaaatcttatatatctataactagtcgtagtagatggagttttgggaagtgacccggtaactaatagtatggagaacgaggtgggatggatgaatgaagcgtcgaaggatagcagcaacaatggtgaatctttcattgaaatacaaatcaacaaagcagtcagaaccacaggattgagcatctcttcttcgccatctcccgagaacgaaatgcagacgacgacagcaatcttctcatcggccactagttgcttctcagcatacagcagcgtgacgaggttgatgatgaaagtggggtgtttgagtatagtgggagtcataagagagaaagtaaacgtgggagagaggtgggtcctccaagttatacagagacgacgaaacaagagccccctacgatactactacgaaggcagcatgagtaataataaggatgaagcattaacggacgattccctcaaggcagctatcgcttactgcaatgcctcatctctctcccctctacaaacttgattattattattataataccttttctacagaatcatgttggaaccaaccaatatttgttgatgtgtccaaatcctagggcatcatcaactatatcattgtttttttttctttttatctttttgcttttatttccgtttaagaatatattttatagttgtgatcctcattatcccaaatcccaagtcaggtcaaacatagttttgaggcttggtcagctgatatttttacaagtttgttgtaaaaacttgtaaacttgagtattttaattaaatgaaaataaaccataaataaatgaagttctaaacttgagtaataataaaaacagaataaaaaaaaaggtatgtggggaagttttgaaggggcttttgggcttagaaaaggaaagaagtaaaggaagaagcggcgcacgtggcaggcagtcacgagagtcacgagagatcgagagaagtctttgattctcttctctcatcaaatcaaaatatcatctcagagactccgattctctctgtttctcctccacttttcaacccaagtccaccctcaaaattctcagaatgattgctcggatccttgccgccttagccgattccatg

SEQ ID NO: 28553 - DNA, 3000 bp, Unknown
  misc_feature (1)..( 3000): 2750-1469P.txt file - cDNA_ID_2997447; gDNA_ID_2926276; Annot_ID_143542
attatggaaatagaaaccatatttcatggtaccaatactatattttggcacatggaaagataattccaactcacttcttaaagtataaatcacatcagtcattcgatgctttttttcttcttcttttaaattgaaccgatatataggatttatttgtgctctcgtaaatcaaattaagtagtttgcaataaattagattaaaaaatggtcatatcataacataaatgacaaatccacaccacatgttgacgactatattatgttatgttccatcaaatacaacttagcatctaggtgaaaagctaacagagatttagattaaaatctagaagaacaattgttcttgttactttaaaacattggccaaaattacttccaaccataattagctacatgtttaactaactatacagaaaacaaaacatgatttagcacacaacaaaaagataatgcataatatgattcacacagagataaggtttagaccctaattttgattgtattactcttttctttggtgtaatacaagaaaaactatttgggtctaaagggttgttattatttatttctcataaaaactaaaatgaagagaagtaatttggtcatgtcataaatggagtacataaataaaactgacaacaaatactatttgggataatatttttccataaaatggttatttctcattttttttaaaaacaaaatatttagggcccatattagggggtagtagtacagagaatcaactgtgatgacgtcacctgttaggttgcgtgactcctgggcgctgtttctgtattacgctatcttcccaatgctctctctttttttttttcatctactggtttatataattcatgttcttgaaagtttcaatactagcttttaaaaatttaggcttgattttacatgtttgagaaattatttagttcagtaagataaacagtaaacaatagcaccagtggtctagtggcatgatagtaccctgccacggtacatacccgggttcaattcccggctggtgcatattcttttaattttatttcaaagattagaaaacgttttgggccgttgggtctaaaaataaggagcccaatagatttttatggtttgtgtgcaaaaggagcccaatataaataaaattatattcttcacgtttttttgaattgaagatatcgcaattttttttttgctcatgtatagatccaagattttaatttagcgggactcataagcacaattaatctctacgaatgttgtagaaaattgaaacggtaccatcactcgcctcgaaatttctcccattgggctttattgctctgtaaccattaagatattcggttctgcatattttttccacgatatagattttaataattctcaaaatcttgatgaatgagatggagtgaataaaaacttgagtctagtaaattgagcaacattacaaatttaggatcacgaaagatccttgtattagaatctcgagacgagaataaggaaacgtgtcatagttagcagcttaaccgacgtatcttccgcatcaaaccaagttcccaaacaaatatgttcacattttcattacaattaaaacccttttaacaaaaaaacaagtttttgattgttattcaaaactatgtgtcaaatctaaatcttaaatcattttttccagtcctctagtagacctaagatcaaaacctgaattttatggaaaggcgagtagaagtggagatgatcggcccactccagattttcaaactaatctttcacatctcgaaaccttaaaaatatgataacaaaataaagttggacaaagaaaagaaaaaagtgtttggcatttaataaaacgtctcattcattgcgaagagattagatagtagagaggtcaaattcaatgtcgcagccgacaatagataagaagagataaggtcttcgttatatttttttgtttgttttttaactgtcacgtgaaactgatatccacaaagagcgaatgagagacgtagaagagtcaaagattaaaaacccaacgaactttgactcatcctttgaaggtgttcgttaattatccattttttggtctgactcgtggcatgtggcaactaccgaccttagataagcctggtcctactctcgtattcgatcaccacgtgtcgatcggcttatccgacacctcgagtgggagttgtatgttagtaactagataacggtcataggtacgattatgacattgacatgaaatcatattccaactatcaacgttagtgtccttgtttttatcccctgtaattcagtcaattaagccatcgtaccaggtgagtctttgatattgttgttgtctacgaaaaaccattagatgatctctaattgatatttgattcaacctatggtaaaattatcccaaaactcaaatattacttcaattgatatcatcccaaatattacctagagaggatcaagctttttaatcgtcaattttggttatacaaaacgataaaaaaaaaattgtaagccaaaaataaaaagtaaaacgaaattgtgaatttttaataattcttttgcataatacacaaaagaaaaaaaactcatactccacatgtcaagtgatgacacaataaatgtctaaatttttacaatcaaaaacaaaaaaatgtataaaaaattcgtgtaaccttttttttttgttgtctaaaaaaatgacatgattttggtaaatagccaacaaatttgtagtagagtagtaaagttaggtttcatcatccatctctataaattctcaagaccgacctatacattttacttcccctttcctctcccaaatattttcacaattctctctataacttcacccttcgtataaaccgatacatacacccacacccacatatatatatatatatatctctccgtatttacacatacgtatatagacacatacatcatacatatacgtataatagctgaaagagtgtttttttttagagcgagcgacgaattccaatg

SEQ ID NO: 28554 - DNA, 3003 bp, Unknown
  misc_feature (1)..( 3003): 2750-1469P.txt file - cDNA_ID_2997449; gDNA_ID_2926276; Annot_ID_143543
gcgcattacatctatagaggcagataatgaaaaatatatgtaatttttttttgggttatatactattttatgttcagccaagaaggtgaaaaaggagcgattgcttaaaaatgttttcgtgtggttacccgtgatgcaatgtaaaaagaaaaaagaaaaaaaaaagaagagaagagaagaactaataattacgtgcactttaatttactgtaatactttattggagtgccttggttctttttcaatttttgtggtccatcttagccaaaagaggaaatacttttatataatataaaatattgtaacgcaaagtattgcttagtattcgaaacacattttttcaaatgatttacgtcccattatttcccatgcaaacggaaatatcctctaatgattatttcaaacacgattattacagtacagtcgaaattactttcccggtttaatcatattctggcatatcttataacatattttttgcaaaggtattcgcttttgtttttgtgacaaattatttattaggtttttaaattattacaaataactctcacagacgtatgtaatccaacacataaaatatatggttgataagaattcacatcaattttgattaatttagggactataaatatgttatatacaataattaatctatgcatcttttttaatcattgtgattgttctagttataataaaatatggttgatcacaattcacaacaattttgattaatttatggactataaatttgttaacataattaatctaggcatctttttaaatctttgtgatttctctaattatataatatgaactgcagaatttgattgttctcaatgtataatcttacgggtcataccataccatccatgctttgagttagggatgtcaaaataggtcaaaattcatgggtcaactcaactcaactcaacccatgaaccctaatgagttgaaaattttgactcaaatgagttgatgagtcaaatgggttaatgagtcaattggtttgatgagtaaaatgagttgggttgtaatggttaatggtttcaatggtttacccaattaacccatcaaattttataaaattgaattaaaccaactaaaatctctaaaccaatgccaatttaagtttaaccaacacatctaaacaaatttaataaaattaatatttttccaaatttcttaaatatacaagcgatgaaattgagaaaaaataaattcgtaatttttccaccaaaaaacataaacccgtgattttctcgccaaaaacgtaaacccgtgattttcccgccaaaaacgtaaacccttaattttcccgccaaaaacgtaaacccgtaattttcccaccaaaaacgtaaacccgtgattttcccgccaaaaatgtaaacccgtgattttcccgccaaaaacgtaaacccgtgattttcccgccaaaaacgtaaacccgagattttcccgccaaaaacgtaaatccgttattttttcgcccaaaacgtaaacccatgatttttccgtcaaaaacgtaaatccgtgattttcccgccaaaaacgtaaatccgagattttttcgccgaaaagcttaaacccgaaattttccagccaaaaacgtaaacccatcattttccggccaaaaacgtaaaaaactataattttcctgtcaaaacgtaaatccgtgattttccgtacctaaaacgtaaacctgtaaaaaataaaatccgtaaatatcttaagtttgatgataatgaattaataatgataattatttattattgttttataataataattaattaaattattacttaaatgggttaacatctcaaaccattaaattaaatgagttataggttgacccaacacatttaacaaaatgagttgggtcaacccataactcatttattcttaaactcatttgattataagttgagtagagttgggttatccattttgatatccctacttttagtactatagctacaagcctacaactatggagattagtgtgaatgtatgattgtcgaataaaaatagagtgactaaatattttaagcgtaaaaaggtatttattccagcaaaagaaaagaagaaaaacgacaaaaagaagacttaaaagttgtagaaatgtcagtacgtatgtgaaagactgagacacagaacactttgtacaagaaccagttccagtgtcaccggttacagccggtcgccttctcttgattccccaaagcctctcccaccaaacccgggacttttcacttttcatcagtatttttttttgttaaagattttcatcagtattttatatatatatatatattataaagatcgaatttgtttgcatgatgaggaaagtatatcgagttactatgtatccatcgtttgaaatacccgttttaaaaaaaaataatgagatttatttttaggacttcagtatatatacgattaacttttaacagttgtgtgactaaaacgaaatgtaacaaaaataagagaaaactacaaaacaggtagtgaaaaatgacaaaaaaattgtaggacgctaagacgaaaaaatgattcaagaaagaatatgtcttttcaatttcagttttacgaaatcgtgtaataacgtaaatactaaatcacgatttcacagaaccatataaaatactaaaatcccacgcaatcattaaacttaattcaccattctacggatgacctatgagagagcattgaattggctttagtaacaaacaccaaaaagatgaatcttgaccaaatttgtaatgctcatactaaattcctccaagtcttataaacattagatattttatattttaggttttcaaaatatgtcatataaagaaaaatttgatatacatattgatcgtgcttcaaaaagacaccaaaagagcttctctctctcttaacctctcgtttcgccattatctcttacactgttactctctctctctcttcttcttcttcttcttcttctgcatctcatcgacatcatcctttcccatg

SEQ ID NO: 28555 - DNA, 3003 bp, Unknown; identical to SEQ ID NO: 28554
  misc_feature (1)..( 3003): 2750-1469P.txt file - cDNA_ID_2997449; gDNA_ID_2926276; Annot_ID_205320

SEQ ID NO: 28556 - DNA, 3003 bp, Unknown
  misc_feature (1)..( 3003): 2750-1469P.txt file - cDNA_ID_2997453; gDNA_ID_2926276; Annot_ID_143544
acatatatcattagtatagtaactatgttataatttggtttattaggtttgaataagtgttacacttttgtttttgaaaatttatccgttggtgataatgaataatttagggattttctatcgcttgagggttattaatttattatggtaaaatgttattttaggtatcgaattggttcataaacgcaagagttagggtttggaagccgatggtggaagagattcacatgctggagactcgacaatctcagagatcttcttcttcctcttggagagacgaacgtactagcaccaccgtcttccctgacaacagcaacaacaacccatcttcgtcctcggcacagcaaagacctaacaactcatctccgcctagacgggcacgaaacgacgacgttcatggcacaaacaacaacaacagctatgtaaacagtgggagcggcggcggtagtgcggttggtttctcgtatggaattgggtcgtcgaatgtgccggtgatgaatagcagcacaaacggaggagtgtctttgacgttagggcttcatcatcagattgggttaccggagccttttccgatgacaactgctcagaggtttgggcttgatggtggtagtggcgatggtggtggtgggtatgaagggcaaaatcgtcagtttgggagagattttattggtggtagtaatcatcagtttctacatgattttgtaggttgagattatttgtgtggaaaggaaaaaatatgtttgacgtttgggtatgtataagaagatatgggggaattgaaatgcatatgatgtgtatattagaatgtttcttcttctttttttgttgtttgcttactttcacaaatgttatctttttaagaaatgaaattggattcaataaccaatgttaaaaacatgggttagactttagagttgtctatgtcttggtgaaatataaaaggcatctatcattgttttaatattttggcatgattcaaaacatggtgctttttttttttttatgtatgtcacaattatcgttgaagaacgcgattaagatgtttatcattgatcgttgatattatattttgaactatcttgttttacttgatagtaaacattgactaaacaacatgttttcaaaccctaaaccttgaaatatttcagactatttgagttatctttttgagtcggatgcagttttgactccgatccgctcaacattgttgaattcttctactcataaaagaagtttgagccgatttcaaacacacaaaacaaatgagttcggtttaatgttcagtgtgtactaatacgttggcttttgaagatcacatgagagcaaaagtattgaaaataaaattgtgcttttgttgcttcaaataactttccatttgcttttggaaaacaagaaagatatatatatatatatatatatatatatatacataacctttccctctcatgggaaaaaagtaaatctttttctttgtagaatttattctccgatcctaaccatttctcagcctttttgtttgtttacaccatttttgtttatattcttggattatgtctatatagaataagatgtaaacataaactgtattagcaaatatgttttgaattatatgaaattcaataattgagaagaggttcatgtaatgagccgagagaagaatataaaagcagtcaaataattttttcaaaaaactatttgtatattaaaaaggtacaaagtaaaaaataaatttaagaaggtgccatcattggctcctaaagaacaaactacaaagaatcaatttctcatgatttgatctctcacaatccgtctcctttatgtggatgcggaaaaacactctccacacgtttcatgtaaaaattttagttaaatttctaaaaacaatagagatactattcgatttgttcttgaattattcatgaatacatatagtggcaaccttagacactagccacgtcaaccgtacatgttatatcatatatttttatattggtctatctatatgctgaactagagtctagagataaatatgagaacatataagaaaccatggacaactaaagatattgtctttctgtgtgagtatttgttccagaagcattaaaccttcggaataagtataattcttttgcaccattactatttttataagcttcaccagctctatatatattctcaccattaacataaaacaacaacaacacgaagaagaagatgaaggtacttgatgatgaacgggtaatctgcatcctgaggtttaaaaccaattaagcatatacatatgcgaatgtatagtttttaatcctcgggatacagtttacctcttccttactcaagaaaacacttagctttaacggttttggagaaagaagaagcatcgaattaaatccatttgaaacaggttagttatcttagtgaagaatatatccatcaatcataatttggtctagtcattcgaagtgggatatgatttgatacatatagtctaaaatatgattttatgccagtaatattttgttttccctgtcccctacctatatctagagcttgagatcctccttttaaaacttttagatgattaatcgttttacaaatcatagtcccagactttcgttccaatctagatcggtttagatgcgttttgttttggaatttatacaacgaaaaccaaagtttagattaaaagattcgaaaaccggattacataaaatctggtccaggacccctttggttaacgaaaaccagactaaagggcagaaacgtcatttgacaaaaagaaggatgattctctccttcctctttccccaatgcaaagaaaaagcattatagacttttcaagttttccgatataagcacgaaatcgctgtttctctcttcgacgaagctttgataatttgatctcaatcgatcgattctattgagaatttgtgtacctgttttcttataaggttaactaaggattgtggaatcagaagtgttgtgtttttgtgatcggagattatg

SEQ ID NO: 28557 - DNA, 3003 bp, Unknown; identical to SEQ ID NO: 28556
  misc_feature (1)..( 3003): 2750-1469P.txt file - cDNA_ID_2997453; gDNA_ID_2926276; Annot_ID_205321

SEQ ID NO: 28558 - DNA, 3000 bp, Unknown
  misc_feature (1)..( 3000): 2750-1469P.txt file - cDNA_ID_2997456; gDNA_ID_2926276; Annot_ID_143545
ttggaatgggatccggttaacgcaatatgtaagtaaactgcataacaagtgaactattcaaaacaaatttcttgaatcagatcattgtgattgattagttcttggcatacatgtattaggtggtaaatgtcgccatgggaaacactgcaaaaagaagaagaagaccgttgttttcgcaggtacagaggatgaaccgaaaaaccaaaaatatattcaaatgcccatatgattgtactccattttaacttctttgctcttgaaggtgcggctgttgcggttgtgggagttacgctagcgattgcggtagcagtaattggaaccaaacatagccaccaaaaggttaaaaaggatatccacaagaacattgttaaggagcgagaagagatgcttagcgcaaattccactggaaaatcatcaagaatcttcactggcagagaaatcacgaaagcaaccaacaatttctcaaaagacaatctcataggcactggaggttttggagaagtgtttaaagctgttcttgaggatggaaccataaccgcgatcaaacgagcaaagcttaacaacaccaaaggcactgatcagatcctaaacgaagtccggattctctgccaagtcaatcatagaagcttagttaggcttctcggttgctgtgttgatcttgaattgcctctcttgatctacgagtttattcccaacggaacgctgttcgaacatctccatggcagttcagaccgtacttggaaaccgctgacttggcggcgcagactgcagattgcataccaaaccgctgaaggattagcttatctccactccgcagcacagccacccatttaccaccgcgacgtaaagtcaagcaatattttgcttgacgagaagctaaacgccaaggtttcagactttgggctgtcaagacttgtggatttgacagaaaccgctaataacgagagccatatcttcacgggtgcgcaaggtacattgggatacctcgatccagaatactaccggaatttccagctaactgataagagcgatgtgtacagcttcggggttgtgcttctggagatggttacatcgaagaaggcgatagatttcactagagaagaggaagatgtgaacctggtgatgtatattaacaagatgatggatcaagagagattgactgaatgcatcgatccactgctgaagaagacagctaacaagattgacatgcagacgatacagcagctcgggaatttagcatctgcgtgccttaacgaacggagacaaaaccgaccttcgatgaaagaggttgctgatgagattgaatacatcatcaatattctgtcacaagaggttactgagacatagctgtcttagaaaattaccaaaatgacttgtacccttgccctgtttccggttatggattggagaaaaacaattcatagaaatggatttttgtaaaatcattgagatgggttttgtttgatatcatatcaagatccaaaacatggtatgagacgatatagcagctaaaaaccaattaaagaaagataaaccaacagaaatctgaaacctatcgcaagagagagcgggttgctgcctgcaaaactcagtgtctttagtgaataaaacagtaactcctgcagaggaacacgcggctgcaagagcgagaagtgcagtgacctgcagaattccaaaagaaacctatcaaacaaataacctttaaaacaacaagacaccaacagtgaataagcatataatgaaatggaagataagtttaatacccaatcaccaacagtgaaaaggctcaataagatagggcttcgtaaatcactttttctccttatcgcatatacatcaagacacgcaagtccaaagctccatatcaattgaagacccatagatgcgactaagaagctgaaatcattggcaaaagcaatctatcatcattttgtatcttttgagataaccccatacagtaatcgaaatatagaaataattccatttccacatattttttaccaaacaaagaaaaaaatcttgtcaaagtttcaggcaaatgttaatcatacacaattactagttcagttagctctatcttcaaaagtttatccaagaaaaaactacaaagtcaagatttttgatacatcagtgtccaatgtcttcaactaaactaaactaaaccaaaacaccaagaccaatgagattgaagatggacaattaccagaaagcagtgtaattggaaaagtcgtaagaagaaaccataacaccaatggaagcagcagcagttgcacattgccctagtctcagtatcaacccactcattgttccaggactcccaatcatcttcttcattgatcagaacccaaaaacaaacacaataaacagaacaaaaccaagactttctatcctgttcctcaccaaaatccccgggagaaaaaaatcgctactttacaggaaattgatcataaaaaccctaaacccataattttattcaggaaaatttcacaaacccaaatctcaaaagttgacttatgatcataaatcgtacggaattgggtaattaagagcatcgccaccagaaaaccaacattaaaaatgacaacttttttgagctatatgaatttaaaaacaagtatctaccacaaatttaattctgcttttttggaggaacaattatgtttcccttaacttcaagccaacgatattaaaattgaagttggaagaaacagtgacgcaattctgacgccggcaagagctattttgttcttctctccttttgcctttaaggacgtgtccacacacagacattcctctctcactgtacgaatgaccaattccttttaatatatgggcttcttatggcccattaagtaattgggccttattaaatggctttttatctcctacataatgctttgcactataaacaaaccttaaacctctcttcttctctcagtaaaaccctcatttctgtttctcttttcacttttaaggaaaaccctagaatcctcagaaatg

SEQ ID NO: 28559 - DNA, 3003 bp, Unknown
  misc_feature (1)..( 3003): 2750-1469P.txt file - cDNA_ID_2997467; gDNA_ID_2926276; Annot_ID_143551
ggaagatggaagcaagaggtatagtgctgatttactaaagatttctctctttgttcttgttgttgttacaagaattggaagaaaaaacagtactctggatttatatgttggcttgatttctcaggaacgtgatggctattggaagatgatgcagaagtatatagggtctgatgttacatctatggttactcttcctgtgatcatttttgaacccatgacaatgttgcagaaaatggctgaggtttgtggtcttagattttagattatatgaaagatcttttagcttctggtttctattgaacatgttttggtttctccatttgttgtctctgcagttgatggaatactcatatttgctagacatggctgacaaaactgaagatccttacatgcgtatggtatatgcatgtaagcacatccccactcttcttgttcttccttgtagttttttcatggtgtgactaatttcatctgatctttaatagcatcatgggctatatctgtgtattacgcctaccagcgtacctggaagccgttcaatccaattctcggtgagacttatgagatgactaatcataatgggatcaattttatagctgaacaggtgagtgatttctttacaactcatattccaatgtgacttgggaaaaattatgagttcttagttgacatatgtcaatgttttgttcctcaggtctgccatcacccaccaatgagtgctggtcatgctgaaaacgagcatttcgcttacgattgcacttcaaaactgaaaacgaaattcctaggcaactcaattgatgtctacccagtaggaaggtaatatctcctaactatgtatttatatttaagagtctccttgtgagactaaaacactgaacttttcagtcaatgaatatgtgtgcaggacacgagtgacacttaaaagagatggtgtcgttcttgatcttgtacctccactgacaaaggttcataaccttatcttcggtcgaacatgggtcgattcgccaggagagatggtcatgacgaacctgaccactggtgacaaagtggtgctttactttcaaccatgtggctggtttgggtaagttctttcttcatcaaacttaaaaaccttcaaacaaatctgatcaattgaaatctcatctccatgcttctccatttagagctgaaatgtggacctaatggacagatctggacgatatgaagtggacggttacgtgtataattcagctgaagagcccaagatgctaatgaccggaaaatggaacgagtccttgagttatcagccatgtgatgcggaaggcgaacctcttccaggcaccgaactgaaggaggttttatcaatttctctcctctaagcaaaccctctgcatactatatctagtcacctttctaattatgttacttccacaggtgtggaaggttgctgaagctccaaagaacgataaataccaatacacacattttgctcacaagatcaatagttttgacactgcccctaaaaagctactgtcatctgattcacgtctacgtcctgatagatacgcgctggagatgggtgatatgtccaaatctggattcgaaaagagcaggttactaactactcatagtcttttggttagcttccctaagactactaatcccaaagtaatgcaaaggctaatagaagccgggtttttttttgttttgcagcctagaggatagacaaagagctgagaagaaaagcagagaagagaaaggccaaaaatttgctccaaaatggtttgatgaaacagaagaagtcactcctacaccatggggtgatctcgaagtttaccaattcaatggaaagtactcggtgcaccgcgccacagctgaaaactctgaggatacaaccgatgtgaagttgacccaattcaacccttggcaattccaagatctctctgcttaatcctttggtgccatttgttgtgtaatgcgttgttactttcttagatctttcatttgtttttggtattaatcaccagtttcattgtaattttccataagaaagagtctatattttgataatctactctctttgtaaggctttaaagctgattactgattttctgagttgtcttgaaagcaattttatgaattgaagtgacgtcgttaaaggagaaactatagtagaaggaaactgagaagtttcttggggcttaagcaactaataaaaacgagcaagcgattcttttctttgtttttttttttcctttttctttctgtcaatagataaacggaatggagcagaagtaaagataaaatgaaatcacaagaacatcgaaagtaaaatctcttggtttggtaacaaaaataggaagttggtgccaaaaacagaagataaaccaaaaaaacaaaagttagtaatttattggctgtcatgggtggatgaggtaattacgcaaaaggtcgtggactcacgaggttggttaaaattaaaaacaactgcaacatttattttttaaaacgtttttttgtaacatgaaatttctatgaagattgggtagaatgcatttaccgcgtttcatgtgggacgacgtcttcttattatatcccttcgcaactaaatcctcgcttccatattttctttcaacactttatcatgaatattgaatacacacacacactcataactatgatttttcttatcgtattatttaaagtcattaagtgaacacaaatatatcgtaaagaaaacatctaattatgttagggtttctttcgaattagttcgttaaatatgtctaaactaaagtttatatggtatactaaaccgacgcatcttcttctgattgaaccgacgtatttttttaacttttaactgtcttccataacttcccattttcttctccaccactctctctctctcgctcgctcgcatatatatacgtcactttttctctgatctcataacactgttccgagagtgaggagtagaataccttattaccggtttaatcaaaccggttcagtttccaaatg

SEQ ID NO: 28560 - DNA, 3003 bp, Unknown; identical to SEQ ID NO: 28559
  misc_feature (1)..( 3003): 2750-1469P.txt file - cDNA_ID_2997467; gDNA_ID_2926276; Annot_ID_205328

SEQ ID NO: 28561 - DNA, 3003 bp, Unknown
  misc_feature (1)..( 3003): 2750-1469P.txt file - cDNA_ID_2997471; gDNA_ID_2926276; Annot_ID_143552
ctttgtaaggctttaaagctgattactgattttctgagttgtcttgaaagcaattttatgaattgaagtgacgtcgttaaaggagaaactatagtagaaggaaactgagaagtttcttggggcttaagcaactaataaaaacgagcaagcgattcttttctttgtttttttttttcctttttctttctgtcaatagataaacggaatggagcagaagtaaagataaaatgaaatcacaagaacatcgaaagtaaaatctcttggtttggtaacaaaaataggaagttggtgccaaaaacagaagataaaccaaaaaaacaaaagttagtaatttattggctgtcatgggtggatgaggtaattacgcaaaaggtcgtggactcacgaggttggttaaaattaaaaacaactgcaacatttattttttaaaacgtttttttgtaacatgaaatttctatgaagattgggtagaatgcatttaccgcgtttcatgtgggacgacgtcttcttattatatcccttcgcaactaaatcctcgcttccatattttctttcaacactttatcatgaatattgaatacacacacacactcataactatgatttttcttatcgtattatttaaagtcattaagtgaacacaaatatatcgtaaagaaaacatctaattatgttagggtttctttcgaattagttcgttaaatatgtctaaactaaagtttatatggtatactaaaccgacgcatcttcttctgattgaaccgacgtatttttttaacttttaactgtcttccataacttcccattttcttctccaccactctctctctctcgctcgctcgcatatatatacgtcactttttctctgatctcataacactgttccgagagtgaggagtagaataccttattaccggtttaatcaaaccggttcagtttccaaatggataatctactctgcgaagaatcttggcccgcgagtcctttaaccccggagcctttaccaaacttccgtcaccgttctcacgacaatgacgtcgtgaagatgtatccagagatagacgcagcgacgatggaggaagccattgctatggacttagagaaagaattatgttttaacaatcatggagacaagtttgttgagtttttcgtctcaaagaagttaaccgattataggttccatgcgtttcaatggctaatccaggtaccttaattattattatctctttgtttgtcctatgtgtgatatttgatagtaaaccgcaaaaatttgtagatacttataacaacctataaaatctttcaagatagcctttaaaatttgggtttacgaaaaagttttttgcatcaaaattaattatcgatattataaaaatatttggtatgtattatttttattttttaacatcatattgttttataaaccaaaagttaatttttggttttactttctcagactcggagtcggctaaatctttcatatgaaacggtattttccgccgctaattgttttgatcggttcgtctacatgacttgctgtgacgtaagtatacataagcaaacacaattacttaatgtgataaaaactttataattgcggttgaattaatgacatgttcattataaataaatgcaggaatggacgaattggatggtggaactagttgcggtaacttcattatcgatcgcatcaaagttcaatgaagttaccactccattactcgaagaacttgaaatggaaggtttaactcatatgtttcacgttaatacagttgctcagatggaactcataattttgaaagctctcgaatggcgtgtgaacgcggttacgagttatactttttcgcaaacccttgtgtcgaagatcggtatggttggggatcatatgatcatgaatcgaattacaaatcatctgcttgatgttatatgcggtaaaatttgatctacatataaaatgtttcttgttataaatgtaagattgacgtgaaacgggaactgatatggaatgttattcttgatgcatgcagatttaaaaatgcttcaatacccaccaagcgttgtggccactgctgctatatggattctcatggaagacaaggtgtgtcgagaaagtatcatgaatctctttgaacaaaatcataaggaaaaaatcgtgaaatgtgttgatgggatgaaaaatcgagacattgatcatcagtcgtcgagaagaagatacagtgaagggaggagtattctgagtctgttgcagcgaggcgatgtgatgaatatgaatggggattataacgttgaagatctctctaaaatctttcagattttccgatacgaaaagaagaagagggatagaggaaaccaccaagacaacattcgtccggcaaaaagaatgacaattgaaatgtcaaattacatttagcattttatgaaagaagcctacaaagagagaaatgtttgtttgttttttaattgtttttacacataccttgactcaattgtaatatatactacagaataatgtattgattaataaaagttaaaaaaaaactactcatattttattttacagataaaacaatcaaatctataacaacaaaaaaactctaattgtaatctgataaatatatacatatcattttataataattaaataaaatcatggaatattatttaatgtaatcatgaatacattcattatatatacatatatatatatatatatattttttaatttatttttgacgacaaaaaaatataaatgagtttataattacattaaatattaccccataattttttttttgttggtgaggccatgattttgttttactgtcagaaaattctagcaaaaaaaggaaaaatgtgttgcaggatataacacgtggcgaaatatgaatggatcggagaaagagagcagtgtagccacaagctaaatcctgaagtgatttctgaagataaagattgttcatatcaagtagttttcgttaattcactctacaaaggaaaataatg

SEQ ID NO: 28562 - DNA, 3000 bp, Unknown
  misc_feature (1)..( 3000): 2750-1469P.txt file - cDNA_ID_2997473; gDNA_ID_2926276; Annot_ID_143553
ttcatgcttggattcctctgaactttgagagaacacaaagttgtaacctttgttctgctgttgtctaactttcaaaacttttgtcattactttctcattcttcaggaaagctttaaacttgttgcattatcttctacaagagaatgactcagactccgatattgctatagaattcgggcttcaccatttgatgatgcacctcgtgtctagcttcgatgctgatgtaagagaagctgctcttcgaggattgcttgagctcgtgaaagctagaaaagactgtagtacttgtggttctagcatagtgaaaggcgatgagagactcagacagattctaaaagatcggatcaaagcaatcagccgggtcaaagcaatgagcttgtttatgtcacaagaagatctatcagccgctaaagaggagaggcagctcttagattcactatggaccacaatcttcaacgaaccttcttctctttagagacaaagatacaaagagacaaaaccgtctgtgcttccttatatcatgagtaagcactaaaaccgtcttttatgtctttggacccaccagctaaagcttgtgtctttagaacactagttaaaaggatggtaaccactgtataatgaccaaattttgattctattttgagttcaaattttctcagtttctcattcaatgacctaaaaacagaccgtacaagtaccaaatcaagctactgcatgataaacataacataaaaatcagaagcctctcactttggaggacagaaagtgataacataacgagaagctctacacttattcaaactactagaatcatcaaacgcataactataagctttaggacaaatcgctttaaacagattcgcgaacagagtcggcttacacgcctgaggattcgcatattcaccggtgcaacaatacttagccgattgcatcgccaagcaagcacttttacaaccaaccactttcccatctctcttaacttccaaagctgatggacaacaaatgttcaaattcacttcacaagccgcaacgccacatccaactccaccgccgattggtttcatcgacaccggaagattgaaaccgtcgacgagacttacgtcgtagaaatgaagcggagaggaagatgagcctaatgtcatttctactacggttgctggtggtacaccgccggttccttggcagttgatagagccgtcgttgcagtctccggtttggcatgagcctttaccgttttggttaaaggtgcagccttgtctaccccagattcgaccggaccatttatccggtacgtctatgatggtttcttcgccgcttcccatgtggaatccgccgtttcttggtgtgatttggcctccgccgccgagaattcccggccaaatgctctcctggcagttattcactattataagctgagctccatctgcaaaagaacaaagtcactattattgagaggaatcaaaacgagaaacaaaacccatttcataaattatcgagaaggagaagagatatcgtaccagtgaaggctgagatagtgagaaagagaaggaatagagttgcagatttcgtcattgttgttgatgttgttgttgttgtgtggggatatatcacttctaaagtttgcttttgtgtgtgttgtggttgttttcaagagaatattaataaagaatatgttgaggacgtcgtggtcgaaggaagaagtggaaacttgggttgcaagactaatattggtgtggtgaagtggattgttgtatagggaactgccaagtgctaacgttttataaactgagactttcatgggattagtgggaaagagaaagatatggaggcttgatcgtgagccttcttctatgaagaatgggttaaagttggatttaaagaaaaagagaaagattcatatgtctctcaaacgtttattattggataaagattaacactcatagatttcttcatcattgcatttctttaaggcaaatttgtttatactttacaatccataactaattttcagacctagctaaaatctcattgtctaacattttaattattcttagaaattgatttgatatttttgaatatagttttataatttttgtaataatgtcgtaatgttaccacctgaattcactgttttgagtctatatgaaaattgtaataaggaaaatgttagagtgcttcactagagttttgaacttttgattttatatgtcagtttgtttttctttcaaaaattatgttatatgttatctatgcgtatataaacttcatcacttgctagtagcctagcatgtcccaacatttcttacctttgctatgacctttttcactttgtacatcaaatcagcagagagcatatatgcattacttcaatgagaggatttgctttgtttttaaacaaaggctatatttacacaaaacaaatcattctctttttaatgttcttataatattttgttggtttttgaaaggtaataatagagatcgaagccaagaatgtcactagagtctatagacttgcttttaataacaggtggggaggttgaaggttttggtgggtaggtatcttgcaagacatacatataacatattgatgagtactacttgctcaatattacttcaagctgaagcaaaataacatatgaaaccaaattgagataacacttcaaatcatattgcaaatgtaaagagtgaatttgcacaatgatttacaaagtgaacatatacaacaatggattataagttctttaaaaaccacaacaacaaaaaaaaaaaaaaaaaaaaaaaaaaaattctagaggaacttttgggtcaatttttggtttatttggttatcacaaaaccaagccaattataccgatttttccaaaccaaactcaaattataccgattgaaattggccactcttagtgacgacggcgaggaagagctccgccgacgtttactgagtaaaacctttacttctgagcaagacaagaaaaaagaagatattgagcgattatg

SEQ ID NO: 28563 - DNA, 3003 bp, Unknown
  misc_feature (1)..( 3003): 2750-1469P.txt file - cDNA_ID_2997481; gDNA_ID_2926276; Annot_ID_143556
atctgcaactctattccttctctttctcactatctcagccttcactggtacgatatctcttctccttctcgataatttatgaaatgggttttgtttctcgttttgattcctctcaataatagtgactttgttcttttgcagatggagctcagcttataatagtgaataactgccaggagagcatttggccgggaattctcggcggcggaggccaaatcacaccaagaaacggcggattccacatgggaagcggcgaagaaaccatcatagacgtaccggataaatggtccggtcgaatctggggtagacaaggctgcacctttaaccaaaacggtaaaggctcatgccaaaccggagactgcaacgacggctctatcaactgccaaggaaccggcggtgtaccaccagcaaccgtagtagaaatgacattaggctcatcttcctctccgcttcatttctacgacgtaagtctcgtcgacggtttcaatcttccggtgtcgatgaaaccaatcggcggtggagttggatgtggcgttgcggcttgtgaagtgaatttgaacatttgttgtccatcagctttggaagttaagagagatgggaaagtggttggttgtaaaagtgcttgcttggcgatgcaatcggctaagtattgttgcaccggtgaatatgcgaatcctcaggcgtgtaagccgactctgttcgcgaatctgtttaaagcgatttgtcctaaagcttatagttatgcgtttgatgattctagtagtttgaataagtgtagagcttctcgttatgttatcactttctgtcctccaaagtgagaggcttctgatttttatgttatgtttatcatgcagtagcttgatttggtacttgtacggtctgtttttaggtcattgaatgagaaactgagaaaatttgaactcaaaatagaatcaaaatttggtcattatacagtggttaccatccttttaactagtgttctaaagacacaagctttagctggtgggtccaaagacataaaagacggttttagtgcttactcatgatataaggaagcacagacggttttgtctctttgtatctttgtctctaaagagaagaaggttcgttgaagattgtggtccatagtgaatctaagagctgcctctcctctttagcggctgatagatcttcttgtgacataaacaagctcattgctttgacccggctgattgctttgatccgatcttttagaatctgtctgagtctctcatcgcctttcactatgctagaaccacaagtactacagtcttttctagctttcacgagctcaagcaatcctcgaagagcagcttctcttacatcagcatcgaagctagacacgaggtgcatcatcaaatggtgaagcccgaattctatagcaatatcggagtctgagtcattctcttgtagaagataatgcaacaagtttaaagctttcctgaagaatgagaaagtaatgacaaaagttttgaaagttagacaacagcagaacaaaggttacaactttgtgttctctcaaagttcagaggaatccaagcatgaagaaaagtgaagagtattattacctttgaaatctcacactatcagtttccaaagcatcttttaaaccagagtaaccatttgcaatccggaaacctgtgatcccaggtttattattgcgaatcaaagctgtaccccaaatttaccacaatacattcatcagatttacgatagacatttttgtttttgaaaaaggcattcgaccatctaagtatataggatagaactcagagcagcttacatgatattgcaccgagagcctgtgttcgagaatgcatatcggtgtctgaagtaaaccttaaaagcaaggactctaaaccattggcttccataactgattcttgactccgaggattgttctcaactattgtgcttacaacatctgcagacttagcccggatattagcattggagtttttgaggtagccaagaagaggtaccaagcctccaacggaatgaagatctgcccatacattcaaagaagtacaagttaagcccagcaatcaaaagacagatatagaacaaagttacaaggtcaaagtatgaaaagactcaccattagccatatcaatcgattcaacatgttcctgcaactcatccaacaaacctaccaaatcatcataactcaaaatcttagtaaccaacaagagagaaaatagctaagaaaacaatagtgaactccatattgaaccttcaatatcttgaggggtcacttcatgagcctccaaaacttgttgaggtgtctgcaatacctgtgtaatctccttcaaccgcttgactacatctaccgtttgtgattgcatagcttctgcaaaccattttcgatcctcctcactgtctaaccaaacaatttcatatcatcaaaaaccatctaccaaacaataccaaatcaaatagtcaaattccactacatgattcattcctcataagaaactgacgcagaaccacgcaaatttctaaaacaacccaacaaacaacataagctccactaagtgaccaacaaaacctgaaattacaaagaaacttcgtaccttaattggcaagtaggtcgagtaccatcggagtgagagagactccacttaagcagaccgtcccagttaggtccgtctttcgccattgaagcaacggaagaagagaaagactctgcgaaggtcagagagtcagagacaatgacaaatagtttgggccttatgttcacgctaacttaataatgggcttaacaggcccaattgttaactcgaaatatcttgaaggggcctaccttatccacacacaaaagaaaactgaagaaccccaaaaatcccaagtgaaaacgttatccacttcgagagagtgacacgtcacgaagcaaatccaaattcaaaacctttccataaaaatcaaatcacttcttcttattacttcccccaaatcgaaatcagtcacttaaaaccctaaattatg

SEQ ID NO: 28564 - DNA, 3003 bp, Unknown
  misc_feature (1)..( 3003): 2750-1469P.txt file - cDNA_ID_2997487; gDNA_ID_2926276; Annot_ID_143558
taagtgctctgtttttgtaagagatctgaagaaattattctttagagaataattttggtgttcttggggatattttcagacaatctatggatttgttgactggagttacacctccgactagtacaagttttgtctcttcatttcgccagagacgacaaagctctgttttcggttcgtttacttcttcaccaagcaaacagcaacttctcatagacaaagacgagatccaaagctctgttgtgtcctccatcaaatcatttcttgcttctcatctccagctatcagtcccaggggatcttttaactccccaagaaaaccgcagttgcacattctctcaatccgttctcaacggtaataattgcattaggaatgttcaatctgagttttggttaggttttctctgttttccaagattagtcaaataatcaaactgaaaccaaatctgatatatattgatgaactgagtttacgtttagtatagcattagtgcgagagtactgagtttacgattatcttttctatttagattgagattcttaacattctctttttgcaggaattaacgttctatgtggagtagctttacttacaatgccttacgcagttaaagaaggaggatggttagggcttttcatactcttctcctttggcattatcactttctacaccggcattctcctcaagagatgtctcgagaactcccctggaatccacacttacccggacatcggtcaagctgcattcggaaccactggacgcatcctcgtctctgtaagattatttttcaaataatcaatcttaactttgtttgtgtgtgaattgtgatcctaacttaacttgggtttggaattacatttcagatacttctctacgtagagttatacgtaagtaccaaactctctttcatgtttcatatcatgattgaagaaattgaggtcctaactttgaatttttttctgtaggcatcttgtgtggaatacataatcatgatgagtgataatttgtcaagaatgttcccaaatacctccttatacatcaacggattttctttagattctactcaagttttcgccattaccacgactcttattgttcttcctactgtctggctcaaagacctcagcttattgtcctatctctcaggttcatctcgtaattggcacacacaacaatctctgagatttgaactctttaattaaatttaagaaatgttttgtttccttagccggaggtgtcatctcctcaatcttgcttgcgctttgcctcttttgggctggatcagtagacggggttggatttcacataagcggacaagctcttgatataactaacatacctgtcgcaatcggaatttacgggttcggtttcgggagtcactctgttttccccaacatttactcatccatgaaagaaccttccaagtttcctacggtgcttctcatcaggtaaaacaacttttgcttatagcgcaagaaacctctaggtctaattttcatcacttctcatttcataaaataattgtttgttgcgttatgtagttttgcgttttgcactctattttacattgcggtagcggtttgtggattcacgatgtttggtgatgcgattcaatcccaatttacactgaacatgccaccacatttcacctcatctaaaatcgcagtctggacagcggttagataaccttccaaatcaagaatctcagaccttcttcacattctgttcataataattttctctcaattcctatctcatttgtatgattaggtcgtaacaccaatgacgaaatacgctttaacgatcactccagtaatgctaagcctagaagaactcataccgtcttcatcaagaaagatgagatccaaaggtgtctctatgctctttagaaccatattagttctctccactttggtcgttgcactcacagttccattcttcggtaaactatctctctctatcaatttctagttaccctaacttcttgcacaagaaacccctttgtataaaacaatgaccgaactcgttaatgtaacaacgttaattgcagctactgtggcggctctgattggatctttcatcgcaatgcttatcgtaagttctccaagaacaaatcaatctcaataattgccggaaaaattaaggatcaaaacaagttcttgacgatttcggttttggtctttttcaggcgttaatattcccgtgtctctgttatatcagcattatgaagggtagattaactaactttcaggtaagaatataattgaaaacttcgattttgattatatatttttactgtcaatacttcgtagaaaattgagactgaaaagagtttttatttttcagattggaatttgtattttaatcgtgataatcggcattgtaagcggttgttgcgggacttattctgctatcgccagattaatcggcgaaatgacctgattggttttgcagaataagtacgtatattcgaaggaataaaccggtatatacttgaataaaaccggtttttgataaaccaatggttttttgtgtgaagataatccaatttgatttttttttttggtattttattcatagttttaagtccattttactcaatgtagtcttcatttttttttttcatttgctcatttaaaaataaataaataacagaatattttggaaaatgggactggagtaacacttgcattgatggatttacacagttttggaagttagtcaacagagaagacgaaaagaacaataatcaaaaaaattgcaaattcgtagaatcctaaaaatatcgtcagcatcaaatctacaccgcaattaaaataaaaggaaacaaatattaaagaaacattaaatagttttctctccattgatatgtttccgtatatagaagaaatctctttgactcgccggaaaacaaaaccccgttgttctccgtctatctctccctctctctctctgcacatttcttctacctttctttgagatttgagaaaacagaggaagaagatg

SEQ ID NO: 28565 - DNA, 3003 bp, Unknown
  misc_feature (1)..( 3003): 2750-1469P.txt file - cDNA_ID_2997495; gDNA_ID_2926276; Annot_ID_143563
taccaaaaatttctaaaataaatataactaatttcctaggtatatgaatgaaagagtcgattcccccacccaaaatcatcattcaaaaacaattattaaatcttttttgagtaaattgtttttaacgaatttgtggtcttccaatcgttgaaaaaattatcatatgagtagaactgtattgtcattgcactgcgattagttttttttttttttttataaacgattagtttaaattattgttgactactatactactactcttcaaggaattcgtgctccaagtggagggctcataaacataagtggaagcttcaaggctgcatgcatgcatgcaatgcaacaatgaatataatcgagcagctgacctatcattacttttttctttttttctataaacaatatttcaaaccataaatgtaactattttctaatttcctagctaggtatatactcaaaatcatcattccaaaacaattaattaaattatttttgagtaattgtttttcaacgaattatttgtggtcgtccaatagttgcaatatttaccattgcactgcgctttaaattattctttttataaactatttaatataaattattgttgactactacagaaaaattttaaatcatgaaaatagttgatttttccacatactccgaaacatactttggtttttggcatatataataaatcttttctgttattttttcatagtatgttaccaaaagaacgaaacttgggttcatgattaatccaaaaccaagtgcagaacttattttcgacttttgagttagttaccattctcaaaacaatatactttcaaaatatatatctactaaaattgatgaacaaggatacgatttagagacaagaggatctaatagtgtatggatccacggacgaaacaatcgggacgattttcgatacatattgtcacagctactgagattcaaaacaaatagtgacttaatggttaaattccaaattctgagtctctctcaacacatttacttaattaattaagttcttaattaaatggtgtccttgggtctaggaactagacgcaccaaaaaagtcataaggaaaagaagtttaaatgatttttagttcctcaataattggaaccaaagagataggatcggcttttgatcctatcttcttgattaaattattaaacccaataaaccaattattgatggaaaacaaaagaaactttaaatcactcttgcttcgtacaaatattattgtataatataatacgtattattaagtattttgttatgtatataacttcgtgtcccaactttctataagtttatcatatatatatgatgctaatcagtaatcaacttggtatgttaccaaaacaaatcaaattggtctgttacagtttttagacttggcaaccgatattgaattcagattacacgatcggaattccaaataaagtattactcacgcagccaaattattggacccaaaaaaaatcaaaagaacattcgtagactaaataaaaactaaaagcaaattatatttgaatatgatagacgaaactagctggctaatcgattctaaaaaagagaggaaatgttattatcagtcccatagattcgcggtatatcatggatacacacaagcttgggtttgagaaataactagtgtttctccaaaattatatttcctattcgagaaaaataaaatcatgtatcaaatcatgaaacaaatcatttgataatcctgtaaaactgatcatgtattagcacgaaaataaagaattagaaagcatagcgtagtcaccttcttaatttgacttgtacgttagaacttagaaacacgcggattttaattaaaaaagtagttaggagaagaaacacaattaattaattttaaaagcaaatatatataattaaaacaaatgaaatatattgcaaaatagcttttaatgatcgaaaagagccagagagactttgctataaaaacccctcctctgcctctctcaatccctcccccacaccttctctttctcttagcatactctgctcttcctctctctgttgttctctgttccaaaggctttgaggtaaataaagaaaactactagtcttctttttcaacgcctttccgtttccttgttctgtttatcaacatttcgtcggttctatgttttccttacgaacttcatgccgtttggattcttgcgtcttagattttttcttttggtccaccattttcaccgtgaacatcgtcgtcaattcactaattttacgtacatttatctaaatttatttgtgatagttttttatttttatttttatagttaaacttgatttcgttaaaactatttttttttggaggcttgttacttaaaaatagaactattaccaagttgaaatatttctcatgccaaacattgaaccggatccataaccgatcagagctaaggttttttaaattaaataaaaattaagtcaaacgggtcaaataatggtcataactcggttaataccggtttaattttgaatactccttcagtaatacaaccattttacaaccttctatttttgagagaccaattcatcattgtagtgacatagtacacaattaaatttttgttgtccatacacgtgttatatgcatacaagatacatacgtacgtatataaattcgtatatgattcatcttttgtctgtacatgcatgattgcatgtagtactaaaaattattaggagccaattagtggttgaaattcgctgaatctctcagttcacgtttaacaaaaatcttatccccagtttttttgggacatagcaactttgtgtccattcattacacgaaactatttctgtttttttttttacaaatctaatctgaaaacaaaaaacaaatcggtccttattatccatgcaaaatctctgtgaaatatcagaactaaaaccctaaaaaagaaacacaaatatttaagattttcttccctgatccaatcaattgtttcagaaaaaatg

SEQ ID NO: 28566 - DNA, 3003 bp, Unknown; identical to SEQ ID NO: 28565
  misc_feature (1)..( 3003): 2750-1469P.txt file - cDNA_ID_2997495; gDNA_ID_2926276; Annot_ID_205339

SEQ ID NO: 28567 - DNA, 3003 bp, Unknown
  misc_feature (1)..( 3003): 2750-1469P.txt file - cDNA_ID_2997499; gDNA_ID_2926276; Annot_ID_143564
atagaactattaccaagttgaaatatttctcatgccaaacattgaaccggatccataaccgatcagagctaaggttttttaaattaaataaaaattaagtcaaacgggtcaaataatggtcataactcggttaataccggtttaattttgaatactccttcagtaatacaaccattttacaaccttctatttttgagagaccaattcatcattgtagtgacatagtacacaattaaatttttgttgtccatacacgtgttatatgcatacaagatacatacgtacgtatataaattcgtatatgattcatcttttgtctgtacatgcatgattgcatgtagtactaaaaattattaggagccaattagtggttgaaattcgctgaatctctcagttcacgtttaacaaaaatcttatccccagtttttttgggacatagcaactttgtgtccattcattacacgaaactatttctgtttttttttttacaaatctaatctgaaaacaaaaaacaaatcggtccttattatccatgcaaaatctctgtgaaatatcagaactaaaaccctaaaaaagaaacacaaatatttaagattttcttccctgatccaatcaattgtttcagaaaaaatggagttcgagaaccggtacggacttgcaacgtcgcagaagtacgactgtctcttgttcggtacgcacctaaccggaataaaccaattacttttgattaatttacacgaatattttcttgaccggtttggtaaatttctctttagatttggacgatactctttatcctcttagctccggaatcgcaagagaatgtgggaacaacatcaaaggtaatattttttttttcccgcaatcgattatcgattaacaattcattcttaaattggttttttgtctttccggtttaatagattacatgaccgagaaactcggtatacctaaggacaaaatcgtcgaattgtctgatcttctatacaagaactatggaacaacaatggctggtcttagggtacgtgatcaatatcatctctaaacttccattatttattcttacaaattatttttgtaacattttatcgttctctaggcgatcggatatgaatttgactacgatgagtaccacagcttcgtccacggtcgtttaccctatgacaacataaaacccgaccttgttcttcgcagcctcttgcttagcctccctctccgcaaagtcgtacgtgtcataatcacatttttatttaattaaataccatacgctatataatatagtttgaatagaaaattaatcaacattgtttattcccgtaatcagatctttaccaacgcggacagagttcacgcggccaaggcgttgaagaagttgggattagaggattgtttcgaaggaatcatatgtttcgaaacgctaaacctcatgcacacaaacgctgcgtctaacaattccgagatttttgatatcgttggacattttaaccggtctgaaccggtcggttcacttcccaaaacgcctgttgtgtgtaaaccatctgaatctgctatcgagaaagctcttgaaatcgccaatattgatcctaaccgaacggtatagcaaaccggatactttcatttttttcgtttttttaaatacatggacaacaaaactaaaatttatattatttctcatcgcagctgttctttgaggacagtgtccgaaacgtacaagctggaaaacgcgttggtctttacacggttctggtacgattatcttagtttaattaaccaaacataatcaagtttaattaaacaaaacaggatagtttaataatattgactttggagtttgttattgttgttttcaggttggtaaatcgaccaaagtcaaaggagcggattacgcgttggaaaacattcacaacatgaaagaggcgataccggagttatgggaatccgacaggaaatcgtcggatgttggatattccggcaaggtcgccgttgagacttctgttagagcttaggaggagtactgtttcgccgttgtacctaattttccaccactgtcattttcattttcttttttcaaatgacgtaatgtcatttttgttttttttttcgacttgtgtttataaaagattaataaaaaatgagaaaataatttccatctagtttgtaggagaaataaataattaaatatcctctaggtatcttctagaatcaatcaaatataataaacatactttaaaaatgcataagaaatcaacaagatctcaccatacacatttttcttttttgccacccatagatttctttataaaaaaattaaagatatatgctatatacttttcaccatatgctacaaaatgttgatacggtcgtatctaatctaatatagtaattttgttaaactaatttaaagattagatttttgttttatcgtaataagtctacaatgtgatcagttgaaatggctaagtaattttatttcaagtagttgatactaatattcttcttcaatatttgctcatgagtcatgaatcatgatggatgttgacaaaaaaaacaaagcttgtgagtctgtgacagacgacagttcaattatacagttgtttcggaatatgtacagaaccaacaaaaaaagtcaataatttcgtagtttaattatggaagcttttgataaaaaaaaaaacaaattatggaagcatgtcgtttttgtggcgacgagttcatgaaaaacgtcacgtagttagatattcaaaatgatcaattgccataaataacagttatggcccataagtaacagagatagtaagggctgggcccaaaaattcaattaagaaattagtaagagtgtcagtaatttttaccactaagaagatgacatgtgtaatcacaacgactaaccttcaaatcagacggtcatcaatgctcacaccaatcggtccgttcccatactctcctttaatggcttctgagagatatttaagtttagcaaaaaaatcctaagcttctacaatg

SEQ ID NO: 28568 - DNA, 3000 bp, Unknown
  misc_feature (1)..( 3000): 2750-1469P.txt file - cDNA_ID_2997507; gDNA_ID_2926277; Annot_ID_143566
gaacaaattaggttgcagaaactcatatccggtgaacaacctagaggaggaggcactggtattttcagaaacagccaattcagatgacactcaccaccatttattgcctcattacttgtattaatattgtaattttaattcatcggcattgttgatgagaatctggttgtcactctctttgtttgaagtttatattgttgaataaaaatgaacttttaaccttattaaattttgctcggagtcattgtccaaaaataccaagttggttaagagtccacaagaccacaagtaaagttttcgtcaactttgtttgaccaatgaccacacggataaattggtaacaaaaggaattgtgggtccaaattataataaactgaaaatggatggtgtaaaatgtaatttatctacaaaattaaactttaggataaacattggatttttgcaggaatcgccggagggagaagcaatggtgacgattctatcaactcctctctctccaagacttacatttctctgtgagttcttccctctatctctcaaaactcttattgatcttacgattcagtaagctggttccataagactagttaagtgaccaaaactgttccataaaatcttataggtgaaacaaaactgtcattatctcggagcaatcgctcggtatgttgttcattgagtgaagaaccaaaagaccaatggtaaaatttgcaatcttgagagataattttttttcctttttttggtttgattctggagataaagcttggtcttttaattgcagcttgagtcggagaagtcttgtttatgttttagttgcttcgccgtgtttgttgttaccagcgttgtcttcatctgcgaagactaaatcaaagagtccttatgatgagagacggttactagaacagaacaagaggatacagagagagaacaatgctcctgacgagtttcctaactttgttagagaaggtttaagcttttattcactgtttctttgagtattattcattcttgagtggaagaagaatatgagaacttattgtccttttgtttgtgtttatgtttttgctgatatagtgcaggttttgaggttaaggtattagcttctgataattacatcaaggctgattctggcctcatatatcgggatttcaatgttggtcaaggtgatttcccaaaagatggtcagcaggtactacttcctctatgttagattagttaaacttaggatctgaagttagatcatttatggaattggtatgctctttacttggatatatagaattgaagatatcattgagttttatggttattttgacaggtgacttttcactacattggctacaatgagtctggaaggcgaatagatagtacttacatacaaggttctcctgctagaatccgcatgggaaccaatgcacttgttccaggcaagtagaagacattaacttggctctttagtagtaggatgttaatgaagaatcttctttgacaggaaacacatattgaagatttttaatactatatggataatgatgatgcaggatttgaaatgggaattcgtgacatgaagcccggtgggcgaagaaggattataatccctccagaattgggacctccggttagtgttcttacttgttccttacaagtatacacttgtctgaactgtaaacctgactagtggtaaacttttgctgagccattccgttgaatataccatccctctatcaacaatgtttcaaatggaattactagcttgagcatgctcgtttagggacatatctaaaccaatgtagattagacttgtactgtgtaaaaactgtcttcactttggttcgatcatatttttgacaaaacaaagttcattgggctctaaccaggtgggaccttcgaccttcttcagctcgaagcaatttgaagttttcgacgtggagttgctcagtatccagaattgtgagaggaggactataataggtttctactcagatgtcacatgcagttaacttccaaatgatggtcatcactaagcttcaatgaacctgcattcttcaatcttcaatactctaaatctgcacggcagatgagaactacaaagaaacaaaaagaacaattattctttgcttaggcatttatcttgtgggtttcatgtagagatgcacaattacatagagagacagataaagatcatgtaaagtctcgacctttttcataatcgtagtttacttttgttgctttgttgatcacgttttaagcgtttggagctttttgatatcttctgtctctctgtatctgtgcgtttgtcaagttaaagcaatgcattgtttcgttagttttataatttctaccccaaattttggcactctttatgaaacaccccaaacaaataataaattgtacaaagatacattgaaatttggaacggtagatgtgcaatgctcatcacatttggaaagttaattacgaaattttcatctaaagacgttaagacattttatgtgtggaaactataatttgcaagtaaagcaactaaaacgataaaaagggtaaatgagtaattgcgacgtatccactaaacccttagtctcagctagaaggttcggtttgagttttctttatccccaaaaaaccctaaactcttcttctcgccgacttctctactcctttccagaaaccaagtttcaggtcatcggtgaaatttgttgtgttcccggcgacttctacttttcacctttcttctcggcgtcgtctaatttctagggttcccctgtatttcacgtgagaatctttggcttctttttttctttcgtttcgtctgttcgaatgcatagttaggtttagacttgagaatgttgcattgttggattagattcatacttcagattagggtttcagtttcaattcgttaagttgatgagctcgagtagcttaagatcatctttaagctctcttaattctaaacagttttgtgactgaaattgcagcgtcaagagcaaatccaacatg

SEQ ID NO: 28569 - DNA, 3000 bp, Unknown; identical to SEQ ID NO: 28568
  misc_feature (1)..( 3000): 2750-1469P.txt file - cDNA_ID_2997507; gDNA_ID_2926277; Annot_ID_205361

SEQ ID NO: 28570 - DNA, 3000 bp, Unknown
  misc_feature (1)..( 3000): 2750-1469P.txt file - cDNA_ID_2997511; gDNA_ID_2926277; Annot_ID_143567
ttccattctcactctttctctctcaatggttagatctgtcttttacgtcgcttcgaagtcttctttcttcccttcacatacccaacgaatcctctcaaatccctaattatccaatttcacactcgagatctcgaattggagtctctcatcatcaccaatggcgtctccaaatccctacaccaagcgccgctctccgccgaatgtcgttgtaccgccacagcctcggtataaatccataggaggaggaggatttttctgtaagtctgttctattcgctctttttctcctcgccttgccgttgttcccttctcaagctcctgatttcgtcggtgagactgtgctcactaagttctgggaactgattcatctcctattcgtcggcattgctgttgcttatggtttgtttagccgtaggaatgttgaatccgctgttgatttaaggatgactcgtgtagatgagtcttctttgtcttatgtatctagaatcttccaggtttcttctgtttttgacgaagagtttgatgataattcttgtgagtttgttgatgtgaggagtgatgagagtgtgagtgctcgagcttctgtggttgggaaatctgagtcttttgttgttgaaagcggcgaattggaagaatcgtctgaatttggtgaaactaatgaagtccgagcttggaattcgcagtatttccagggtaagtctaaggttgtggttgctcgacctgcttatggtcttgatggtcacgttgtgcatcagccattaggcttgcctattaggaggttaaggtcatctttgagagataatgctgctcttcaagacaaatcttttgctgatagctgtgatggagctgttaatgcggaagctgagtcattattggctgataatttttttgatgaggtcttggctgctccggcttcacctgttccatggcaagctagacctgaaatgatgggaatcggtgacaactatccttcaaatttccagcctatatctgtggatgaaacccttaaatcgatatcttctcggtctactggttcttcttcatctcaaactagttatgcatcccagaatcagaacagattctctccttctcgatctgtttccgcagagtcactaaactcaaatgtggaagagttggtcaaggagaagagtcgccagagttcatcacggtctagttcgccatccttgcccccatcaccttcactgtctccatctccaccatcgccagaattagtgcccaatgatactcgcagacgttcgccagaattagtaaccgatgatactcccaggcgtgcgtcacattctcggcattatagtgatggttccttgttagaggaagatgtaaggcgggggtttgaaaatgagttggaggggagtaaagtcagaggcagaaaagcagaattcttcagtaagaaggaacggggatctaaatcacttaatttggcagctgaaagttcccggagagggaacaagtctcgcagatcctatcctcctgagtctatctcatctcccgttggtggtgctgatgactccacaactagaagacaagatcttcagcaaaagagtaattgtcatttgcttgaagaaaatatcaggaaaggagtggaagctgaccataacaatctgagggtcaaaaagggaaggagtcacgactctttggagctaacagcagaagattctgcaaaagatgagaaggtcagtgaatcttttcctgctcttgatgtagtgttccaaccaacaaatgctaaagcttcaaggcgcgccatgcgttcttcacgagggggacgtgacactttgccggagaaggatgttgtcaccagaaaattagaggatgacactgtggattcggataagtccaggaaaaaggaccttcctggtaaagacaaggaaatgaaattagacggtccaagaattgaaccacgttcttggagagcttccagtaatgtatcactgagaggaaagtccgtgaggaccataagatctgatcgtcatgggaaagatgtaaagacagatggagattcatctgaggatcgggcagaagctaaagtagaaagccgaggaagaacgaaatcgagaagaccacgacaagaagaactatcgattgtactacaccaggagaaaagttcagaaactcgcgctaaatccgagccagaagaggttgctatggaagagccccaggccgagcagcaacctgaagtaactttcgaagaggaggaagaagctgcttgggaaagccaaagcaatgcaagccatgatcataatgaggttgatagaaaagccggtgagttcatagccaaattccgagaacaaattaggttgcagaaactcatatccggtgaacaacctagaggaggaggcactggtattttcagaaacagccaattcagatgacactcaccaccatttattgcctcattacttgtattaatattgtaattttaattcatcggcattgttgatgagaatctggttgtcactctctttgtttgaagtttatattgttgaataaaaatgaacttttaaccttattaaattttgctcggagtcattgtccaaaaataccaagttggttaagagtccacaagaccacaagtaaagttttcgtcaactttgtttgaccaatgaccacacggataaattggtaacaaaaggaattgtgggtccaaattataataaactgaaaatggatggtgtaaaatgtaatttatctacaaaattaaactttaggataaacattggatttttgcaggaatcgccggagggagaagcaatggtgacgattctatcaactcctctctctccaagacttacatttctctgtgagttcttccctctatctctcaaaactcttattgatcttacgattcagtaagctggttccataagactagttaagtgaccaaaactgttccataaaatcttataggtgaaacaaaactgtcattatctcggagcaatcgctcggtatgttgttcattgagtgaagaaccaaaagaccaatg

SEQ ID NO: 28571 - DNA, 3003 bp, Unknown
  misc_feature (1)..( 3003): 2750-1469P.txt file - cDNA_ID_2997517; gDNA_ID_2926277; Annot_ID_143572
tcttttttttggttaacactttggtttggggtttctatcagcaataacataactgccgctcttcattctctctcatttctttcgctctacattggctctgtgttttttgaattatctattgatttccattagggttttctcacttctttgatcgattgaattatatatgttccgtcaatccatggcgtttcctccaccgatccatggttccgatgcaccgccgccgccacagccgccgtcggtggtgaacgggattgaaacctctagacggcagcagcaacagattgcagcagcttcttcttcgctggtgaaatctcatccgcttcataacttccctttgtctgatctcagatgggctatgaatcacgccaatacacaccggctccgcaaagcatcgagtagatctccgcttcgtgaagctaatactgggaaaggaaatctggtgattgaggaggtgaacgaagcttcaggttcttcgtttgaattgagaccggagaagaagaagggaaacgcgtctggtgttagcgattccgccgcagatagatccgcgacgaagtcaacgacgccggacggtagatcgaagatctttatacggatccgcacgaagaacaacgaagaaacagctgtatcgactgatatcgccacctccgtcgccgcctctgttcaagtgactgatgattcagctggtccggcgatcgatgctgaaggtgaacggatctccgatggtggtggtcaggaagcagacgagtttggaccgaagacttggaatctgaggccgaggagaccaccgccgacgaagaagcggtcaattggacacggcggtggggtattgaagagctgtaacggtgctttaccggagaataaatctctgggaacggtaagaacagagtcaatacgatcgaggaacggtgtagatgctaagatggcgacgacggaaagaaaggagaagaaaccgaggttatcgatatcgctctcaaagctggagatagatgaagatatctacgcgttgactggatcaaaacctagtagaagaccaaagaagagagccaagaacgtgcagaagcagctcgatgtaagattttcacgttgaatcagaatcttacctttgttttactcaaacctgacctaacaatattggcttgaattgttgtatgatcgtttttcaggttcttttccctggtttgtggatgggtaacgtttcttcagaagcatataaggtctcagaacatgcttgaaaggtattaacatttttgatgaatccgattggattacttcttcctgtttactgttgtatagtctgtgattgaggaaataatgtaattgtttctgaatcttgtagggttgaatgagaatgatgtgaagttaatcttgttgaatcggattcgactgaaatcagataggagcgtcgaagaagcttcttccattgattgaggtataaaaggtagtgattcaatgttgtttgtcatttttgagttagactttctccttggtgttatcccttattggttctttgcagtgcaacaaaatattgtagattcatgaatgaaaatgttaaattgatttccctgaagaagagttttagatttgcttgcttggacgatatgtgatgtggctaatatttggtgttcttagatttccgatagttagggacatatcattccttaaggttaaagttcctatcttaatgttaatgatttgcgtcttaaccttacatattttaaaatcctgatttggtgtagagtgaggatgtgaactctgaagttgctatgatttcgaggtctagacttagataaaatggactcactttgtataataaaccttcactttctcatgtctctatctgtactgtgatgatgcagaactgcgaatgattcgtttcttcaagttttggcttcattactggctcgtcggtttcaagagccgaattcaacttcaacttcagatacggtcttaagtcctaactgtcggcagtataaaatgtgaatcaaactagttttctgatccagtcgtcttatttgttaccactgatgtgaggtgttgatacggcctctatttttttttttctgtttaattcattcactttgtgtaataagattagtgggatagcctgactttttgtaaaggtggaaaaataaaatcagaattatcaacataatttatttattccattactaaatttcataaattaaatcattctagttttcattaataaatagagcaaaaaagacggataatttggtcaaacatgtaacagaagaaaatataattacctgcaaatttgatagcgtttttacaaattgttattttaaccccacttccaagttcaaagttcaaactctgatccagtaaattaaagaatataatctggactttaacggtcaatattataatttggactttatacaaggaccacaggcttgatgtgtcactctattcatcatcaattcatcacctccactcgctttgtcccttggtttatccaactcttcatgcactatccgtacacagtaaaaccaaaaaattacggattaataacaaattttgattgtttggacctctatccattttgtatttttggactacttattagtacttaattatttacattagtatattttacatattggtccttttatgtattatgtatcatgcattaattacatattgtagaaagagatttgtactaactagttgacctaaaagaaagaagaagaagagagagtcgtctatatcgagtggttttggtattaattcttatcacgttggatttatatagatgtaaacttcgtagtaataacaatgatgagtcgtgttttaaaagaattttgttactttcttgtgtgataagcttcctcgcaatttcctactgaggaaaagaaatgcaattttaacttccttcaaaagtttatagtaaaaaaaacaaaactcaacatctcattgcttgcatatatgtataaatacctcccacttctagtaacaaagatcacaccgagaaaggcaatg

SEQ ID NO: 28572 - DNA, 3003 bp, Unknown
  misc_feature (1)..( 3003): 2750-1469P.txt file - cDNA_ID_2997521; gDNA_ID_2926277; Annot_ID_143573
ttaaagttcctatcttaatgttaatgatttgcgtcttaaccttacatattttaaaatcctgatttggtgtagagtgaggatgtgaactctgaagttgctatgatttcgaggtctagacttagataaaatggactcactttgtataataaaccttcactttctcatgtctctatctgtactgtgatgatgcagaactgcgaatgattcgtttcttcaagttttggcttcattactggctcgtcggtttcaagagccgaattcaacttcaacttcagatacggtcttaagtcctaactgtcggcagtataaaatgtgaatcaaactagttttctgatccagtcgtcttatttgttaccactgatgtgaggtgttgatacggcctctatttttttttttctgtttaattcattcactttgtgtaataagattagtgggatagcctgactttttgtaaaggtggaaaaataaaatcagaattatcaacataatttatttattccattactaaatttcataaattaaatcattctagttttcattaataaatagagcaaaaaagacggataatttggtcaaacatgtaacagaagaaaatataattacctgcaaatttgatagcgtttttacaaattgttattttaaccccacttccaagttcaaagttcaaactctgatccagtaaattaaagaatataatctggactttaacggtcaatattataatttggactttatacaaggaccacaggcttgatgtgtcactctattcatcatcaattcatcacctccactcgctttgtcccttggtttatccaactcttcatgcactatccgtacacagtaaaaccaaaaaattacggattaataacaaattttgattgtttggacctctatccattttgtatttttggactacttattagtacttaattatttacattagtatattttacatattggtccttttatgtattatgtatcatgcattaattacatattgtagaaagagatttgtactaactagttgacctaaaagaaagaagaagaagagagagtcgtctatatcgagtggttttggtattaattcttatcacgttggatttatatagatgtaaacttcgtagtaataacaatgatgagtcgtgttttaaaagaattttgttactttcttgtgtgataagcttcctcgcaatttcctactgaggaaaagaaatgcaattttaacttccttcaaaagtttatagtaaaaaaaacaaaactcaacatctcattgcttgcatatatgtataaatacctcccacttctagtaacaaagatcacaccgagaaaggcaatggagtcggctaaatcaatcatcggtggccaccaaaatgtcatcctgatgcgtcatggtgatcgactcgacaatttcgagccactctggacttcaacagctgcgagaccgtgggatccaccgcttgctcaagacggtaaggatcgggcctttagaactggtcagagaatccggtctcaacttggggttccgattcaccgtgtcttcgtctcccctttcctccgctgcatccagaccgcttccgaagtcgttgccgccctctcagccgtcgatttcgatcccattgctatgtcatctaaagacgtgctttccatcgacaatactaagatcaaggtcagtcagaatatctctctatatattttttgagaccagggtttgtagtctagtggttttatgctagtgttggtccgtgtcatacatacgttataaaaaaaaaaaacatatattgtggactatggaaatttttaatgattctctaagcaaaattctgttatgttgttcttataaccatgctgatcattttgattgaagcatttgagatgttttatgcttatatatgtcttgtctcgtctgctttaggtggctattgaatttggattgtccgagataccgcacccaatctttattaagagtgaagttgctcccaaagatgggaaatttgatttcaagatttcagatcttgaagctatgtttcctgaaggaacagtggattctaatgtggatatggtttataaagaggtgctctatatgacttgttttgtcgtgtcttcgttcttaatgttttgttttgtgtgactatatctaaactttatttcgataattctcgattccttgtttgtactgtttaggtgccagaatggggagaatctgcacaagcctttgaggatcgatattataagacagtgaagattcttgcggagaagtatccttctgagaacttgctcttagtcactcattgtaagcaaaacagttatggcttttttagtttttaaccaaaattgatgttttcctaatcttgtagttcgtttttttttttgggatgggaaattgcagggggagcagtaagtgttgcattttacaactacttcaaagacgcaactaagtacgtggtagattattgtggtagtgttgaaatgagaaggcagattttgaatggtgatgggtttggtaaatttgaggtagttactagtcatggagtatcttataagtacaccaaaatcccagtccatgatcatgtagttgtaagccgccaatctcccctttaaccggtttatatgtgaatatctggtttaacgggttgcttcaataaaaaaaaatatataagaataatggttcagttattttccttttcttccacaaattttacaaaaatatgtaaagctaaagggttgtaatttttctaacacaaaattgttgttcaacaagaatttgtcagaacgtatttaaattaccattgctataagcaagagaacagtcttagcaaactgctgaaacgacaaaaaaaattgttctttagtattcaaaaaaaaactttgaactatacgtagtcttcctcatgtctgatgcctattgacgagtttattacaatagtaaaaaacaaatgaaaatacaataaaaagtcaatggtcttcttaattgcatgtaatatactatacttgcatcacgccatg

SEQ ID NO: 28573 - DNA, 3003 bp, Unknown
  misc_feature (1)..( 3003): 2750-1469P.txt file - cDNA_ID_2997525; gDNA_ID_2926277; Annot_ID_143575
cttgatacagctgcgagaccttgggatcctcctctcgttcaagacggtatggttcgtgcgtttcaaactggtcaacggattcgatctcagatccaatttccgattcaccgtgtcttcgtctctccttttatccgatgtatacagactgcttccgaagtcatcgctgctctctccgccgtcgatttcgatcctaacgctacttcgtccaaagacgtcacttcaatcgataaatataagcttaaggtcagataatcgctgtaatcgccttcgattttgaaatcttttggtgttccatgtgtatctgtgaatctctgttgattgaattctagtttaagaatgttgagctgaattgttgttgaatgtgtgatattaatcatttaaggttgattattgtatacttctcaggtttccattgaatttggtttgagtgagatgctgaattcaattgctattaagcctgagattgctcccaaagatgggaaattcgatttcatgatttcagaacttgaagcgatttttcctgatggaatggttgatcatagtgtagatcctgtttataaagaggtgaggttttggaattttgtagtatctagacttgtcttgttctgtttctgtttatcttctaatcttcgaagcaatttgagtttaaacttgattctcttgttggcattgtttagatgccacaatgggaagagactgtggaaggctgcacagatagatttcttagtttgataaagactcttgctgataagtatccttcagagaacttgctcttggtcactcacggtaaacaaacacattatgttcttaagtctttttggatcttttacacattctttctgctttgtttctctggagagaacatcttcttctaaggttttattaaagcaaagagtctatgaatagtcccttttatcgatcaaattttgtgtttgaatgtctctttgttgagaaaatgcaggggaaggagtaaggactacatttgcaacctttaaaggcgtacatgtgtacgacgtagagtattgtggttgtgctgaattgagaagacaggtgtcgagtaaagatgggtctactaaagctggagactttgaggtgatcacaagtcttagtcaatgtggaatcaagtaccattccttgagcaccacagaccaaacttctgcttaagtcaatgatgttccggatgatcatggcactagtaaaccggaatcaaaccggatactggttatctagaaacaattctgtagaagatgagaaccttgccggaatactacaatagtaatgtgttgcttccgacagattggagatacggtttcgaagagagaacttctttttaagtgttgtaccggcggttgaaaatgattttgttgtttattattgattctaaacgtaattttgggcagatactattgattaaactgattttgcgtttttatttttacaatgtcatgtgttttgatgtcttcttacttactctgtctccgactaaccaaaagctgtaaacaagaccggctcttcaacaggaaacataaccaccaagtaggttgagtctcatttaagaacaagccatatgccactccttgcactgcaaaaagtcttttcctttttgcttcttctctgcaaaaaaattgttttggagtgcaagtaccaccaaaaacttcgtactagaccatcatcagctactggaatcaaagcaacgatagagtttgagtaaccaaatctgtttgggagtaccagaggttaaatatgatcattatgatgctctctgcggaagatgcagccagtcccaacgtccattggaccttgaagtctatccaaagctctcatactaacatgaaagaagacagtcttgtggttagtatacttttgtggagcggatcataaaatccatctatgattcttcgaagccctttatataagtagctctttcgtacgtgcatattgtaagcatcagcagagaacccaagcaatgagttgattcttcacctctcccgagatgccaaaaacagagtaaacactcaacatgtggttaagagtatatttgtaactggttgttatggtcagagtaaacaaacaacgatggatagtatatttggaactggttgggatatagttaattttttaacacctaacaactacccatcgttgtttgaccataagaaattccgaataaaagataaatttaaggttaaatatgctatatatataaccggtcgactatatcaacaaagatgttatttgatgaagaagtcactagcgtggggtaattttcaactacctcctccattaaggaatggttcgacttatatttatacatttacatgataccgacttattaacatccaaactgtatatcatcccacctattttatttcagactttttgatataaaggatcataatcataagccttgtttcgtcacgtcattcatcatccattccacccatcttcctaaaacaccaaaaagtatattatcttgtaggaatgtaagactagtcgttaatacgatgtcgactgtccacattaatgtaaccccatcgatggagacaaatcaaattactagtttccaagtcatattgaatattaatatgaagttaaaaaacatgtttgtagccttatgtaaattatatcctttttttgtttagttacgtaacacaattgcataacaacaaccacaaacaaaaggttatagcttttttaatgcaaaccaatcaaaaatctttgcaattttctaatgctaaaagtatgaaaaatcgcagttgatattaaaaacaatttaggggatttctcaacaatttacaagttaaatttgttaataataaaacgacttgactttaccatatatctttttcttttttaaattagaaacttttaagaagaagaatacaaaagaagtagtggcactttatgacattttccacaaaggttaaaaaaatcacattcctttataaacaacgatccattagtgtcggaaaacgaaagagaaagaagaagaaagaaacaatg

SEQ ID NO: 28574 - DNA, 3003 bp, Unknown; identical to SEQ ID NO: 28573
  misc_feature (1)..( 3003): 2750-1469P.txt file - cDNA_ID_2997525; gDNA_ID_2926277; Annot_ID_205369

SEQ ID NO: 28575 - DNA, 3003 bp, Unknown
  misc_feature (1)..( 3003): 2750-1469P.txt file - cDNA_ID_2997535; gDNA_ID_2926277; Annot_ID_143587
caacttctgaaacgaaataaaaactgagagaaattctgacttgttgtgcaaaggatagaaccaagagtatcttgaataatcatcaacaaaaatagcataatatttgaggccttggttggatacaactggagaaggaccccataaatcacaatgaatccgatctagaggatgtaaaacacgagaatctgaaattaaaaatggtagtcttgaacttttccccatctggcaaggttcacaaactggagatgttctgctcttatttatctgaatcgccttgctgttttgaaggtgctggagagccttagaatttgcgtgtccaagtcggtgatgccatacttcctctgttgctgcacactgacggtttgaataaagagccacaaactcttgattctccaacacatagagcccatttctacgaggacccgtggttaccactttctgtgtttgtaaatcgattatgcaaaccttattagcatcaaagtaaacaccgcaaggatagtcatcacacaactttgacacagagagaagagatttttgtatatttggaacaaccaagacttcatttaaaggaatcttaccatttgaggatttgatagtggtagatccagtgtgagtaatcgggagataagtgccatcgccaaccaagacagcatcatccccttcgtactctgttgcagactgaagtccattggtcgatgatgttacatgagccgtcgcagctgagtcgggatgccattccttgcctgtatcatctgagacccggagagtagaaaaagcttgtatttcagcctggtaattgttatcaaaccgattgtaacacttgagagcagtgtgaccagtgcgaccacatatctgacacaccggtcttggacctgaaacttgtggggaggattgatgttgggaaaaccctcgtccacgagttgagtagcctcctctgcctttattttgaccagaacgtcctcttcctttttgattggggttgtattgaggagatccagactcagatctttcaatgttgaaggcaaggtgaggagtaacagatgccgcttcttcatatgattgtagcttactgtcaaagccttgaacttctgagacaacatcattgaaagttggagtcggaagcttgctgagagagctttgaatcaccgtggtgatggggtcatagtcacgaccaagaccgttaagaaaaccaaaaattttcattgattcatcgactggcttgccaatggagctgagagcgtcgcagatggtcttgaactctcggcagtagacagagaaaggcttttcctttttggagagaagctggagattccgacgaagtgagaactcacgagcaacactgcttttgttgaagttttcagctagagacacccaaatttgacgagaggtgcttagattgtgaacatgaccgaactaactgatcggtacagaaccaagattcatacagaggattgggttcctcggaggtgacttcgccattgacgacaaggcgagactgagatggtgcattgacggcgccattaacaaaacctatgagtttttgactcgataggagagactcgaattgagttttccacaagaggtagttactgtctgtgagtttgagagtaacagaacttgtaacatgaacattatctggaaaagggtatgaggtcgccatttgaaatacctgttaaggctacaaaggctctgataccatgaaacgattagagaaagtttcaagcttttggtaaaaaatcgtttctttctcaataattacattagggttttacactactcttttatagacattgtagaaggaggtagatatggaacagtctagaatatggcagatgctgtgtagctggctatggtgagtcatcaggcaaaacgcccctcctctgtacgatcgttgctctgttttgagctggagtctattttgtcttcttctatttgactgggctgagatgggccttttgttgttgttgggccggttacttgtttgttgcttacactatacgttttatgagttaaggcttgaattcccatcttatgatgttgtatatatgaagaatttgccaaattcagcttccatatagccacacatcaaccaagcctgatgtcataagaaactattaaaacattgaaaatatgacaacttcattataatttctaacaccttacattagtcatatttagattaagaagtgtttggttagaacttagaatccctaacttcttgtatatattctgacaagttttttacattcatatgtaataccccgtaactttttcttttgagtataatttaaaatcatattcaaaaacataaaaaagaagtgtttggttgtttgtagtgatggtgttttgcatagtcggaggattgtacatgacaacgactgtgtgcttggtttgagaaagaaaattttaggtttagagatcgagttcctttgataccacccgatgatatgaatgtttatgtaattgataatctttattgtatagcaagatgacagagagtagctagagtattgtagagaagttaattacaatattatactttacataaaagagagagtaagaagaatacataattaggagacatgattgatcaaatcatttactctaattgatccttaatattacgttacatatataatccaaaataagtaatatagaatttagaaagtgaatataagaaactaatcaaaattaacctttgtttgaacggtagcggttttagttatagtttttggtttctaaaaagaaaaagaaaaacaatcatagtttccaataagctttttaaagttttttatttcctcaaatctaggataactataagtcttaaaaaaaaaaaaaaacaactagaagtctataattgtctttttagtagaaacctaaagctatttcagtttgttaaattctaacaaccagaaactaattaaaaccttgaaagctaaaaacaaaaatatatatataagctctaaaaaatctctacccattcaagattctaaatcaaacatg

SEQ ID NO: 28576 - DNA, 3000 bp, Unknown
  misc_feature (1)..( 3000): 2750-1469P.txt file - cDNA_ID_2997543; gDNA_ID_2926278; Annot_ID_143591
aaatagagctaagactaactaattcgaaaagcgttcttaagttcactatgaaatgtttacatcaacaaaaaagctctaagatcctaaattttctgatgtgaagcaagagaagaagacaaattaaagaccaattagcagctatctcacacttctgaatatttcgataagcagatcagattctgaacgactatagtgaagatcaattgtaccttaagattgggagctcgagaggcaaggtactcagtgacggagaaaagcaattagaggaagaagagaaggtgagctagggttttcttatcgctttttatactagggaaaatcaaagaaaccaattgacatgtgttatgcgctgcgtctcaagcttcatttcaggcccaatggcgttctttgtcacgaccattgaagcctatcaaagctataacttgaacctgtaaaaatgaatgaatgatgtttctctcagccgtcagatctaatttgagcattgataaatttaacgaatgagaaatatacacgtcaatgatcctcgtgaagatttctatccaatagaatacgtttgttccttctctataaaatctaaaagcgtcgagtaaacctattatcaccattcaccactaaactacttcaatcaacttccttttcccgagaaaatcagaaagaaaattcacgatggcaccaagagccgagaagaagcccgccgagaaaaaaaccgccgctgagaaaccggtggaagagaacaaggctgctgaaaaggctccggcggagaagaaacccaaggcggggaagaaattgccaccaaaggaagccggtgacaagaagaagaagcgatctaagaaaaacgtcgaaacctacaagatctacatcttcaaggttctgaagcaggttcatccagatatcggaatttcaagcaaagccatggggattatgaacagtttcatcaacgacatattcgagaagctagctcaggaatcttcgaaactcgctaggtacaacaagaagccgaccattacatctcgcgagatccagacggctgtgagactcgtcctccccggtgaactcgctaaacacgccgtctctgaaggtaccaaggcggttaccaagtttactagctcttgaagagacccggttagggtttttagggatttcaatttcggtttggtttttagtacttgtaggaaattagatgcattattcgcttaacttcgtattttgtggctttgtaactctaggaagtagagaagattgttccttccttttatgaatttcaatgttggattatatatttttaacgatttttttttccatttcaatttcatttacctaatcactatattgaaatgtgtctctattgaagtatatgttatatgtgtgtgtttatattatttgatacgcgaaattggcctacttttccttcaatgatgttgctttcttaccttcttataacgaacagagtctaattatgatatgattggagtcattgaaatagataaaattgaagattagtagttgaattacctatcgttatcgttgtgccacaagcaggctataagcatcagatttaggtgaacccgcttaattttaatgaatagtttttggtgaacaacataaagcataaatcactccataatcatataatatagtttatgttctcctcctatatctgaattatggaggaacgagtctgaaatttcttaacaaccaactaatacagccgtcgattaaacaaaaattgatattgctgaaaacgtgggagtgtcaaaggggaaggagacgacccggaagggcaaaagaagaagagaagagttcaaagggaagggtaaattcgtaattaacaactctctgtgtgtgtgtatgggaaagaagagtagttagttaaacgtgcaaagaagcagcctttccattttcatttccgtttccaaacacataaaccgcaccaatcaaacaagctctggtttttgctcatcgatctcacaatcttttcgtttcctcgcaaaccaacacctaatttcttttgatccacgctaaaacaatccccatttcttctgatcaagatgtatcaccgtcttccatcgctaatggagccgtttctacggagtgtctctgaccgttggccggtcatcgctcaggctgccacgtggacggtgcttctaatgttcacggtggccgtcgcttcgtttgctccggagatggcttttgtgtctacggtgtcgtcttcgtgcggaggaggagatggtttcgtgaagattccgatggattttgcaggggagagtatatgcgtgccgtctaatatggtgaagagatcgcgttttgatttgtttgtgccttcgattttcgcggcggttatggtcactgcttcggcttgtttgatccgatcatgtattggcacggagaatgtggatgatttttaataaacacttgtaaattaattaataatcttgtattcagttactacataacatccaccattttgttattccaaatcacgacattatattaagctgcgtcgtagaatagttgacatttgtcagttttaacccaacaatttgatctgttatgttatccacgacccaaaatcacaactaaacaatttgacattccgttttgccatcgtccggttttaaatcaccatcaaattagtaaataacaaacttaaatatttattttgaatatttgatcaattatctatttttatgaattattgatcaagaaacaaaatttaaagaacatcggggacttgaaaaagtaatggaaatttcacaaaaccgaaaagcaaacggttaattcggttttacaaagaccaaacagaaaattcaataattcggtttggttcggtttaattacacctaacaaaaaagttgatacattcgtttttatttttccgccattcttgtcgatcttcttcagtcgtaaaaccgccgcgtctctgctgaccctcctcttctcatttcatcgacgggagaaaatctcataccatctaagatttccaacagtgaaattaagatg

SEQ ID NO: 28577 - DNA, 1099 bp, Unknown
  misc_feature (1)..( 1099): 2750-1469P.txt file - cDNA_ID_2997555; gDNA_ID_2926280; Annot_ID_143597
atcttctaaagaacacttcatgtctcagaaaaaagtatgagaggcttgagaatagtagggaaacgaattaggtttttttttttttttttttaaagtaatgttaaattagatttaaaagaaaattgcgtttttacaacgagtgcaacttataatttatacgagagagattgaaaacaggaagtagaaagagtaagctttgcgattaacttcgactttgaagccatcgttggaaggtggcctcatatcgatggtccttgtggcgttgaatggtggtgattctgttgcgcatttgtttgtcgatccattgaataagaatgagagcagattttggagcttcattatgacgtcttcgattcctctcatgccagatggtataaacggaggtttggaagatgtatttcaccaagaaacaagttaccttatccttgcgatgggctgagactaggttgagcagttggtgcctatcacttgtgtagtgatgctgaagcaatcctcgagcaagcgcttcccaaattccagctgtatagctgcaagaaaaaaagagatgatctctggactccaggcagttcgtacagaagtaacaatctcccactgcatctttgttccatttttgcatacggtcaccggtagcaagtcgatcatgagctgccaaccaaaccgagaaggagtgtttcggcgtttcatgtgtaaaccatacacctctatgccaagccactgtgttcgaggtagtgcgaatatgattccaagtatctttagtagagaacttttctttgttcgagttttttttttttaatcttctactgtatttgtgaagagcataaaggaacagaagcaatcatgacttctacggaactcgaagagttttatcgagtggaacaaaagattgaaagaacgtcgaatcgataataatgactaacgtaaattattattattttatttaacacaaaattgaatttaaaattaaatagtgattacgtcaccgttgtggcgactcatcaccgtcggttcgaatcagttgaactaatcttagaagtgagaacaccgttgcttccataattcccggtgaatcatttgttgttcgatttctccggcggagatg

SEQ ID NO: 28578 - DNA, 2472 bp, Unknown
  misc_feature (1)..( 2472): 2750-1469P.txt file - cDNA_ID_2997559; gDNA_ID_2926285; Annot_ID_143640
ccgaatctttcctttcgtctcctccgcacctctacgttgatacccagctgcaaactatatggtggtatgtggttattaaccattgccatgaatctaacaatattcataacatatacgcctatataacggaaactctttcttaccttcacaggttttgatagtgtattgtctttatcattgacaaaccgctgaacaagctttgatactgtttcccgaagttctttctctgtcaaaccacaagtagcttgaactgggaatatccgatggcaccagctgcatcaatgaatcataagttacttgtttcgacacaaagacatgcttacatcaagggaatctgagaagataatgaccaaaagttcctagcagagtggataaataactacatggtccaaaaagaatgaaataggtctgatatgtaacagataccactctttgggattataagacttgaaaaattattcgagactaaatcagaactctataagcatgcttatttcaaggtagagttgaattctaaggcaagtggcgataaaattctgattaatcaattgaccaaaggttcactaactagcattacaccagatagacttacattggtgccttcaaagctccagattccatagactggaagactcgtgatacgatattcgttgtattgggagagttttcaacagggaaagtaaagagaagcaagccactctttgttagcttaaccaatgacatgagagaattgtgttcttcatttgctaatttaagatcctcaacatttggattttcacctaaacaaggcacagaaagagaaaagaaagacaagaccataagccaaaaaaaaacaagaatttgaatatgctcaaatccgcaaatgaaagttacctgtttcctgcaaggcatcattctcaagaggtacagtcttctctccgccttcctctgtctcttgtgcacaaactttttgttttttggatgcagtagagtttagaacttcaggtttctcctcatgcatggacccaatatactgaacaaatcaaaagtttgatttccgtgagacaagctgaacattagagaacccccaccactgcacttataatcactttcgtttcaaatatagtgtttctctaccacaattggttatcaatcactctgagttatcttctaaatgaaggaacaaaaatccaaacttttgcctcactaatgatggagaattgtgacgatacctttccaaggatggacatgacctctttagtagcacttttctccctttctgataacaagtgaaaatcagaaatagtttaacttcaatccctcaattcgactctcgtttagtccaatacacagattccacaagtcataaactcggagacaataaaggaattcgagaaattgaaggtcatgtcgcaaaacgaaattaacacatagaaactaaaaaggatgatacaaaagagtattgtaaagaagatcatactgatgttgcaggtgacgaggaatccggaatgagaatgatgaagcagagaagagggagctttgtagtcgaatcgagggatgcttatgatgctggagtgttgctcccatggagtcaatgtttcagcttcctctcctctttctcttttttcacacacagtctcttcctctattgttcttccaacatcgtctacttcttctacagcagccatcgttactctctctacctctctgtctctctcaaagccagagttaggccaaaaaaaaaaaaaaaaaaagaaagacattgagccttatatgattcagcgattcggaaagtgcggtagcgttttaaaaccctgaaacgcgacgtttagagaacgcaacttcaaaacagctaaaccctgaagcttaccagaccagagacagaccaatagaacatcatacgaggtccaattcgatcctctcaagagtctgcgagtctgtgagggggaagagatgcagtttcttgcgcggaatctagttcggagagtatcgagaactcaggtaatgctcccaattcatgttttcttcgtaatttgcctcctccttgttgggattgttcattaccatactctgttcctgaagacttgtatatatttgaggattaaagatcgaattttttgggttccctccaagtgcatagatcttctgtaccataaagtttcatcttttgaatgggaattgactttctataaagtttgcagaaattttgagacttgatttcggagactacttcacctccgatgctaataacttgtgtttcatcaactgatactgtttctacatgtgctttaaaatctactgagagacatgttctttttaaaatggggtttcaggtcgttagtcgaaatgcatattcaacccaaacggtcagagacattggtcagccaactccagcatctcatcctcatgtaactctcatgtgctatatgttctcttggatttgcaaatgctatttatatgctcagatggttcgctcttccccatcagttaatg

SEQ ID NO: 28579 - DNA, 59 bp, Unknown
  misc_feature (1)..( 59): 2750-1469P.txt file - cDNA_ID_2997566; gDNA_ID_2926286; Annot_ID_143645
ttgaagagttaccaccaagactctttgctctacaccggtacccttccgagacgaagatg

SEQ ID NO: 28580 - DNA, 3003 bp, Unknown
  misc_feature (1)..( 3003): 2750-1469P.txt file - cDNA_ID_2997581; gDNA_ID_2926288; Annot_ID_143649
gctgatttaaacaaagcgtttacggttatgaatacggaagtttgctgaagcggacgattgtaatttcaagtgtcatgaaacattttgaaccattggtttaatggttcaaaattaaaacgtttgcaagagttatatgattggttaaccaggaggtgctattacggttaaactaaaataacaaaatattataatttataaattatacaaaatataaaataccaaaaatattatattattatgataaatgtgaaatttaaatataactaataataaaattaaattcttcctaattattcaaactaattaaattttatactcaaatatgcatttgcttcataaaaagaacatcatcaagtaatatggaaatgacaaaaaaaaaagattaggacaaattaaaaaaaatattttcaatttttgggtgttctggattaataatattattacaatacttagttagtatcttatcattcttcagtttgggttgatactatgattttgatagagaaaaaaactaacattttgtgaataaaaattaccaccatatattaaagttttgaggaagaagcttacactgaaaagatgacattgttgatgtaatgtgtaaacaagcaaaaaattattacaactaagatgtcatttttgttctttaaggtctaattaaatttatctttgaggtatggttactctcaaatctccaataatcaattcgatttttgtccctatatttttttgtttaagtgcatctattatctatttttttggttcaagagtttatttctgaactgaatgaaatcttagcataaggtaacatcgaagaaaaaggtcaatggaagaagaattttaaagaagagacattaaagatttttgagtttcttcctcaaaatattcaaggatcttatcagatttactaagtgtcattgtggattttaatcaataactaataatcatctgagtacgttttatactcccaataaaaaaatatttaattttcaaattctgaaaaacaaacaaacatagcttttacctttttatgcctcttcaacatatgaatcaagtatgcatgtggaacattaaaaatcaaagatgataactccatataacatattcttaaaaatctaaaatgactttaacctcaccagaattagcaaatggtgattttttaactcttttcatttttagtttcttaatgactcttctaaatagatgttcgtaaagcaaaaaattagcttccaaaacttataaaggctatatagatcttactaaacaaaaataaaaaaatgcattgtgtttccaatcacttttttaatgaatctttttgtctacatatatcatgaatcatgacaaataacattcaatacctacatacatcttaacaaaattatattaaaaaaaaagcccgcgacttggcgcgggttttgccctagtcactttaaaaacatgtaagagaaaaatttaaacatttactgagatatgcatgtgatgtgggagaggtgattgtggccgaagacaattatagattaaccaatgcatttaaaatcccttcataatttaattttaacttaatttcagacgacttcttctcaaaattttatcaaattcttcgaacctaccaactaaacgaaaccctaaattgtttggaattatctttcttttggattttcgtatttttttgaaatcagtatagatgataatttaatcaagttggtaaagacaattcaaatatttttaagatatagacatataaattaatgtaaatcgtttgtaaacatttaattatgataaattgtctacatgttgatagtaaagacaatttagaatattatattacttaaaacaatttttatcaagttagtaaaaaaatagtttaacatcaagttaacatatataaatcgtctttgttagttttcttatttggttaagaaaaaataaaataaaattttataagatataaggacatgtaaaattaatataaatattaataagtttaattcattttgatacatataaaatcggattgatagatttgacacgtgttacgatcatgcaactttgaaaaccatactatatataattattatatgtgatattttagatgatttcaactatgattttcttctcatgaaaatattatgataaaagtcaattttacattatcaataacaaaaattcactatattactatttaaaaaatggaaaatgcagcaaccaaataatatttatgtggttgttgaataattaaacgggaatatgtcattaaaatccccaacttattcaaaatattgatttaaatcctcaagtctcgatgcaacaaaataaatatcaaacttaaattgactttccaaataaatactcaacttttgttgattttctaaataaataccaaaagtttattgatctgacaatattaggcatgacgttatgtaggttaatagaccctgttatcagagtttattgtgttttaacagactcgttaattgaaaacgataacgttttctctaataataaaacattatctttttgtcataacgaatcaattaagtccctagtttcaaatcatatggggatttagggttagggattttgctcggtttaggggtcttagattgatttggggatttattttagtcattacaacacaacgacgtggctctgttgttggaaactataatacttcgaattaataagatttattaatttagttaacagtatttctaatatggccacaacaaaaataaagtatttatttagacagtaaacataaatttaatatttattcgttttgtcgagaattggagatttaaatcaacgttttcaatatgtcgaggatttaatgatattttttccagaattaaaccctataattggagattaatggtccaaattgattataaaataaagaaagaaaaaaaaaaactaaaccttagcaaaattgttaacttctcttcgtcttcttcttcctccgaccttggaaaatctctcgtgactcgctagtcttctctaatg

SEQ ID NO: 28581 - DNA, 3003 bp, Unknown
  misc_feature (1)..( 3003): 2750-1469P.txt file - cDNA_ID_2997593; gDNA_ID_2926288; Annot_ID_143653
acaagcaacatcactcttatcttcatcaaacggttctgtcaccttgtctatcatgttccaagctttatgaacctttagtgccctcttcatcctcatggcccataccgtgtagttgatagcgtttagcataggacattggattgaagaggatccactaacttctttcgttgttctagctgcgggaacgatatcactcatttcttcttatgattgattcaatagcctcacgctctgataccaaatctagagtttaagaaagattaagaactcaaaatataaagaattactctctttattactttaggaaaatagctcaaaacctaaagctctcaatctcacaatctctctcaaaagctcataagttataccacacattggtatctccttatataatagagattcaacattatcctaatcattagataactcctaatgaatattctagataactcctagaattacaaggaattccttttctcttaaataaataaatgacttattacttaagtcttcttcaagcttaatccaacatatattgccttcttggtgggataacatagttcaaaataccgagttattcattgttggaatgactggtagaggtgaagttgtgttgtcaccgtactgtctagtactagaaccatgttacattgattaattcaacctcgagaggaggagtttcacaagagttcaaatacaaggtcttgaagtgcttataagggtacgagagtttacacttctctagactatgctgagaatttgaaacttatgtagggttcaaatcttatttttaagcttttgtctagttttggataaaagaacaaaatatcaaaaatcttttgtatgttcatatatattttattttttttaattaatatttcattacttttctttagtatatggagtatttttatgaaacaagaattgtgagaattatgaatcttacctcttacaattcttacatatttttggattacaccaacaaaataagatattttgagctgagtgcctgtttttcttggcttttactctttttttttttttttaaacattctaggttagcttaacaaaaacaacaagcaaacaaaaccttaggatgggagttaagtcattacaaacttagcagcaacctatactctcaatactcactacaaataagccccatgattctccatcttcctcaaaccatttccacctcaagaaataaatcatcagagcctcacacatcaaacacaagtaatggcctccacggattcagtttaccgtcccacaccaactccagaccatgacactactgttgtagtagttgtgtttgtttctttgggttgtgtcatgttcttggcgtttctagcgtttgttatctggttcttgatcaagaagagatccaggaagcaccgtgagagatctgaagcggttcgcgtggatgaacactttaagatgaaggaagctatagtcgaaggacctaatggacaaaagtctgtggtgttatcagttgaggatgatgttaagatcgaagacgcgatcaagagagaagagaaagatctgaagaaagatggtggagttggatcatcagtcgtttcccgttcgtgaatgagctttcttcattcataatgttacctatctatttatttatattaaaattgtggttgtgtgtgaatcatttgtttggtgaaataaaaaaaaagcatctgaaatatttatttaaattctttggacaaagatggttcttcaaacttgggttggtgaatggtgatggtttttatgttctaggagcgaacttttatctctatctctctaagaaaagtaatctttcaaaaaaaactgtagagaaataaaatagatagttgtttttggttaaaacagataatttgtaactgtaactcgataagaatattaattaaaaaaaacatacaatgtcaaatgaaatcatacttaaaattggacatttttctatttgaaaacttggtattggtatactaacacatataccatgttaatcttctcattatagttctacttaatatttaccaaaacaaaacaaaaaaaacaattatacgtatttaattaacaaaacaaatacattaattctgaagatggagaaaaaaattgtgtcttgataatgctaacttaccaagtctccatacatgataagaaaattacacacacatatatatatatatatataaatatgtcatatataagtttatttttgagctaaatcttcaaaaagtttctattgtaatttctaagcttaaacaaaaattgatacattcattgtctaatactgttctggttgaattcaattttatattcaattaaaattaatattttcttaccaaacatcacattcatacataaaataaacattggaattatcattctgaaactaatacaacatttaaatattagaaatcctataaaataaaaattcgtcctttcttttctttgtcaaccataagatccaatggctcgttgaatacgtagttacgtacaactggcattctcgtgtacaaagtcactaaaacaaaaacaaaatccattatagatattaaaacgactaaatttaattatagcaataacaattgaacagcaagatcacaaatttagaattcaagagcttaaaaaattcattaaaagtagaaaaatacaaaaataatacattaaaattcaaagttcatataattggaagtaaaaagaaatttttttatcactctcaagttttgtcttaaatgggacaaatttaactttttaaacaaaacccacagaatctcaaaccagttagcaccccttgtttcaccccacggtttgtttaacgaacaacagccaaccaccaaattactattataccctcatcaccatttgactatttattagtccacactctatagtagttgttacattcaaagaactccaaagtaaattaaagtcttctctacttcaccataaaaaatgcttgcgcacaagtctcttctctcctttaccacccaatgggctacactaatg

SEQ ID NO: 28582 - DNA, 3003 bp, Unknown
  misc_feature (1)..( 3003): 2750-1469P.txt file - cDNA_ID_2997593; gDNA_ID_2926288; Annot_ID_205491
ttctccgatttgtaaagctaatgcttctgggattgattgaaacaacaaagcacaagcaacatcactcttatcttcatcaaacggttctgtcaccttgtctatcatgttccaagctttatgaacctttagtgccctcttcatcctcatggcccataccgtgtagttgatagcgtttagcataggacattggattgaagaggatccactaacttctttcgttgttctagctgcgggaacgatatcactcatttcttcttatgattgattcaatagcctcacgctctgataccaaatctagagtttaagaaagattaagaactcaaaatataaagaattactctctttattactttaggaaaatagctcaaaacctaaagctctcaatctcacaatctctctcaaaagctcataagttataccacacattggtatctccttatataatagagattcaacattatcctaatcattagataactcctaatgaatattctagataactcctagaattacaaggaattccttttctcttaaataaataaatgacttattacttaagtcttcttcaagcttaatccaacatatattgccttcttggtgggataacatagttcaaaataccgagttattcattgttggaatgactggtagaggtgaagttgtgttgtcaccgtactgtctagtactagaaccatgttacattgattaattcaacctcgagaggaggagtttcacaagagttcaaatacaaggtcttgaagtgcttataagggtacgagagtttacacttctctagactatgctgagaatttgaaacttatgtagggttcaaatcttatttttaagcttttgtctagttttggataaaagaacaaaatatcaaaaatcttttgtatgttcatatatattttattttttttaattaatatttcattacttttctttagtatatggagtatttttatgaaacaagaattgtgagaattatgaatcttacctcttacaattcttacatatttttggattacaccaacaaaataagatattttgagctgagtgcctgtttttcttggcttttactctttttttttttttttaaacattctaggttagcttaacaaaaacaacaagcaaacaaaaccttaggatgggagttaagtcattacaaacttagcagcaacctatactctcaatactcactacaaataagccccatgattctccatcttcctcaaaccatttccacctcaagaaataaatcatcagagcctcacacatcaaacacaagtaatggcctccacggattcagtttaccgtcccacaccaactccagaccatgacactactgttgtagtagttgtgtttgtttctttgggttgtgtcatgttcttggcgtttctagcgtttgttatctggttcttgatcaagaagagatccaggaagcaccgtgagagatctgaagcggttcgcgtggatgaacactttaagatgaaggaagctatagtcgaaggacctaatggacaaaagtctgtggtgttatcagttgaggatgatgttaagatcgaagacgcgatcaagagagaagagaaagatctgaagaaagatggtggagttggatcatcagtcgtttcccgttcgtgaatgagctttcttcattcataatgttacctatctatttatttatattaaaattgtggttgtgtgtgaatcatttgtttggtgaaataaaaaaaaagcatctgaaatatttatttaaattctttggacaaagatggttcttcaaacttgggttggtgaatggtgatggtttttatgttctaggagcgaacttttatctctatctctctaagaaaagtaatctttcaaaaaaaactgtagagaaataaaatagatagttgtttttggttaaaacagataatttgtaactgtaactcgataagaatattaattaaaaaaaacatacaatgtcaaatgaaatcatacttaaaattggacatttttctatttgaaaacttggtattggtatactaacacatataccatgttaatcttctcattatagttctacttaatatttaccaaaacaaaacaaaaaaaacaattatacgtatttaattaacaaaacaaatacattaattctgaagatggagaaaaaaattgtgtcttgataatgctaacttaccaagtctccatacatgataagaaaattacacacacatatatatatatatatataaatatgtcatatataagtttatttttgagctaaatcttcaaaaagtttctattgtaatttctaagcttaaacaaaaattgatacattcattgtctaatactgttctggttgaattcaattttatattcaattaaaattaatattttcttaccaaacatcacattcatacataaaataaacattggaattatcattctgaaactaatacaacatttaaatattagaaatcctataaaataaaaattcgtcctttcttttctttgtcaaccataagatccaatggctcgttgaatacgtagttacgtacaactggcattctcgtgtacaaagtcactaaaacaaaaacaaaatccattatagatattaaaacgactaaatttaattatagcaataacaattgaacagcaagatcacaaatttagaattcaagagcttaaaaaattcattaaaagtagaaaaatacaaaaataatacattaaaattcaaagttcatataattggaagtaaaaagaaatttttttatcactctcaagttttgtcttaaatgggacaaatttaactttttaaacaaaacccacagaatctcaaaccagttagcaccccttgtttcaccccacggtttgtttaacgaacaacagccaaccaccaaattactattataccctcatcaccatttgactatttattagtccacactctatagtagttgttacattcaaagaactccaaagtaaattaaagtcttctctacttcaccataaaaaatg

SEQ ID NO: 28583 - DNA, 3003 bp, Unknown
  misc_feature (1)..( 3003): 2750-1469P.txt file - cDNA_ID_2997605; gDNA_ID_2926288; Annot_ID_143656
cccactttctttcataatgaatttttacttgtaattttagggtgcaaattctgcgtttttgcgtttgttaatgtaattatgcagattttttcttgattgacaaacttcttgcataatcgcattagaaaacaccgttatgtcattatgcgtgttaccaatcaaaaaacaccttaagtaatagtatcataagtgttcgtaatactgtaagaatatgtgagattttctagtttaagattggaaatatctaagtgttgggtgaaaatcacaagaggaattattgtattagattgtgataataagtggaattattaatttgcatttgacatgatatatggatataaattgtaagacgacagattttttaaaaagttattctaatcaaacaagtcaccttcaataacaattgattagaacataccgcgtcatatagtaaaaaacctttaaatcatatgttaacattctcttcttctataaagtaacatcaaatagttactacaatgagatatacaacaatcaagtatggtatttagggtttaacgtaagatttgagagatatgatttatgcaatgacatccaaatttgatagatattgagaagatatagaaaaagccaataaaatattgatagtggctaaaatatttgatcattttcatataatgatatttgcattgtttagctttaaacttatacgtggataaggtaatctaaagtgtgagaaataataatttgctgataaatattttgtagagataatttgagtatagtgtttgatagaccagtttaagtctacaatcttctttctgtaaatgagttggaaacatatcaaaaagacgagtcagatatactcaaccatgttttaaggtagtaaaaataaatagatcaaaatattcaaccatgtttccaatggcaggagaagttcttgcaataccaatatctttggctatatatgagtctgtttttttaaccattagtgattgtaatttaaatcaatataaaagctatttggtttgtggtgttgttaaaccgggtgaagcactctctcaactctttatacatattttttctttttgttgactaataaatttaacattttaacacacaaaaaaatgcttttgacttaaaattggttacatgcattattaggttcagaaaaaatgaggtatttaagatttatattcagcaatggttcatatatatgctctcatgtctgattttttcttttaaatatatttatgttagaaaatgatctgcaacacatcagactaaaaaactgaattattttttttatatattttctaatattaatagaaaacggtttattaaacaaatgaatatgcaaatactctaaaccgtgagaattccttgtggagtttcatttgtatataatatttattttctttgctttataactttaaaataccatcatgattattatagttcagcttctatgtaatgaaaccatgtagacaataaaataaagaaaataagaagcagtttttattatctaaaaagcgtagacaaaaataattaagaaaacttgaacaaaagaaaaaagatagaaagttgagacgaaaaagaatatataaggggaatgggaaaaaaaaatcatctaagcaagggatgaagatcaaactcgagttgtttaatctcatacataaatccgctttcaaattaattttatgttgtcgttccataattatattttttcttaaaaatagtcttgttttccattctctctctcaaaccaaatttacacatttaaataaactttaaacagaaaaaccactattaatgtagtaatatattaaatattgatatatttctatatcaaatttaaaactaaaaccaaaaaaagaaagaaaaatttctatatcaaatttagaactaaaaacaaataaaaatagtgtcatttccattatgttcttttaaaccaaactttacattctaagaaaaaacactattgatgtgtatattaaacttttgatatctttctaaatcaaacttttcttaaggtatttaaaagtgatagtattctgaatggaaaaataacaatttaacactaaaaccaataaaataaagagaaaaatgtttgtggctaacaaaaaaaaaaaatccagattgtgattacaaaaaaaaaacatttctagggcatgtcattgacttcctttgaagaagaagaagaagagagagagagactgaaaaagaaaaagtaagaaagggaatgaaataaatccgatcgaatacaattttgacgtccgcaaggacactattctctctcttctcatcttcttctttctctcttctctctctctctctacagcgaagaacaggacacaaattactctgtgaagcttaaaaaggtataatttttaataaaacccagaaactacaatttctaggcggcagagaaaatttgtttctacttctttttgtttctctttgtcttctcgtctctttatccccaaacccatcaataaaaaaccctaaaagacttcaaatttcttcaagattttgttcatcggaagttttcagatttttagttgtgtaaagtctcttcctttttgttcgattctctttgttttgagtcttatcagagacttattcttcaattccacctctgggtaagtttctatagattctcactagtaatctctgttttttttctcaattagggtttgatcaaagtttcgtttttttctttctgggtttgttcttaacattatgcttttgttttgttaaggtggtgagagttggaaatggagtagatttgcttaatttagatctgtaagtaatcaacagacagtgttgtttggttctagaatgttcgatacggaatctcatcactcagattcatctctttccgtggtgtttacgactctgaagcttatcattgctcagaaagaatacgtctttgctcctacacagagctgagttttataaagtcgtcagttttgtttcttgctttctttgttgattgtggagttgtgaattagtaagagtatg

SEQ ID NO: 28584 - DNA, 3000 bp, Unknown
  misc_feature (1)..( 3000): 2750-1469P.txt file - cDNA_ID_2997609; gDNA_ID_2926288; Annot_ID_143657
gcggcggccttaggagtatcatatgtacctccaccggaacctggcatctcctccggaggtcgaccaggtcgctgtttatcatcggcgtgcctcccccttgcttggcagcctttttcttcttcggcttgtcggctctggttgacgacatacgaattggatccattccgcccagggttatgacgcgtctttgtactcgcggcggtgacgccaccgacctcgtctcggacgaacttaaatcgtcgccgtagctatggttgcttttattctgggaatcttcaaagtcgctcatctttggttttcgacagagaaggacgagagagatgaaagaaaagagcaaagaaggcagatcgagaaagagggaatagcagagaaacgaaggagatagcaaaaaaaataaagacgagatttttctacttctacaaaacaaagagcaataaataataaagaatgagagaagttaccttgagagttgtgtgagttgacgtgacgtcaaatggataggtgggaagttatttaaagccatcatcaccacgattttcgagattgcagagatctcttctccgcgcctgatctggaccgtcagatgcggtgcgctgaagagacgctccatctcagccgtccacatcagcagcgacttatctcgcgtatcctcctcgaaatctttcggttaagggaatctgaaattaaatcgaaattgttgagtttatcctcaaaactgagtgatctaatcacatttatcttctcatcaagaatattttcgcaatcttacctgacctatatgtccgctcatcgagttcgcttactcactcaatgggctggggggcaaatgttggagctggattcccctccaggaatccacctgcgaaaataccaagccagcccacaaaagcccaccaagcccaccaagtagaggacctatgcagctgacgagcccacatacgcgaatgggtacttgggccagataagcccagtcatctgatgaagggagataagcgaataatgacctaggaactgatgaggagatattcgcggagcggacctgatattttggaactgacctgatgaatatctaggaggatctccgcagatcccggacgaagctaccacgtgcgtagatctatataagggagcaaggacgacttggaagagacattcaatccagttcacattcgcacacacacacttttacacttgtaatctcttttcacattgtaaaagctttgtcataattaatacaaaagtccattcgttcttagcaatataactctcaaggtttcagttaagatctagccctcctttctcataatcttaaatacaaatctctagtgtggattttagaacccacatcatctaagtacatatcaaccagaatgggagaatctactaatgcgtctgctcaaagatgcccctaaattaaaaatccttaagccaatgggttgtttatcagaagctattaaaattagaaaacccggtctgaccggttagacaagtcgaatcagagtcaccgagtttcgatgtctaggccggttctcctaaccgctaaaaacctttcaatattttaagtttgggttgcctgaattttcagccctatactagttgaaatctcaacattcaccctaaacttttagccacttgaaaaaccttcagaaataattttaatctcgataaaactacatgtactttcggatttgttcttaaaactacgcctccaattgaaccgaccagttaaccgataattatacatccggtttgacttacccataatttaaccgaaactaatccgattttgactctatattagcctaattttgacccacacaaaatgtaaataaattgtcttattaagaagtaaaagtatttttattaatttgtatttgtgataaacaattaaaaatattaaattattacttaattttagcaaaacttaatatgacaaaatataccccaaattatatttttagctacattttgttataaaattttgataatatacaaacatatacattttccttttggcaatcatttatatttttttataaatttaaagctatgtctttttttaaacaaaaatattcatttttcttgaaattataatatatgacctttgaactctatatatgtaatgaaattcaaaatatatgccaaatttatttttatagatatccgtaaacaccacaatcaaagtatatattatggtatttataaatttatttttctttatagattcagttttctttttatatattcaagatgagttatatatgtatatatatatatatatatatttatatatgattatggtgtttttaaaaagaaaatgacctttgaattattaaatttagagtatataccaaatacatttatatataacaccattgtatttataaaaagaatttgttgtctattttgttatattattttgcggtatattttgtttattaccaaaatatatactaaaattttattatataattttgtgtggtatattttgttattttattattttggtaaaattaattaatttatttttaattttttataaaaataaatgaaaataaataaaatgtatttttcttctaaagaatatattttttggatataaattgggttaaaataaagtcaaaatcggattagttttggttaaattatgggtaagtcaaaccggatgtataattatcggttaactggtcggttcaattggaggcgtagttttaagaacaaatccgaaagtacatgtagttttatcgagattaaaattgtttatggtgatttttcaagtgactaaaagtttaggatggaatgttgaaattttaactagtatagggctgaaaattcaggcaaccctttaagttttagccaataactttttattttcttcacatttagccacgaacttaataaacaagtgaagacctatcacattttgcagtttcaacaaataaatatcccaaaatttagtggcggcgagagggaaaccaaaattcgcgagagagaagtatg

SEQ ID NO: 28585 - DNA, 3000 bp, Unknown; identical to SEQ ID NO: 28584
  misc_feature (1)..( 3000): 2750-1469P.txt file - cDNA_ID_2997609; gDNA_ID_2926288; Annot_ID_205500

SEQ ID NO: 28586 - DNA, 3000 bp, Unknown
  misc_feature (1)..( 3000): 2750-1469P.txt file - cDNA_ID_2997617; gDNA_ID_2926288; Annot_ID_143659
aactaaggctaaaacactaatctttgctcttaagtagtgttggtttggattgatttttgttagaaacaatgattggagcataagttttgttacatgtagttatggcacatcgaacaaggagatattatcttatagaagaatgcttccaagttagttgcttttgtgctatatcttgaggacttaaggcttatggttagtgttcatactttgttttcttgtttggtctataatagacactactggttgaattagaatctggaaccgacattagtgtttttgttggccaatattttgttactgcgatgaaatgaaaaaatcacgagctgatgatggctatgatgaagcttattgggtctgatgatttgggtattaataataaactccttagatttagtcaaactatgatcctacaggacctcctcatctcttagcaacaatgtaatctattactagggaagaacaaaaacaataatctattttatggtgattgatgcttgattggaacaattaggcaatgatgctttcagatttagaaagtcttgattttggatttagtcttggtggacgtaatatggtcggcgttaggagcagtggagactttgaatttcatgtgattaaattgtgattatgcaacatttccctatgctcttaagactgtgattaaacaaaactttactatagtagcgaaaagcaacggtcagtttcatacatgatagttgatgataactgtgtgtgtgaatgcatgtatattaatagcattccggtgaatcataacttcattctaccaccattcaagatttagcaaatacagacactaactacgaaatgagattcattggatataaccaaattccaagcactcctagtcctcttggctttgggacacttttaagctctgtcaatctttatttctgttttgaactgaacgtttgttgtcattggctgcaaaagctgtcatttggctaatgatcgaattgtggaaacaaaggataattatagaatggttcaaagaagttggtttcttcttggtttaaatcttgtttcttcaatgttcaaatacttttgatgtcttttattaatttttatgaaacaattttttttttcctaagaacctaattagagagactaaccattggactaagaaaacttaaaataaaaaacacaagttctcatctaacaaaatttcaaataatttatactaaaacaattggtgagagcccatgggggactctcaccgttggagatgctctaaagtttcttctacgtttgaaataatacattctgatttgtggacttctcctattcctagtctatccggaattcgttactatgttttgtttctcgatcaattctctcattttctatggatttatcctcttcgcaataagagtgatgtgttctcaaaatttctgcaatttcatacctatgtcaaaacacaattcgagaaacacattaaatctctacagtgtgataatggtggtgagtataaaaactcacagtttcatgatttctttgctaaacacgggatacagtttcgtttttcgtgtccatacacctctcaacaaaatggcagattggaacgcatgatacgaacccatcaacaatgctttttgcactatgctgcttcaagctcatcttcccaatacgttttgggtagaagctctaagggcatctccaatagtaatctctatattttcctctatttatagagatgactctattttaaagacattgtgctccaatggtcacctttaaaatagagtttcctctgaaatagaggaaaaaatagagatatatactttttgtctctataaatagagatctctacaattcatctctattttttcctttatttttgaggaaactctattttagaggtgaccactggagcacaatgcgtctaaaatagagttccctctaaaatagagaaaaatatagaggtgatcattggagatggtctaaataatgcagttcacattctcaatctccttccatccacttctatcgataacaaaattcatttctcagtgttattcaacaaaacaccatcttactctcatcttagagtttttggttctctttgttatcctcacacaaataatcaaaacaaacttgatccaaggtcatcaccatcagctttcctaagttatcctctacttgactcagggtatagatgttttgatttaaaaacacggaaaattgtgatatctcgtcatgtcacattttaagaggatatcttcccttaccaaatcaccaatgctaaaatcgactctgcttatgactttcttgaagcggatacagagccttctcaaattcaaaagcagcttttgcttacaccttctcttccagcgacaaatgaaacagatctagttttgactgctcttgctcctcatgtagcgactcaaccaccaccacagcgtatggtgactagatcgcagcagggcattcgtaaaccaaagaaaattctctcactaaatgctcaaacactttcccaaattccaaagggttataagcaagctctaatggatccgaattggaatccttcaatgacagaagagtatgatgctttgattaagacttacacttggagtttagtgcctaaacctgcaggtacaaacatcatcaattcgatttggttgtacaagcacaagtttaatgctgacggctcactctctagatagaaattcagacttgtctctaatggtaaatttttggaacaaggagtcaattttgatgaaacgtttagcccagtggttaagcctgctacaattcgtgcagtattgaactttgcggttgaacgacattgcctggtgcatcagttggatgtacaaaacgcctttttgcatggagagcttgaagaaacagttacatgtatccaccagcagggtttgttgacaataggaatccgggttatgtatgcaagctaaataaggcgttgtatggcctgaaacaagcaccacgggcttggaatgctcggtttgtagcttatgttaaaagatg

SEQ ID NO: 28587 - DNA, 3000 bp, Unknown
  misc_feature (1)..( 3000): 2750-1469P.txt file - cDNA_ID_2997621; gDNA_ID_2926288; Annot_ID_143660
attacgacatactcatatatcctcagaacaaaaatctagaagctagctgcaaaatttactaccttaagaacaagctcttcaaaacattgctcaacgttgactcgagtctttgcactacactccagaaacaaacatccgtactcccgagcaaagtctatgccttcttttttagaaacagctctttcactctcctggaaattacataaagatcaattgctatgcaacattatagacactcaacatgaggacggagagacgagatgatcttaccttatcaactttattcccgacaagcatcttaatgcaatcctgattagtcgaatagaggtcgatttccttagcccatatgtctgataggtttgtgaacgtgtctcttcgtgtcacatcatatactacacaattggagaattccaagtcacttatagggatcacggatgacaaataactgtgtttattaagagtgagacatacccataattataccctgagctcctctgtaatacgaacttgttagcgtcctaaatctctcttgcccagctgagtgatcataaacacccaaaaactgatcagtgatcacagaacaaccgacaaatcgcaagagactattctctcaactgttctaatatcaaaactattctaaatagatgagtctatcctaagcttattctagatacaagactaatcttaaaataattataagtaatactgttacttcatctataaactattctaaatacaagactaacctttaaaatattctaaagacaagactaatctctaaactattcaaatacaagatactaatctctaaaccattgcaaatccaagactcttcttcttcaccagtcacattagagcttaggcaacaatgactgactaagacacaacataaaaaaagattatcacacatcattgtgggagacattctcaaactctatattgttcaatgattcccctaaacatctaaattgaaaccacaagatgtgtgacatttacataaattccaaacaacaacaacaagagtattgatctctcacctgtatcccaaatcgcaagcttgagtttcttttctccaattgtcagatacttaaccttaaaatccacacctagacaaaacagatccaagatcaaaaaacaaaacacaaaagctaagatcggtactttaaagcttgatcaattaatctaaaactcaccaatcgttggagaaagatcatcaaaggtattagatgtgaaactcaacaaaagagagctctttccaacaccagaatctccgatcaataaaaccttaaacaagtaatcaaattcgggttgtcctgacgaagaacccatcgatcaaaatccaaccttttttaatttcctgagaacaaattttacaagggtcggaacaaaacaatcgaaagatacaaactttaacttaaaggatcgattttttttaagtttctctttaccttaaggctctctctcgagatctacgagaagaatgacacgaacagaggaaaaagtggaaagccgaagagaaaactcgtaagagagacttctttggttaagatgcctctttaatttcaccgactgacaattggggacgaatcttctacggttggtcttacggagttttatcgtacaccttcctttctgtttgttcataaccgttggatcgttaaacgtttttttattcgacgtcggccagattggtatgcatttcgtctagttgattttgctctgctaatgggccttggcccaattattctgctaatcaccggcaaggttcttttgctgcattatttagatgttgaatcaaagctgtttgatgaaaaaaaaaaaattaaaaaaaaaaaaaatcaaagctgtttattcacacatcattgccattacacaggctccggttctagaaagtttgagtataaaactaattagtcaaaagagtgatgcttatagagatattgaagtatgtgttggaaccgctattgaacgatgtgtgcgtgagctatgtttcgagagtgatacttgttctattgggtctgctctagtggtacttccaagtagcttgtgtacacgttcttcagacttcagtgcttgtgactttgatgctgtacaatgtggttcttatggatctgttttcattggtttcttttctgttattagaatgtcccacattaactgatctcaaaacctagttctagagttaaggattgtcaccttctttatatattgtccaaagatgttgatttcaaccaatatggatattctaataagcctcctcgagatgtgggtgtgaaacgatccaacagaaatcagtttaagcctaacatctcggaaatacaacaagacatgccacttgtatgggccacataggtgggaaaccattttttggaaattttgtttgttgagccaaccatgagctctgataccatattgggaatgtggcttaatttatcccaaaatgtaactttagagctaaggattgccacatcctttatatattgttcaaagatcttagtcccagccgatatgagacattctaatacacatctctaaaaaatttggctcttctatcattgaagtaccttagggataaatttgtcctcttgcttttatctggttgttatgttcttaaaacgatggtcatagaacaatgtccgggtgatagtgcgggccatttcatagttagaaaagcctctttaaagatgtttaattgcgtaaagaattaggagaccgatgctaagactacgggagggtattgggagataggatattcttctcaatattcttctcaatatgtttgttataagtttaattacgactttgttaatatcctcatgtacccagaatctaggaaagatctgaactcttgtaactgaatcatgtatatattcactctaatgcaaagctatctcctcaaggagacttacacaatcttacatggtatcagagcacatctctctttgattgcttcttctctcttatatctcttctctattctcttttccttactcaaaaatg

SEQ ID NO: 28588 - DNA, 2460 bp, Unknown
  misc_feature (1)..( 2460): 2750-1469P.txt file - cDNA_ID_2997629; gDNA_ID_2926290; Annot_ID_143664
acctcaaaattttattttgcacgtatccgtgctctaattttattccacttctaatttcacgacagattattctttgtggatatgctcctattttgttagaaaaaaatgttgttgctagattttagatacttttgaaatgttgttagataaattattgtctatcgtaaaatcccaaaaaagtagtattatatacttacttctcctatataatatttgtgatcatttcacttctcaaaaagaaaaacaaagatcatctcctaaaaccagtttgaagaaaaaccataatcatccttcgtaagtttctcgtatgcatttttatataataatctacactacaatttctcttgatccatatgaaagatttctttatgtttttattttctttttttctttagaatggaatcaggagaccaggcaggagagacgtcaaaaaagaaaaagaaaggcccatatatgtcatggtcagatcaagaatgttatgagttaacggctatattagttgatgctatcaaacgaggctggcgtgacaaaaatggtaccataagcaaaactacggtagagagaaaaatactacctcttctaaataaaaagtttaaatgtaataagacttacacaaattatttaagtcgaatgaagtctatgaaaaaggagtattctgtgtatgctgcacttttttggtttagttctggttttggatgggatcccatcacaaaacaatttacagctccagatgatgtgtgggcagcctatttgatggtaactctcttttggttaacttcaccaaatttagatattttctgtcattattgataactaataaatatataatattttctcaggggcatccaaatcatcatcacatgcgaaccagcactttcgaagattttgaggatttgcaactgattttcgaaagtgctatagcaaagggaaacaacgcgtttggacttggtggtgattcaaatgctgaaacttttgaagaagaagatgatcttcaagcaggggataatgtgaaccatatggagattaatgacgacgaggtaaatgaaacacttcctaaagaaaagctgcctactaggaaaagatctaaaactaatcgtaacggagatcggtcagattcaataaatcatggtgagtcttcagagaaggtgctatctgaaatgattggagttggcactaacatcataaatcttattcaacaaagagaagaaagacatcaaagagaagttgagtttagggaaactgagaaaaaaaagaacaatgtttgggatgctatcaaggagatcccggatctggaagatcacatccgctatgatgcagtgaccaagatccacacattgaatttgaaagacgtatttgtgagcatgtctgttgaagaacgcttgggttggattcgtcgtaacacttaattagctttttattttcgatgcccttaataaaacaatacttaatttagcatgaaagactagttaccagttatttttaccaatgtcctaaagatagtcacatgccactatcattttgccgtgtgggactaataaaaaaaatgtagtgttatagaatacacatacatgtgtcttcactttacattatatacattaaattttgattgattttttttcttttcttttctaaatcaattatgaatttctttgaatgcaattatagatataaacttttactttctcaataaaactttagagaagacattaatagaagaagttttatcttagccaaataagaaaacatatatgtacatttagatataaatctatataatataagataaaatgatgaaacaaagaaatgatgagattgtgattatatatgaacatgacattgaccttctgtcacggcgtcgtttaaagctgaaagttaaagaagcaaatccaacaaaaattctgacaaaaaggcgcccttttgtttctttgaaatttggtgggacccacatgcttttgcagactaataataattattttcttcatccgtttggcacacacactctcttcctttattgctttttgcgaaactcctcctctctctcacaattgaatcaggacgatccaattgaatcgctatttttcttctccttcgtatgcctgatccctgtgagtattctgcatttaacattcatcttcacaattgattctaattcctcttttgttgttttcgattgtttggagattttaactgatttgagtttttttttttctctttctgggggttgaattgtggttgggattgggaaagttgttttctcggtgaaaaattaattgaaaatctgagaagattgattgcatatgcagcaacttaagaaaacgtaaatgcaaatttatctctggtaacaacattgtttgttggtgatttaatgtttgctctctactctttggtttatgaaattgcaggattggtttattaagcgtcactgttgttggattttgaggaagatgaaagcaaacaatg

SEQ ID NO: 28589 - DNA, 3000 bp, Unknown
  misc_feature (1)..( 3000): 2750-1469P.txt file - cDNA_ID_2997641; gDNA_ID_2926292; Annot_ID_143673
gatttggattctaaatttaagtcaacttcactaattcttctggtaagaagtaagacataacacaaggcttcaacaacacatatagattgtttccggacataaaggaatctcttttataacagttggtgagaaataaaattaaaactaaaacataaaaacagagaagagagatagagattttgccttcgccacagccgagcttgacactcttgaaaggagtgttcaatcgcaagaactcaagtaaggtcgttgatggatcaacagaatcaatcttgaatcgttccccattaactgcaaactccaaatccatttttttcccagagcagtgacaccagaatttttccaattataaggttagatttttgagaaacccaggaaacgaatcaagaaaacacgaagtgggtgtggagatttaaccaattaaagagagaaataagtttgagggagatgtgatgaagagtttcatatcagcttctcttatagttgcgcctctttcacgcacatctataagtttgagtttcagacataactcataagtcataagtcataagtcattgactgtgcgccacgagtcagtcttatgggaaaagaatatttgactttggaagaaatctcaacctgatccaatcaaaatcttactaaattgaaatgaaatgttttttttttttttaatttgaatttattgctaaacaaataaatttttctgttcaagtggggaaagaagataaaacgcaaatttgtagaaaaaaaattagaaatctattaagttaaaaaaaaattagaaatctattttaaaaacctttttttttttttgctcaaatctatagcaaaaactaatgtagtcttttattgatcaagcttaccatggcctatataacttgtatttaactactagtgatgcgtcgacaaaaaaaaaaaaaaaaaaaaaactactagtgatgccgacaaaaaaaaaactactactagtgagatagagacttgatttttcttaactagtaaacaaaaaaatatctaaaacaatagtcttgattttgtataatcaaaataacgttgttttacttgtgtaaagtcgtctcgttaacactttttattttagtctcgttaacactctagagtctggacatgtgacatctgactccgtgcataaactacaagttgactaacaccgattcttcaatgataattttcactcacggctattcatgtacattattttaaaaataacatatgagatttgatattgtatgaatgtgtggctatatttgtttttttccttctttgtgaaatttcaatgtttttatttaaataggaaattgtgttacaacaacgaacgagtctacagctttcacataaagaatgagaaaaatatagaaattgtgtaaaaccgaaatttaaggagatagatagctcaagttagataagcttgaatgtgaggtacatagaaccttttttttttggtttaaggtacatagaacttcttaaaaaaaagtatatataggaggagtacactatgtaagttgtttatcactttcaaaacaccatcaattcattcataacacctatgatgaagaaccaatttcaactttcactcatcattctaacgtttttcatccttcttgagttaggtttgtatttacatttgaaattcgccttaatatattaaaaatatatatttcaactgtaaataataacgaatattgtgatatatatatattgacagtattgtgatacttcttcaaaaggtcattctgtcaactatacaattttgttaaaaatatcaattcagctatagtctatatatgttatgtaaaatctatgtaacaattgcttttcgatacataattatgtgatggtaacatttactaagacatgttctaaatatgacacaaacaggagtaatgggaaatgtgcaacaagtgaaacgagaacaatgccatactgttattcctaacaaatctggaaaatgtatttttacggaatgtaaatctgcatgtgagaagttgaagaagcccgtggctagtctttgcctgcctcctaagacctgccgctgctatcatttttgctcttaatttgtttctatttatgataaaacttgatttttatttaattaacaataagaatatacgtttgagaagttgtgaagctatagcattgattttaaacattgtaatatgcgtgtttaagtagtggtttaacaaaaaaaaatatatctttatcttatcaaaaaaagaagaagatatatctttatgatagaaatacgtaacttggaaatttgtaatgattccaactttgaatatgaagaatatatattgcttctgccttctagtgaaataaggactaatttgaatactatatttttggaataaaaaactattacggtatggctcacgcaagcttgaagatggtctgcgggtttggttcgacttaagaagctaatctctaagtgtcttcttctttttgctctaaagtctagttaaatttttataaacattcaaattaaggatgcatatattgtacaatggtttttttttggttgattaaatttaacattcatttaaaaaaaaaaacttaacaatatcttcttaatagtaaaatgcttgggagagacgtgaaattgggtttgttgttgtagatgttttttgcacgttgtctaataaacttaggagatacattaacaacaacataaacttgttatttgttctctacatgaagccatctccacaaagcaaagcatttctcctatttttaaaatttcatttacttcacttttttgagaattggaaaataaagttgtaaaaatgcatataaaaaggaaagaactttatagaaaggaatcataatagataggcaaagttaaggaataacccaatatcaaagaaaacaacttagaaaattcatcttttctttggtatataatgaaatcgcttagatactctcttgtatcaacatacacacaaaatcctcttattctacatcaaaccaagaaaattataaaagatg

SEQ ID NO: 28590 - DNA, 3000 bp, Unknown; identical to SEQ ID NO: 28589
  misc_feature (1)..( 3000): 2750-1469P.txt file - cDNA_ID_2997641; gDNA_ID_2926292; Annot_ID_205543

SEQ ID NO: 28591 - DNA, 3000 bp, Unknown
  misc_feature (1)..( 3000): 2750-1469P.txt file - cDNA_ID_2997665; gDNA_ID_2926295; Annot_ID_143682
aatcttcactaaattatacgcccggttttgttggatcgcttaattaaaccgtcttaaaatacaacaccaaaacgaatcttctgaatgagtggtaataaaaacattatagacggtttgagctagtcaataacagcttctcactgttaacgacatctactagtataccatgtaacttgtttcgatcaaattattttattgttttttcgatcaaattaaatatataccctaataaaaaaagtcgatgtttattgtgcttatattaataaagtgaaacgaatataaaaagcacgtatatgactaattatcagttacgatttgacgcattacttgttttttttaatgtacatatcgactcagcgaaacgataacacgaactgtatcgttttttttttaattgcttaataatacttttgttatcgtttgaactctttttgaataaacaaggtatggacccatgagtaaaggtcccgatacgaagtatatgctttcggagaaaagaaagaaaatgtggagaaattacgttagattacatacaacgtcatttgaaatttggtaggccgtcgattattagttcttcggttacacgataatgtaaacaaatccatatcatcacattaatgttactattcatattttataattagccaatgaattatcttgtttttcttttgctctaaaataacgaaaatatggaatcaaactgaatgaaatatttctaagtcattttcaaagcttcacaaaatagtgatcactgcagaaaatattaaaaaaatacactcgatcggataaaaataatcgtggaagttagttcgggaaaaaagaaggctcactatcgtatcgcgtggagttgtctagagcacatgggtcagacaattctttcgcaattatatattacgtatttgttatatatgtgtaacccatgtatgtgaatcacacaagtgcataatatataatatagtatttttctcaaacatctatattatctatctacacacgtaagtacgtaacacatccatagaacaattttcaacctctacaaatacacttttttataactacaaaatatacttttttctgggaccaatccaaaattatccgtacactaccaaaaaatatttcaaaaataccagcaagacacatatatatatatcataaaggtaagataaatggaagagtgggacatgcattcctcacgtataatatatagtttttttagttttagttggcctttactaatttaattactcttaagtctcttatgggtcatgtttaaaggagccaaattaaggctatgcgtgcgaaaccgcagccaaacatttgaaagacaacttttaaacgtatctgaatccaaatcctaacaagtaattatattaatttattttagtgaaaagttaatattaagttaatcgagtgaaaaagttaaattagttttaattaattggggatgggatagttaggtcaagtttgcttcttagttctttagattcttgtgtgtttggtcgacttcttactattgccacatcactgcatgattataaatatatacatgcataatatctgcagcatctactattttattacaactaattaatagaaaaatgtattctcatagtttttttttcctactttgcatgttgtatttaagttatattccccaaaaaaaatcctaatattgtatcaaaacgatttaatttttagcataaaatctaattcgaatcataactttagttaacaaagatgtctatcaagcgatagtttagacaacaaaagtaaacagaaatttacctcagagcataaattcagtggacacacacacatataaacggagtcattaataactagtaaaacgaaaatgataagagaagggtatcgattgagcaaataagattccaaaaatgcaagttgactaatttaattagagtaaagcaagatatcaaaactaaaaaaagaagatattatgaagcatttaaattggatattaaacagatccaaaacgaaaaactccaagcagacgcatgtcaatctcactcaccttggtttattgtttttttataattaaccttctttttatatatcccgagtttcaaaaacttattcccagttttcacgttctttttgtatatccgatccaactttctgaatattcatatccatactgtctcttaaatgctaaatttcatttactttctcgactattccaatgaatttaatcattttgttcattgattagatagttcttgaagcatatcaaatattttaacaattatatatttaattaaatcatcactatctgctttccctttacttattaagaagggatattattatactttgaccatttttcatataattgttttgcactacacaattaacaaaattaaagctttgatgatgttacaaaaagaagaaaaaaggtactagtattttttttaaaaatcattttctccaaaacgatcgcaaaattcacgcaattctctcgtcgctcctaaatcatcctctttttgttttcttccattttttctgctttagtatatgggtttcttttttttgttttctttatattaataaaataatgtaatttcattttgtttttttggagtaagcttatataaatggagattccttggtcttcttcttcgttgccagttgccaccagacatacataacacattgaaagcagcttattcatcgacataccaaactctcactctcgccctcgctctcgccctcgctctctttctttcttcatgtaaattgtttgttcttttccatgtatcgagattcgatcttcttcttcttcacacgaacctccttattgttttctcctgcattctctctattcttcgctaaaccttgaataaagacatgttctttaacatgggtttttccggtttaaagtagttgtatctttgtttcccctttaaaccgggtttaagctcaatcttttcttagaacaactccaactgtttgacgatttgactgagagaaaacagagtcatg

SEQ ID NO: 28592 - DNA, 3003 bp, Unknown
  misc_feature (1)..( 3003): 2750-1469P.txt file - cDNA_ID_2997687; gDNA_ID_2926305; Annot_ID_143691
aaggtattttacaagccgctaagatttgtttagcagctgtaatatattgactaaattgtgggttttgcaagtaatcacaaaaacatgaattttgttctttcaatttttcgcaacattgagttgatggttggcttccgtctatcaccgatggtaggcatggttgcaattctgtcacggtgcatgccactttcttctcgccccacgaaactttaacaatccctccatatattggagccaccaacgatagaacaaagaaaatgaatgctaatgttgtaaatttcatgtattctaatataataaaagactcttatctaactgtagttttttttgtgcttagaaaatatatgtttgagattttgatgataagatgtttttgagaaaggtgaagtatatagatggagtaatgttttgcaataagccaaatataggtagtgtattttgtcttttggattaaattttagtgcatttcgtatctatgtgacacataattattttcaatataatttataagtaataaaaaatgtttaaaactttttttagtgttaaatatttttcaattaaactaaataattataattaactatccaaatctaaaagcaaatcatttacataatttggaaatatttgtttataaaccatcaatgcacacctaattttggatatgagaaaaatgatttgaaactatcaatgattaattatagataaaaagtaattttgtaaagtgagaaaacaaacttatacaaacgaataaaaatatctgtaaatcaattttgttgggttagggttgaccggttgtttgggtttaaccaggattcagagtctgggacttgaaaacaaactggaggctaattggattgttctttaaccaattggggaagtagaggtgtaagtgtttaacaatggtgcctctcaaacatttgaagaaggaaaatccaatcatcgacgcatgttttaggatctacactacatcgttataaacatactctctccacttgaggcaaagggacggattcattgcttcaaggtggattccgtgagggttagtttacagaacttgtaagatgaacttcgtgttctagtaaaacacaagtatgtccctgttaggcatttctttatccatgtcttgtgtggggaaaaaaaattcttcatatatactatttttcaagccttacatacacattgtgaattgtttcatttcaaatttttaagctgcagccaagaatgtaaaacatagattgttcctagagaaaaaaagttttgtctttgcttagcctttttgtactctcttttcattgtgtgatttcttctcaatgaagagttttgcatacaagctattgcgagtgtggctgagtcttgtatttagacactagttttgttagagaatcatcttgacaataattttgcatgcaaaccagcggtgttactatcggaaacctacttttggcattctcatcagaacaatggcgattgagaaaaatctagaaaagccaaaaaaatattgtttacaaattttgtagggtttccaatagtaacaccgctggcttgtttttcaatatggaccaaggttaaataagtaattggaaacaccggagacacattgttgtattactgaaaatactgaatttctcatcgatgatagttactaaatgtttattgtttggttcgcgtcctattcctatccagctaaaaatgaaaattcaatttttttttgttggaatattaattttgttgaatgaatgatcatatatattttaaaacatttttgtggtgttagcttaagaagagttaaaattttttaatgttttagttaatacaaattataaataacacaaccaaaaaacatctcgtgtaaaatagaagtttcgtgtaactatcgactgctactacgatgccatagtcatgctaatcatatgcaatgcgtcaaaaaatgaccttaccaaaaggttatgcatacgcacaaaaatgaaccaggagaagttggactagatataaaaaaatatcgatggaaaaagattggaagaggtaataacggattatgcaaaggagaaacaatcaaaacaaagagttatgttcgagaaaaagctacaagtcatcatcgagaaggtaatcaataattatcaaggagattactaaaggctattgagaatgtcattacttgtcgagaatctttgtaggattgacaaagaagtaataagtactaacgttaatatctttttttttttataattttgagaaataaggagagtatatcaagataaaacagaccatctgtttttagcttaaattagatgaattaggactaagcaaaaaacctgggatcgattatccgaactgaaacagatcaaaaaaattagaccgaaaaccaaacctgaactcgaagattttttttatttgattttaaattcctctatccgaaaaacccgaatccaaacatgatccgaacctgaatctaaatacccaaatattttatttaaaatctaaattttacgtaaaaccccaaattttacccaaaaaatcgggtatcaatcccaaaaaagggcttaaaaattcatacccaaaccgatattttggatttattctattaaatccgacccgacccgcttctctgaatgaccacctttaatattttgatgaacttattttgctttataaaaaaaaaaggaaaaaaagagtacgtcaaaaactcaaagaagagaaaatgacgaatctttttcttaaagatgaggcaattgtatcaagatacgaggacgaggttggtttgtttaacattatcccaaacaaagtttacggccaaacccgtcactgccacgtgtcatccggatctccttttggcttcgtctgaagacgttcgatgctcaccggtcgcgtctttatcctctcatcatcatcctcgaaacgtgcaacacacaaaaaattgactataaaagattgcaaatttctctctaaatatctgattcaaacgcatttggtaggctgagagaaagaaagaaaaagataaagatg

SEQ ID NO: 28593 - DNA, 3003 bp, Unknown; identical to SEQ ID NO: 28592
  misc_feature (1)..( 3003): 2750-1469P.txt file - cDNA_ID_2997687; gDNA_ID_2926305; Annot_ID_205836

SEQ ID NO: 28594 - DNA, 3003 bp, Unknown
  misc_feature (1)..( 3003): 2750-1469P.txt file - cDNA_ID_2997702; gDNA_ID_2926305; Annot_ID_143695
tgattagaaaaatgcttagatgtttaggtcgttgactagtttggggccttgagagccttggggtcaatatgctctaggattgattagtaataaagcaagattttgattcctgatcttaacagaatcattgtggtagataattcatttcatttctctaggtcagctcgatggatctctcctttgtttcttatgtgtctattactgcctaaaatagcgttaatggataattttgtgatgaacaggattcagttcaagccgacagggatgatccaaacctccccctagtaactgcaccatttggacatgcctcccaggtaatagaacaaacacatttcagaatctagactggttaattgtttctcctacttctatcctgtgttttgagttctactgatttttctctatgcctctttttttattaggaaattgtaaacctgctgctgtgtggagaagcggttcctaatgtatttgatggacggatggatcttggaggcggcatgtttctgaaaggcatatctaagaatgtagatgtgggcttcctcacgttgctcgagtctctcaacttctgcaaagtcggtcagaatctcaaatgtcccaaatggccaatatgggttattggcagtgagtctcattacaccgtcttgtttgcacttgacccatccgtccaagaagaaaacgaacttgagctgagagagtctcagataagaagagctttcgatgcaagagaccaaagcggaggaggaggtttcataactgtggaggcctttcaccaagttgctcaggaaacaaacatcagactcccaatcaagaagctcgacgacatctgcgccacgggtttcatcgtgtggagcgagttatggcaagttatcttggaactagaccaaaatttgggagggataaaagatgcaacaggactgatgggaaagaaagtgtttgatatctatcacttcaacggaattgccaagtccgatataaacggtggtggtcaagcaatggctgtggaaggtgggatggttcctatgcaaaggccaaggctgacaaaactaaacgtatcggttcctccaaaatggacaccagaagagtacatgacatgtgcactgccgccgagcagctctgagaaagactcagaagtgaatcagccaaaaccggtccaacatgcaccactggtggattgtatcagaactcggtggtcgcgtgccgcttgtagctggtctggagatcctccaagtatagtctgaagaatgttgtattatgagaaagcttgagcgtttattctggctcattggattctaaagaaagaaaacggaaactgctgatctgatttggcggttaacacgcgtctgaactttctttgcgttgtccgtttttttcatgttgtgtattgatgtagaatttttgttatctattattgaacattattgagacaaatgaatatttcaattgttggataaaattgctttcaataacattgatcatattctgatttaagactaaggtcttgaaatggctaagaaactatggtttcatcccaatacttaaacaattacatataaattttactttttgatcatgtatatttacttttgttattatatcgcggtacagcatgcaccacaatagtagatagtattttatgtttggtaaacatcttttaatggatttggttatacgcacttctacaacatatccaccttcttaattttttttataataaaaaaaaagtgtttccaaacaattgctgcttatttccattcaattagatcaaaacactatttttttcatttgctagcaatcaaagtcactatttatagataagggtaggaataatatcaatgtttttaaacatcatccagaaggcaaactggactaccttccggaccatcgagtcgaaccgcaaatcaattgatatttttatattatgtatttatagagattatatagttttataaatgaaaaataaaaatgagtgtgtcatgtttaacaaaaaaattgaaatctaacgagaacagtaatgtaatcaaaaattttaaatccaactaaaagttaaaaatatatattaaaataataaaaaatcaccaatgataaaaataaactaataaagaaaaaagactctccacatctgtttgtttttatcttgatttagactttgtaaattttttttgttttttttgtgctatgagtctaggaagattggttcagattagtgtatttgtatgtttggggttttcccatttggtttgatcattgtctctggaagtctacatatattcgccggcttaagtttctggaaggtttgaataccttgccggctattgtattccgatcttgtatcaccaatataatctatatttctaatgacaaaaagaaaaaagaaattcttaagagactaaatattcataaaagacgagaaaggtatgttggctcgtatgtggccgcttgaaaagaattgaaaaggttttatacataactgatataaaacaaaactttaaatattttcaaaatcaaatagatttcgtaaacaatcatccaacccgtttaatcggttcaccggatcattgatcatggatcaaatagatttttttttttttttttgggatttcccgttttagaattactgaatattagcagtaatcatgagcggttgttaattgaagttcttgtgtctttatattcgattagttacataattccttcaacttttgatccttgtagacacatgttacaatgtacaaaatataatctgttgaagtaaaccgaaacattattcaatgtgagaaccggataagattattagtattatttatttatatatattgtttttttaaaagtaaataagttggtaaatatcgagaatataggttttcagaccaaacacatcactttggtcctacttagtacttacctgcccctctcgacaaaatttcttttgtactttcacatttctctgtaataaactcggtaggtttgcgaaaacctcgccgccgggaaaaaaaaaaatcaatg

SEQ ID NO: 28595 - DNA, 3003 bp, Unknown; identical to SEQ ID NO: 28594
  misc_feature (1)..( 3003): 2750-1469P.txt file - cDNA_ID_2997702; gDNA_ID_2926305; Annot_ID_205839

SEQ ID NO: 28596 - DNA, 3003 bp, Unknown
  misc_feature (1)..( 3003): 2750-1469P.txt file - cDNA_ID_2997738; gDNA_ID_2926232; Annot_ID_142677
atatgctcttttaagtgatgggaaatgttgttgcagatagaggcactaaaggcaattggagtggatgaagtcgtcttggccattaactacgagccagaggtaaaaagacttcaagtctttaaaactttcctttggaaagctatatttgatttttttaatagaagatcttaaaatattgttcaatgttgaataatcattcagcaactgctagtgatgtccaaattctcaaacgacgttgaggcaactctcgggatcaagatcacctgctcacaagagactgagcctttaggtacagctggtcctttggctttagccagggacaaactggttgatggctctggccaaccattctttgtccttaacagcgatgttattagcgactacccgcttgaagagatgattgcttttcacaatgctcatggaggagaggcctctataatggtgacaaaggtaaattatttttgatgaaacctttaagcatttgtgttcatgttttttttactcattatgatataattggtttaaaaggtagatgagccttcgaaatatggagttgttgttatggaagaagccacagggagagtggaaagattcgtcgaaaaaccgaaactatttgttggtaacaagatcaatgctgggatttatcttctaaatccttcagttcttgatcggattgagctaagaccaacatcaatagagaaagagatcttccctcaaatcgcagaagcggaaaagctctatgcaatgctacttcccggattctggatggacattggtcaaccacgagactacattactggtctaagactttacttagactctctgaggaagaaatctccttcaaagttagccactggtccacacattttgggaaatgttcttgtggatgaaaccgcagagattggtgaaggatgtttgattggccctaacgttgctataggccctggctgtgttgttgagtccggggttagactatcgcactgcacggtaatgcgtggggtacacgtgaagagatatgcgtgtatctcgagtagtatcattgggtggcactcgacggtcggacaatgggctcgggtcgagaacatgtccatacttgggaaaaatgtttacgtgtgcgatgagatatattgtaatggaggggttgtgttgcataacaaagagatcaaatcagacatcttgaaaccagatatagtgatgtgatgacaatttggttgatttgtccgtatttttcatttttttgtgcgaatacgatttctaatttaaagtcatgaaaaagtaaaattttcaatgttttataagagtctagctcctagtaagcctttcgacaagtttcctaagaatatcaaagacgctcttgagattgaaggttatattagtgatgtgtcaatcttgacatatgatgctgggaatatatgttgtttgaagttagatctaattaatttatgtgtgtctcttgagttaaaagatgtttgatctaagtgaaatcatgagaagaggtcgtgatcttgttcctcctttttgtacgtgccatggccttggtcgtgattctgaatttttcttaggtacattgctgacaattgaaggtcaggatgtagcaaatcaatgtatcatgcgatttggattacttaagaagtaaaagagatatcagtctcagcgagcagataaaacttttgttcaaaatgatccacagagcagacgtacgatttaatctttcaattaatcatacaaatactaggaaatgagaaatcattagcagagattataaaacctagggcattgatgggaaagggattaaaacagcaaaacactaaacagagtttaagagaacaaaaaccaaagtcttttggacagaagagattataaaagtgaaaaccacacgccctagcatagccttccccgcggtaagctcccaagcagtgggaggagccctgggcacccttctccacaatatggacaaggagtatcgtcgccctcgtcatcttcttcggatctgaaagtctcttgtttgacacgagatattaggctacgtaattggatccaataggctttcccaaaaccatacagtgtttacatacggaatttgcggcgcttctggtgaccagtcattagccacaactaagataacattgtaactcataaacatccaacaaactaagatgttcttcgaacttggtctctcctgggatgcttttggcgattaccatcagatttgtagatgtataatggggagcaggattttccactgaccaaaatgcaatttccactaacatcttgtttagtctctcactcttaccccctaaaaaaatgtatatatcagttatcaactaacatgtaaaattgcactgcacatacatatatatatatatatatatatataatatgtaataaaaaagaactagggtttaagtaaaggacaatcacttttgggttcgaagtcgattacatcatccagactgtcaggtttcttctcaccataagcagtgattgacacctcaccatgataacctacaaatcacagagatcgagatctctgggcatggtggtttcgacggagatcgagaaaacagaaaattagatttagaagtaagaggcctatcaatgttttacatttaagcacagtaaacatttaaagcccagcctagcccattaagaggtaaatctaatttgctacgaattcggttgttaattattaaaccatcggtttagttcatcaaacgcaaaccaaagccaataaccgaataatttctcgagaaaaaataatgactttccggtgaagatttttttttacgacggcttctcctgacaacggaaggtgttgagaaagtggcggaatttgattttgtttcctctcctctcctatctaaacaaggtctgttttcgtgagatccagatattcaatttggattcaaaatcgtgaattgggttttggattgatttctgttactggtctgtgtgctttgatctgaatgttgtttcattctctagttgtcagatttactgatg

SEQ ID NO: 28597 - DNA, 3000 bp, Unknown
  misc_feature (1)..( 3000): 2750-1469P.txt file - cDNA_ID_2997742; gDNA_ID_2926232; Annot_ID_142678
taatagttaaaatacatatatagataatcataatcgtacacataaatattcgtttgctttctttttttgttttgcacgtcggccaaattgttaattttgcatgatccatagaagaaaccatgggccagattacgacactacgttcttcgaattctctttgtggttaaggaacgtgatccaatatattcagcatttatacaagaatttcaaaactagtagtaagagaaagaattgcttcttctttataaaggtttatagtatctaaattgtttaaatattcattttaattgtaaaaaactattgttaaatcattttcacatagtttttagtagtacatcatttgccatcatttttggttggtgacaaaaatggtatcatggcaaacgactagcagaagaagaatattaccgattataatcatttactgccgtgtgaaattgtttattcgtagcgtacgtaatctagataacggatcctgttaaaaagtgatggagattggacaagagttggagcttgaaagacgtacgtatattgataattgacatgagtttggacaattgttatataggcttatactgtttggctcttagcctcacaagcgaaattttttgggctagaattatagaggaagacgcgtgtgtcccataacttttcatatagaagaaaacttctgaagatatgttttttgtgaattactatcaaccacaacatgttagttatataaaaaaaaaaaaaaaaaacgaaaaaaaacatgcgtgtctaagatttacatgtgttatacactactacaagtaattggattcagtattagcgaaagtaacaactttataagagactgtcgtcatgagtccgatacatgattactaagaaaaacgaattgattaagaaaaagttaagtataaatatgggatacatgatttcactatgtgtgtggtaccgatagtattagatctaagactaattcgtgtagcttgcctatgtatataaatattatgtgtgaaccatttgatcatttagatgaaatatctgtggactgtggtagactcttcatcaaataatagattcaagttatttgatgtgcagaaaactcttcatcaaataacagattcatctttgaattagtcggacacttggccgaagactcagatttctagtgctaaaatctaaaaaacatatggattacatgattatagatttttgtatatataaatgaatacttcatcattacccgcacatatagattactaggaaacaaaactagtaagcgttacgtaatattttaaagagaactaaataaataactgaaacttgtgcgaaagactaattagactcgacactcgaggcatttagatggacccttggacctttaaaaagatttataaataaaaaactttgggaggcaactgaccttttagtgattaccgtgggatctaccaatgactatagaaaattaaaattaagaataaactgatgaaaacaaaagacaaaacacaagtgctcgtctctaaatacactgaaattctccatatctataaaataaacatttccttgtaaatatatggacgattgttattattactaaatagagcaaatgtcacatattgtgtcaaaatcatatgaaatttggacttaacgataacaaattaaaaaactaatgatgataaagaaatgttgtggcgccgcgtatgaattaggaatatattgataagtttcatggagatattgccaagtaaacttgctttgttgtccaaaaacctttgtgttgttcacgttcacgaagctctctcagccgccaatttttaaattacccaaaataccccaccaccatagagttaatccactgcgccacaccctgattcttttagcctgcaccaccacacgtcatcacgtggcgccatgtggttggaaaaatttagttaaaaacatgaataataatataaagtaaacctaaaggcatctccatcaaggagaaaccttttggtttctcaaacaaaaaaaatattagtattttactaaatttttattatataattaaatttttattttaatgaaaaaattgaaccaattgagataagagaaatataatgatggcttgtagagagtatctcatagtttctcacttgagaaactttctacactctctctctcttctctttttattatttttattatattagtagtgagaaactcttttgagagattaccaatggagatgatctaagtattttataaaaggttcttatccaaaaaaaaaagtattttataaaaggttcagaaaaatacaaaatgaatcttaacttataactattttacaattcggccatataatttgttaaaacttctaaccttaacaaattttactgagtaaagtgcaaatgattttacaaagaattaaaaacaattttgccacaaattttagtttgaaattagtgctattgcgatgagtttttgaatttttgatactaagaataattaaggtatataataaacactttacagacaaaaaatatcaaataaataaccacaacagatttctgatacatttctatataggcacaataccatatacattataatctttgtattttagtcataagtaacacaaaataaattgtttacatggtagttggcaatcatttgctaagaacaaccgacaacaaaataatcacacaagacaaaatgcagacaattctcaaatccacaaaaaaaaaactatagacgttatctattgataattggaatctttaacataaaccactatgattaggacttaaatgttagttttaacaacttgggtattattacttgatgattacaaagattaaggacttatttgactattttgacaagttgtcctacgctcttaaaaacccgttcgcttcctcacagtagaatctctccacaccggattatccaatattctccacgtccgcttcttccttcaactgagtccgactaagttgactcgttctctcgtgttttcgatagacacaaactatg

SEQ ID NO: 28598 - DNA, 3003 bp, Unknown
  misc_feature (1)..( 3003): 2750-1469P.txt file - cDNA_ID_2997746; gDNA_ID_2926232; Annot_ID_142680
acccaactttaatgacttttgattgccacttaaaacatctctacaatacctcattttacatgctccaattccccattaccaactataatcttactccatctcttattcaccacttacatttttccaaatcacattctcaccaaaaaaaaactgatttcattataaaaactctcaacatttttttccaaatataatcaaaatagttttcaaaagtagtcttgactttcaacattacttttttttttttttaacatcttcattttattgatattgtactttcaacattccttttcctccaaggctttcaaacaagataatttgtcttcttttttttttaatttatttaaaatctttttttaatgatgtataattggagcctcctttaaattagggcccaaacggtggcttcttttagattataacccagggccggcgcaacccttcttcttaacaaaaaccttttgattccaattgttcttctctcttcttcttcttcttcttcttcttcttcttcgccgcttcttctctctcgaattcaccccatctcaagtaagcttctcctatttccttgttataccaaacaaacaccatcttcaagtcaattgattttgttaccctaattgttcccgtccccgtcttgtaatataatcgaaaaatcgaaactttctgttttagagacatggattttgtgaaccctaattgttaacgaatcgttgatatctgtgacgtatataaaccctaatttcgttttcatgtttctttatctacgcaggtgtacgttagcctcctccctctaatggcgactcgtaagttttctgcagagcttacttatgatattgttgtgtttactcttctgtgtatttgaccttaatgggatttgtgggtaatacgcaggtcttcagtttgagaacaactgcgaagttggtgtcttttccaaactcactaatgcctattgcttagtcgctataggaggctctgagaacttttacaggtaccttttttttttttctctgtaaagttttcagtattgtttttgcttcttctatttcacttttttgatgtttttggtttgatgatttgtgtagtgcttttgagtcggagttagcagatgttatccctattgttaagacctctattggaggaacacgaattattgggcgtctttgtgctggttagctttctcaactagctgttatattttcttgcttcaaatcatcgtgattatttcattactttagcgtagtgaatgtggttttgtgtttcttcgtataggaaacaagaatgggcttcttgtacctcatacaacaactgaccaaggtaattttatacttctttcctcagatcgtttctcataacaattaagaattgattgtttaataccagcatgatccagttgtctgagatagagattgtagagtttttggtgaatatcttttatgtaacttgcctgaagcatctactctgcgcctctgcccatacctgtttcatttcagtttatgagtggactttttataactgaataagcttttggtgaagatgattttcctccttaacttgttgatgattttgtaatgttgcaatatttattgagtctcttgttcttttatattagaaatctatataggttttaggtctgtaattggttgcatctcctgagtcctgcttatttttttatgtttactcgtccagagcttcaacacttaaggaacagtctacctgatcaagttgtggtccagcgaattgatgaacgtctgtctgctcttggaaattgcattgcctgcaatgactatgtagctcttgcccacaccgatcttgataaggtaaagattcatgtcatactttatttttctaatgaaaccttttcaaaaacatatactcttttcatgactggcaagaaatggtgaaagaataagtgcgcatttttacaaaagttagcagaaatgtaattaagcctttgtaatcaccatgaatcttatatcttctgatgatgatgataacgataacagagttgtacgtatggcgtttggtttgatgcctctggttcttgtgtttttattttgctttgataggaaaccgaggaaataatagcggatgtacttggcgttgaagttttccgtcagacaattgcaggcaacattctcgtgggcagttactgtgccctatccaacaaaggtggaatggtaagagaatgaaaaacataacttcccttcggaaatggatggcattggcattggtctctcattagaatttgaatgtcttttctcaaataggtccatcctcacacctcagtggaagacttggaagaactctcaacacttcttcaagtccctctcgttgcaggaaccgtgaaccgtggtagtgaagttatcgctgcgggtatgaccgttaatgattggacctctttctgcggttcagacacaactgcgactgagctctctgtcatagacagcatcttcaagctaagggaagcccaacccagctctatcgtcgatgagatgaggaagtcattgatcgatacctatgtttaaattttgtttgtttggatgacacacacatcccaacatcgccaatgtgtcaatgtcagaaaattttcatactctactgtttgcaagaattagctgttttattttatttttgtgtggtttttaacagtttaaaggaaatctgttgatgtctctttgaatctttctgagtaagtgataagaaaattctccttaatactacacacattttcaattttcaatttggggtccacattaggttcaaattttagtggagaagaaaccattggtgaatggataacggttttgttcggtacaaatccgaattctgcaattatatgtgtgtagataaagttaacacctttttcgtttagatagtttgaagattaaactgaaagttaggacctttcatttccaatctctaaacccatttctctacgattagagaagctgacatcaaaattgaaacttgggaaatttttggatttgttcttcttctatg

SEQ ID NO: 28599 - DNA, 3003 bp, Unknown
  misc_feature (1)..( 3003): 2750-1469P.txt file - cDNA_ID_2997756; gDNA_ID_2926232; Annot_ID_142686
cttatcttttttacttttattgtatttactttagcattagatttatcaaatgttgcagcagaagcaccagacggcttgttacctctgtccaaaaagcacgttttaattcgcaacactgttcagaacggacaagttttgaatatacattgcaaatccagtgaggatgatttggggcatatccgtcttaaacatggggatacttggggtttcagatttcgtgttaacatggcactaactacgagatttcgttgtcacttttggtggtatgcacgcgaccatctaggccattatagttactggtttgatatatttactgtatacagagacgataatccatttggaaaatatccaatttgcgatgaatgcgtttggaatatgtacgaattaagtgaaaactttatttgtcgtataaatcgtgatcaatctggatggtgttttaaaatggacagagaaaattaagaagaaaacacattatcgttcgatgtatcttatcctaatacaatcattaaaattgattgaataaaataaaatcgttgatactattcaagctctctttatttgaagtgtttatatccacaaaagcaaattttgtcgtttattttgatgaatctattgcaaactaagtttctaactctaccaaccttttggaatgtcgttgcagtttatcggatctaatttacagctatcatatgacaaataatgtctatgaaacgtgatgagcgaacgaatctatccacattctcaaaaaacactaggaaacaaccacatctactgtctatctgcactaagaaaactatacttattataaaagaaaaagctatatcttatctaataaatgttaccatcatatctaatttacatatattaggtacaatcaaaacttctaattggtgttagcctcaagtcgctactaccagaacttctaattgatcagttcagttgaacaaccatcaaacgagaacttagacttatgtaagcacttaacgattttgacaacgcgaaaactggaaatataaattaattagtacgtaactagttcagaattgtatgctatgtagacttaattaatgccggatttgtatagaacattgtacttcgagtccaacattggaccatccttgaaatgtctcagctttgtaccctgatgagatctttcagaattccaccaacgcatctcactatctcattcgtgaattaggattttaaaactcctttaagcaaaacatagttcaaatacttagcttgattagcttgttgccaaatgtatatactaaaagaaaatacatatacacgttttgtaataaataaatgtttcattaattgttgagcggaagaatggtgaaatcttacttatctttataaaaaaaacgtagaaaaattgaatatctaaaagcatataaattgtgataaacatcgatccaaccctagcagattttatttcttaccattattttgtctaaatgtatatattttctataagacttaaaacatcttgtttttcacacacttataatcctaactaaccaaaaacttcaagaaatttcaattcatttaaccaataagtattacaaaaaaaacaattctataattagacgaagaggaaccaaattaataaacgaataataacataagtaaatcgaatttcagtaactagccatacatcttttcgataataacctgaatgattgataacaattcgacaacatttgtataatagaaagtgaaaggagacttttgtatcggtccattatttttccattcatcttcgcatttgaacatatagtgtgagccatccactgcagaaagctgagctatggactcgagcccttcttcttgtgcttcttcataagccttttggaagaaagcagacgctaaacagtagtgctttccgcaaaaatagagtcgtcgagtcccaatcggaccactaaacttttggcgaactttgttgatttgtttggttgccttggtcaattggatttggcattgagaaatctgataataaattccaataagaaatcaatactttttacgtatgaacaatacataataattaaaggaattacaaacttactgcaataacaagcacatcatggaggtcgcgtgcggctaagatacgtatgtccgttccaatgtatttcaagcagaagttgacgtcatctgtatccttgcaaaatgcgtacatgtccttgatagacatcgcatctgcgactgtaaacgcaaagaacacgaatactaacaacgacgaaggcaaagttaagtgtttgatgagcattgaggccatactgagaagataccaatgtgtttgttatttttctttttgtaagtcaaaacatttcatttataatgacattgaaatctaagaacgttacttcataaatcacggaaagttatggctttgaatggaaatatatcaatttagtaataactaagaagagtaaaaatcgcaatggcagtaaatgtctggaataatttactaccacaacttggaaacgcatttgaatttcataaaagacttggccgacaaacacatggtgatgttgccctaaaatttgcattcttctactctatttcatcagatatcttagcataacgggcttctttttgtcgaagcccaaatcgaataagaagcccatctggaatttgctctctcccactttgatcaatcgttaactctaagaagtaggattaactaaaaccctagatttagtgggaaatccactatagtgtgtgagcactattacctacgattttctgttctcatttgcgttttttttttctggtcaaccatttgggtttttctttcaaattgtcgggcaggaattacggattttaataaaacttaggaataaataaataattaaaaaaaaaacagaaacaatattataataaatttatcttttgagctgtgtcctcaatgaaaccttaataaagagaaccctctctgcaacatttaatactcataacaaaacctatctctctctgtctttactcattgtcgttatg

SEQ ID NO: 28600 - DNA, 3003 bp, Unknown; identical to SEQ ID NO: 28599
  misc_feature (1)..( 3003): 2750-1469P.txt file - cDNA_ID_2997756; gDNA_ID_2926232; Annot_ID_203736

SEQ ID NO: 28601 - DNA, 3000 bp, Unknown
  misc_feature (1)..( 3000): 2750-1469P.txt file - cDNA_ID_2997791; gDNA_ID_2926234; Annot_ID_142709
agcgtgaaggtgaagaggatctaaactgcctcattaaaggagagaagtgataaagttaagaaccaatttagaagctaaaaccttttattagaataatagaaaacaataaagcaaaacaacgattttattcttgaggaaaatttattgatttgactcagatactctcgacgagtttgaaaaaggctttcactaacaaggagaagaaaagattttcaaagaagaaatatggagcatgtgaaaagtttggaaggtagggtatgtactgcttagacaaaatcataagatgatggaaagagacaccgtaggaaagaagtatgtgaaatatgtgtttcaaaacaaaatgaagtgaagagagattaaggtgtgtttggtctgtgaagcgttaaagcaacaaggacatgttttgatggtggtgttttctaatcgtatcaatttgaatcaagttctcaaagatataagatgaggtcttttagtctgggaaacgtgaaggtgaagagaatctaaaatgcaacatcaaaggagagaagtgatggagttaaccaatttagaagttaaaaccttttattagaataataaaaaaaaaaacaatatagagcaagaaaaaaaatttcatagaaattcaaacgaagagtttattgacttgacttaactacctctcgacgagctcaaaagaaaattactaatgaagaaagggatggattttcgaagaagaaatatgaagcatgtgaaaattttggaaggtatgacacgtactgcatagacaaaatcataagaggatggaaagagacaccgtatgtgatataaccctatttttagtgttttaaactatgttttaaatatagagttttgagtctttttgttatttctagagtctttttagagtcttttcaggtattctatggagaaggacaacaatgaagatgagaagacattttggagcaaaagctgaagaaaagaagctaaaggacgaattcactttcagatccagttgatagtgtcgatccacagactcttcgtgtcgatcgacaccagttgcggccgaaagaagttcatgacgcttttaagtttgaagaattagaaatttgccccagaagacttctctatttttattattagtccctacatgttttttaggtcatatatatagttttaaaggtcattgtttagacctatcaagtttcctagcaaccaagttattttccagagtactttcataagctattcatcccctgttttcagagttttatcagagatttcattactagtgaagagatcttttctaactcttttctctattgatttgtttatactttcttattcatacatgttgtttgtttcatctatcatgtctaagttgttgcttgttagagttaagatttctcactagggattcatatgatttagtagattgctccttttctaggttatctgtagaattcttcatctttagttgttcttaatactagttctagagtaattaactagaacttgattcgagataatagatatacccaccataggtatctgttactagaactactatttgatgagcctggtttataggtgtgtaataagaatcggcttatctactaaggtgaacttatcgaactcgtttagcatgcgtgttaaggtataggatttcacggcacaacaccgggaattttagctctaggcatagtgagtttcacggaacatcaccagttattctgatattagaatttgagtttaagaacggtttgataacaacctagctatatctagatctactaatcaattgtttaatgagaataccctaaacccaagcatcttattagcttgatttacaaccaaccaatcctgctatttgcttatttactatgtttttattttcttacactcatctagcttaatctcaatacttaggttcattttgtgaacaaaagaactttgtgaaattctatccttaagtacaattgacgatctcttatttgagagagtggtcttagggtaatttgatatacgtcaacatgaaagaagaaaacaaataaatgagtccttgcaaaaagatagaaagagtgatagctctttcgaaaaagatgtgaagacggaattattgaaaaaacatgtgaaaaagtatagttgttaaaaaacgtatagataagcttatgaatatattttgtatagaatcttatttttagaaaaggtatactaatcatatcttaagtcgaccaattttttcgtaccattcactaacaaaagcttcagaaatatcctccatgatccaattattgaggttattctcttggcttcctccaccggcgccggtaaagcttatgcttgccggcgtcaggatctttgtttctctgctttcattggctcttctaaatcccctgtatctcgctattgttggcctttatctcagtcagccccattattcccctttaatccaaagctctttgatgtttcttcggatgttgaagctaagagacgtttcccggcaaccccgttcccttgccaagctcaacccacgatctatccatcgcttttgaacctcgaggagccatcctttatcagcgagactccatactcgcaactgtgacgatttgctccggcctgcccagatgtgctatggttggatctctctcgtcttcccatgaagccgtttctcaccggaaactgcaaccagggggcggcgcaaccctaacatatgaagatgcctctggattggatcttgtttctcgcctattgggctcaagcccatattttcgttcattgagacccacccctttaaggtgctttccacgccttcttctgcaaaagaccaggttctgctttatctcttctccgattcctcactgcaaattgttgtgtcgatctatggaaccaattgttcatggacgccgattggatcctaatcacactttgttgcaatgtgggttcaaactttgtctgataacctggccattagaatcacctaggggttttacttttgtttttagcaaccatgtttaaggccaaatg

SEQ ID NO: 28602 - DNA, 3000 bp, Unknown
  misc_feature (1)..( 3000): 2750-1469P.txt file - cDNA_ID_2997803; gDNA_ID_2926234; Annot_ID_142713
gatgcatttaactttactttatatgaataaacattatataaaacaatttgtaaatagtaatatataaacccgcacgtagtgcggatactcatctagtacaaaataaaagcaagtagtgatatcaaattcagcttgtaaactgaaggattaaattttaaaactgtatcaatattcgatgccaaattagtggatatgatgttcgaattttacatggataaaattttaagtaaaataagtacaaggttcaaatattaagtattctaaatatatatcattatgagtgtttaatttatgttgaattttgttgttttatctctaataaatggaaaaatacaaaatatttcgatttatattcgaaatatatatattgatgctgaatattaagtttggaagccccattggcccaatggttgaccaatggttcattaatacttctacaccgagaggtctggggttcgaatcccagttactccgatttattaacagatttgcatattaatcgaggcaagtgtgtaggagatctacaacgatgtacaattatagccgttcgccaggattttacgcagagaagatattgaagattttcatcaagcgcatggaaaatgagaaagaattttcgtatgtcgtggatctaataagggtcagaaggaattgtccgttatctagttgtactagttgttaattacctaattacccatgcaaacaatcatttacttagtcttaaactactctcatgaggttgtatttcacaaaatgtttccaattaatagtatagattatcatgtcatcttatttaccaacctacttgcatgttaacaagaaactattattcacaaaataatattattttatgtaaatttttttttttgcaaaacaaaatattataaaaaaaaatatatatattttaaacttcttttatgaaataaaatatttagcataaaacaaagataatttttatttttatttttaccttcgttaatatcaaatcaagactataaagtcattgtacaaaacatcgaacgaaaattataacgtaagcaccataaaatgagaaaaatacacaaactatagtgattgacgatgcttttgacatataagtcttactcgttaacagattattaaatctatttttttcgtatttgatcttacgcttatgcaaattatgtttctggatagcatttcttgcttaaacttccatatcgcataccgtatttaaaaccatatgcttctgataacagttatgaaatatcaacattatgataccaaaacttccgtatcataatcactttaactatctttgactttgttttctctcaccattatatcccgagaataaattatgacgtctcagtatagtatgagccatcttctgattgcaattatatatatatcacattgttctccacatcatccaatgatagcatgtatccccaacatccatgtgtatctcttccaacaaatctatctggatcatataactcctacttttatgtgtcttggtttttagagccacacaatcctcaactagagagtttcccaaatcttcaaaaaatccgaaataagtatcaaacaatatctcaatttgattttcttctataagtaaaagaaagatgaaatgtcagtagtgatgacaccaaacaattttgggttgaggaacttcaaaatgttttcaagataacaccaatcaattgaagggatggtgaagaaaacattcggacctgagtaatccttattataaatcccagagaagatggtaaaatcagtgatgatcaaattacttaccaatatgacgctctctaaagatgaagagaaagaaaccgtcatcgttttcaaccaacaaattgctataaccacgaatgtgttctttagagacaaaaccaattgatggagatagagtttgtgagaacgataaagaagatcggcgaccaagggacacacgatggagagcactttgatcgatcgcgttagtagtgaagatagaatcgatagaaaatcgtaacaaaacttgggaatccagaacctcatcttgatagttagagagaagtgtgatggtgagcgatcgagtaagcggataataaaatctataaaaatcaaagttcaatcgctagtgtcaccttttacagttgtaactccgacaatacaaattatttactttagaagagaattaagaaaaaaaagaaaaaaagagtcgccgacgaaccgacaattgtcagtgactctaaaaacaaatatacaaagataaaaaaccaaacaaaaaaataacaaaattaaatttctttcacgaaatatatttttctaaattatcaaatgaaaaaatatttttttacgctctttaacaaaactctaataattagtttttttttgtgaatcgattgtaaaattttttagttatgttgagaagaataacacaatttttttttcttttacataaaaaacttatgtgagttttataaaaagtaacgtgagttacataaaactcatgtagttttataatttgttattatgttgctcgtataaaaatttatttacttaatattgtaacaaaacaaaacaaatttttttgaaaaaaatcgtcataaaaaaaaagtcaatataatcttttttttgtcaaacaagtcaatataatcttagtagtcgttgttgtacaacaaacatctacaatatacttttctgtctacccaaataatataattttcctcttttgtattcaaaaaaataataatttatctctacatgttggaaatatcaaatatagtaataatgtttttaagagaaaaaaaggaaaaaagaaagtaataaaacattctagagagttccaaactccacaaaacctcaaacaaaagcaaacgcaatttagcctcttcataagagagaagtcctctcagagaaacggcagccacatcaaccaacccaaacatcgaaagagagacacttttctctctctctttctctatctccttccaatctctctagggttttcgttacaacggcgaaaagatg

SEQ ID NO: 28603 - DNA, 3000 bp, Unknown; identical to SEQ ID NO: 28602
  misc_feature (1)..( 3000): 2750-1469P.txt file - cDNA_ID_2997803; gDNA_ID_2926234; Annot_ID_203794

SEQ ID NO: 28604 - DNA, 3000 bp, Unknown
  misc_feature (1)..( 3000): 2750-1469P.txt file - cDNA_ID_2997813; gDNA_ID_2926234; Annot_ID_142718
gggttttgtgattcatcctcattatgtttttttttttccaattattatttgttctacataaattatcttcgatgttacaactttttgggatttattatatataaatatttttttggaaactgtttttctcgttaatacgtttctgttaacttagttggtgcactaaatagagggaaaacagctataacggacggtgctcctttactcatatatatacaatctcttcatttgtttctttcgtctgtttctttcccttcctggttggtactaaagaggtataaacaatctactaaaaatagaaatatggtttatgtacatgtgcttctagaaattatacgtctacttagctatatataaacaccagctactagcagtgagcacggaactctatgaattactttgattcaccggatttcataaaaaataatgcttttacaatcttttgcgggacattcccacatcttttcttctctccctccattcctaattaaggtctctctcttttaatttttttccgttttgacaccatttgggtttacaacccataaccaatcccaacaacgtctctctgtttttattttatttttaatcaaccacacattaattaaaatataatttcatgaccagaatcgttcaaaacattttaagtttcatgtacaaacttaaaaggaaattggccctcaaacttagtcaaattctgttttgaccatcaaatttatacaaatatttatttatggccctcaaatttactcaaattttttattttgggcctcaaatttactcaaatactttttagaccctgcatatttactctagttgcacatcccaaaaactgttcatgctccattattggttgcccaatttgaaagataagagtttacacaagttacttcagaaaataataatttagaaaactgtgttaaacaatccaccttagtattactcaatcgaaaaatagaaaagatcaaaaaaggaaaataagcatagagcaaaccaaactcatctaaaagattagagaaagcaagacattctttaggtgactgcaccatcgaagttagccttgtgcaatcaatttcgaatgtttgagagtcgatccttcttgaaaaaatattcttcataccccaaattaaagctttcagctccaagtaaagaggggaaagacacatgcggagacactttgcaccacgaagtaccgtctctctggctttttacaaactgaattaggttttatttttcctatgtatatttttatagttttccatattgtggctccactagtaacacatgttattaacgttgaatcccactcaatgttgtaatttgatgtgaattatattaaaatatgtggtataaaatgcatattgatgtaatgacggttattgttttccgtttatttcgttttaacgcaatcttcttttaaaatattaacggttatttttgggttgtgtctttttattgtataatttggttaaaatatttacggttattttgtttcgttgtatctttttattgtaactttccgttcatatattgacggttattgttttttttgtgtcattttatcgtaactttttgttgaaatacagacagttatttttttaggttatgtctttttatcaaaatttctgttaaaatattgatggttatttttcccaattgtttcttttcatcgcatcttttcgttgaaatatttaaggttattgttttaacttattttgtttggttatgtattttttattgcaagtttttatttatatattgacggttattttttttcttttactttatcgtaacttttccgtttaaatactaatgattactttttctagttgtacttttgtatcgtaatttttcgtcaaaatattgatgatttattttttccctgttgtatatttttaatcgcatctttttttaaaaatatttacggttatttttccaataattatattgttcaattatagttgtattttttactttatggttgtgtatttatagttgcatctattcatttaatgttacgtctctttactatatttctttcatttttacatcacaatttttgtatattcaaatattgaatatatcatcataataatttaatatataaacacaatcaaatttttgtttttgtaatttaatccataaatacaaaaatttgttgaaaataagttctcccgcgatattgctgggttcattacctagtaactatagtaatatttattaaaagtttatgaattatcttaaataatataagaaagtaatactaacttaaacatatctaaaatttcagcatttttttaaacaaaaaaaaaatcagcattttcatatatgtctacaaataggatttgattttaaccaaaatagaaaacataaattcaaaaattcaaaaatgttacaaatatataagacattataaactattttttatgatatgttattgaataaaattcagataataacaacattttttctcccattattatttttttttttcgtcaacaatttttctcccattattcaaattgatttaagacaaagaaaatattcttcttagaagttgcatgtgtttttttggttaagttttaacttaacaattttacaaaaatataactcaaaaagataagcgaatcataactcatcagacctcaatctcaaacagctaaactcaagttttaaaaaacaaatgatgatgattagtaatatttttcataactcatggtaatgtgtttttgacagttgtagatcaggcccacgtggataaaagcccaaaaaggaataaagacgaaagagataaaacataaacccaaacttgctttcttctctaaaaatatccaaagcatcaaatccttaacctctctgctaattcattcactcctgaagaagaagaaagaagaaataagtaaataaaaattcctcctttttctggtcattgcttgtctaatgccaattcctaaattgggttctcttcatggttgattcttctctcattccatcgccatg

SEQ ID NO: 28605 - DNA, 3003 bp, Unknown
  misc_feature (1)..( 3003): 2750-1469P.txt file - cDNA_ID_2997821; gDNA_ID_2926234; Annot_ID_142722
agaaagtaagaaatgtgattggatttcagtttttttaggggacaatcccattaaaaaaaaatctaacaaaaccaacaaatcataattgcaacgaattattaacaaaatattctaactaattcatacatttctcatttaaacgtactcgtacctagtaatattatagtaaaccaataaattaccattgcaactataattagtctgtttgtttcgtcaccgtatgcgacaacggtaaattttaccacagattattgttcgtttcgtcgctgctgacgtataatttatttttgtttgatgatgctgacgccgactctgccgttgccgcagatgtttatgttaagggcaatgcaaatctaaatccaattaactccaatggttatataaagagtagagaacaacatatgatttaaagcaagtaagcattagtgatttagaaccatatagtgaaaaagaccgtaagtattagttccaaacattcagacccattatacagaaacagacatagaatttggaaatttagaataaacccaccaaactaagagtagctaaaaaaacacaaatcaaaaagaaactcaaaattcccaagagatttgaatcagtgaataacaaaagtacctcggaatagatatttaacgtcgtatcagaagtaactaacgacgggagatctaattgagctaaaatcaccgaaaaagcgagattgagacggcggagagagattagtttcaaagaacttgagatcgatgactataagaaagaaatgatgaaagaagaagaaaaaataaggttaggtttgtttgtagtttcccaaacatagtaaggatagtcttgtcatttaccacatataacgcagcttttaatcgtttaacgctgattttaattagcgataataatttttagccgcaacgacttacgtttactgcatcggcatgcatccaccaaacgaacatcaccatttgtgtctgccgctgcaacttacgacgaccaaacgaacacactaaatttatcaagttataaaatacaacacctaagattctctgttctagattgatagttcgtagaggtggcaatgacttgctagctctcttttgttttccaaaattatttaccacctcaaaatcttgaaaacttttaaaccacaagatgtatgtataagaagtgtctctaagtttagcaagtggtatgaatgattaagtatccttttactcaacgcttacattttttttttcgttttttttttccttttttctgtttccaaaacttttaatggtatatcttaaactaagttttttcgtaatttatggtacttttttcgttgattttacattttaaaaaaaaaacagaactttcaatactaaataataatatttgagattttaaaaatgataaatgtatgagttgacctataatgctaaaaacctacaagtctacaaaaacacatgaatcaatatgcataagctataaaacctatatggacttgaccttaaaacctatatatcttgaccctatcctaaaatttaggtttcaatcaccatatgacatatctatcacatttcgagcagaatctaaaaaacatatcctatttatatgattttgatttttggccttaaaacccaaacacatcctaaactttaggtttcaatcaccattgacatatctacaatgttctatcgcatttcgagaagaatctaaaaagaaaaaactgatttgaagctttaatttattatacaattaaataatttgttagacttttaaaggatttagtcacgttgagggatcggccacgtcatttataagaataaaataatatcaaatcattatagttattattagtaacagtggtatagagggacaaggagataagcaggtatcgtttccattaaaacagctggatttgtcggcactcattcccattattgtatttatttcaccatatctgtcttatgaccaaaactacaataaacatataaataaaataatacgcaaataaaacaaataatcctcaacattttctgatttttaacaaaatctgtcttaaattataatttattttaaaatgttgatcacactcaatttaaaagtattacaattttcacaattggaaaattgttattagtgaaagtactacattatataaaataccccaattacgtcttgaataacctaaaagaatacaacaaaaaatagtttgaagaaactcattattgtttttaattaaaaaattgaaaacttgcttacaacagatttgatttgaaaatgtcacataaattttatgttcactttgtttataagcaaatgtattataatcaaattaatatggaaactctttaaactatatctgattagctatcttattatatactaataaataaatttaattagtaataaaaacacgttgcataattactttaacagaattttgtataaagttctcatttatattaatggtacttaaagaggtattttataaaaacaattatagggaaaatctttaaattgattatattgaataaattgaattattaagaaaacacgttgattaattagtttaactacacaaaaacttaaattgacttaaaactactctcctaatctttgttaaaccaaacaacccaaataatttactctgaatctttttttgccgtctagattcgtactctgcaacaagtgaactaaacacagaagaagaagaagaagaagacgagacgacgaatccagaaacagagagagagggagagagctttgaatatcttattgtacacaatcttcttcgcatggaagatttctgtttctcgtcactctgatatccaaaaatgtctggatctgattttgatttcgcggcgtttcgagttcaatgctaaaacatcgaagcggtttcgaatctctgagaatcgaaggaaaacgaagcgtgtaggttagggaacttaagattacgttgaagagaagcaagttctcttaaatcgcaactttggagaagtttcgttgttggtttttggtaaagcgatg

SEQ ID NO: 28606 - DNA, 3000 bp, Unknown
  misc_feature (1)..( 3000): 2750-1469P.txt file - cDNA_ID_2997832; gDNA_ID_2926235; Annot_ID_142725
ttttcttcgtcaatatccaacggttctccaaagtcgttggagtccctttgtctgatctcagattccatttcctctccatctaacagcctcgacaaaaccgaatcaagatcctctttttcgtcccaaagggtttgaccttctctccatacaaagtcccagtcaacgaaatcatcagccatcgtttcgatatttttgtgcccaactgacatccctccatatggctcagagttttttacgttgttcgactcacatgaggacacgtggacagcatgagagtcgtccaatagaaaacaagaatcgaaaatgtcgtcattgagacacaaagctccatcgtcgccattaatgcttgggttacaatcgccatcgtctccataaccacatggtcctaaaccgggttcctctgctccacttaagctactacttgacaacaccattaatgcgtcttctttgtctccctctccattctctattgtcgtagttggcaaaacgatgtcacttttgtttgctttaaaagaattaggggttttgtggtttttagggtttaggataaatttgggtttcatggcggatctgctggttcttccaggtctacgcttaggaggcggaggcgcattctcgacggtattggcgacagttggttttctgaagtaaccgtggagtttacggctgagatgagaattccaatagttttttatttcgttgtctgttcttcccggtagattgctcgcaattgttgaccacctgcaatttaattagcgttgacgctattcttattttttgttgtaaaaacgttttttttcacgacgttacacagcaacagtttgatttatgatttcacgtgatagtgtactttttctattggaaatatatcgacattaataaacttttgttcaaatgaaaaagttacctggttcccaaagtggaatgcagtttaacaatgacgtcctcttcttcgggagttatgtttcctctcttgatgtctgatctcaaatagtttatccatctcaatctacagctctttccacatctctttagccctttttaaaatgtacgtcagattttaattaaggcataataatgcctgcagcgattactcatcttttcctaaatattgaaataaattatcgttttatttgtgatgttacagtccatatatacatgtaaataaaacaagaaggcaatttggtctgaattatcaataaacactttatgtactttaaaatattatgcattccttatagaaactgatacattaaatagaaaaaaaaaaaatcaagtctctattttaattttttttacaactcatggtgtataattgaaccgtacgtaagattaattaacttctcgatgcatatagattctcttataaattttgaccaaacaaaaaaactatcttatgagatgcatgcgatagtcgagagacagagtactgtatagataaaaaaaactttaccggcatttttgggaagagaacgccatgatccttcgccgttggactgaatgtagtcggagagagtccggtcttcctccgccgtccagcgccccttcttaattcctaccttctcacagcacggcgcccttcccattctctcggccggcgattattaaaaatcactcacttcacttgttcctaaagtcaatcactagagaaagagattatttaaagagaagtaaagtgacgacacaacaaaaagtgattggtttagtattaaatatttataggagtgacatgcaagaatagagaggagtgggttatatattcaggtgatagaacgagccacgtttgtctatgttgaaacaaaagtcgtaggcgctcatcataggtcgagagctactaaccagctgtccagctgggtcgtcctagtgtctctaattagatgctaactatagtttttaaatactagttatacattttttttttttttaaatactagttatacatttattatttctgacttgtttctaatcatactgctcaattcggattcagttaatcatctaacaattaataaaatcataagcgtaatactttctcaatattttacttcgtatcgtggaaaatatgtaaacaccaattttatttagtttactattgtcagcaacgtttctttatttttcaatggacagtaaaatggtattagtgggggatcgggaccactcgtgtgagatgtctagttattattgtatgtctagtaaataatgtttcgtcgaagatgcgaagaatcaagagacctgacatatgacatgattgtccaaaccagtctatgtttctttgcatgtaattaataagcaacaaaatatgtatttattacttaaccacctttttttgttttatactccagtagtgtttaaccaatgcacaacgtaatgtgtgactaagatagtctagattatataaagattaaagaaataaattttctcatagcagcggttttgtcattatattaacaagtttaatatggtaggtacaaaatccataatgcataaatatgcaaaactagtttggatctggcctccccagatcggtttacataaaacaatctcgattttgtatgggcccagtaacctagggtttttaatcgggttaggccacatttattgaataacaatcgtaggggagttacaggcccgcttcattattaatgcgccttgtatagattatatgagtataacgacgtcgtactcattaaagtcgacgaaaagaacagtcagcgattcgacgttggtttatccacgtggctaatatttattggttacgatcgtcagagacttaatcctgattggttaagcattgcagtgtacacgtaacccgaccacgaggctcgagttttggaatcgtttccacgaaaacaagtagagagagtgattcgagttttccaatcataaaaatcagcgaagaagatcttcgttcttgttcattctgtgaggtttcattgttaaaatcgaaacgaatctcaggttggagtaatccttgggagagatccgatttccgtttccatg

SEQ ID NO: 28607 - DNA, 3000 bp, Unknown; identical to SEQ ID NO: 28606
  misc_feature (1)..( 3000): 2750-1469P.txt file - cDNA_ID_2997832; gDNA_ID_2926235; Annot_ID_203818

SEQ ID NO: 28608 - DNA, 3003 bp, Unknown
  misc_feature (1)..( 3003): 2750-1469P.txt file - cDNA_ID_2997836; gDNA_ID_2926235; Annot_ID_142727
atagacaaacgtggctcgttctatcacctgaatatataacccactcctctctattcttgcatgtcactcctataaatatttaatactaaaccaatcactttttgttgtgtcgtcactttacttctctttaaataatctctttctctagtgattgactttaggaacaagtgaagtgagtgatttttaataatcgccggccgagagaatgggaagggcgccgtgctgtgagaaggtaggaattaagaaggggcgctggacggcggaggaagaccggactctctccgactacattcagtccaacggcgaaggatcatggcgttctcttcccaaaaatgccggtaaagttttttttatctatacagtactctgtctctcgactatcgcatgcatctcataagatagtttttttgtttggtcaaaatttataagagaatctatatgcatcgagaagttaattaatcttacgtacggttcaattatacaccatgagttgtaaaaaaaattaaaatagagacttgattttttttttttctatttaatgtatcagtttctataaggaatgcataatattttaaagtacataaagtgtttattgataattcagaccaaattgccttcttgttttatttacatgtatatatggactgtaacatcacaaataaaacgataatttatttcaatatttaggaaaagatgagtaatcgctgcaggcattattatgccttaattaaaatctgacgtacattttaaaaagggctaaagagatgtggaaagagctgtagattgagatggataaactatttgagatcagacatcaagagaggaaacataactcccgaagaagaggacgtcattgttaaactgcattccactttgggaaccaggtaactttttcatttgaacaaaagtttattaatgtcgatatatttccaatagaaaaagtacactatcacgtgaaatcataaatcaaactgttgctgtgtaacgtcgtgaaaaaaaacgtttttacaacaaaaaataagaatagcgtcaacgctaattaaattgcaggtggtcaacaattgcgagcaatctaccgggaagaacagacaacgaaataaaaaactattggaattctcatctcagccgtaaactccacggttacttcagaaaaccaactgtcgccaataccgtcgagaatgcgcctccgcctcctaagcgtagacctggaagaaccagcagatccgccatgaaacccaaatttatcctaaaccctaaaaaccacaaaacccctaattcttttaaagcaaacaaaagtgacatcgttttgccaactacgacaatagagaatggagagggagacaaagaagacgcattaatggtgttgtcaagtagtagcttaagtggagcagaggaacccggtttaggaccatgtggttatggagacgatggcgattgtaacccaagcattaatggcgacgatggagctttgtgtctcaatgacgacattttcgattcttgttttctattggacgactctcatgctgtccacgtgtcctcatgtgagtcgaacaacgtaaaaaactctgagccatatggagggatgtcagttgggcacaaaaatatcgaaacgatggctgatgatttcgttgactgggactttgtatggagagaaggtcaaaccctttgggacgaaaaagaggatcttgattcggttttgtcgaggctgttagatggagaggaaatggaatctgagatcagacaaagggactccaacgactttggagaaccgttggatattgacgaagaaaacaagatggctgcttggcttttgtcttgaaagatttgacaccatgcatatgcctttttctccgttagattttagcaaagaccccacgtggcaggatctggtcggtttgtcaatagaacatgtttgtcccctagcgttcgttttttagttttaaatgtatttatattcttttttatttcttttcatgtgtaaatacgattttggcggtggcaaataaacaaaataaagtcgatcttcttagttcaattacatataagcgatccattgatgattacaccattgatagccaacttaagtaatctttcgactttcgtatatatgtatacaaatataataagaaatttaaaatacaaaaaaaatataaataaaattcagttccatattgtgaatcagcaattctcactattggtacatagtccaacacttgctagttgcattctaggtggaagtatttcaaagaaacaagtttctctgatagactaataatagaccaaaacccgagcaaatttcaaagcatgtcgccaaccacaactcttttttgtgtgtaaatgttcactggtaaagtggtaattaatgaacgttttgaattttgattaaaagctataagaccatctccaacgagaggatgtaatcaaaaaattgttgggctctcttgtttaatgacaataaaaataaattaaaactgataaaaatcaagagagtcggctttctggagagagttttgagaatttgagagaaccgtcgatgtggcaacatgtgattgggttttcaatttcaacaaaaaaataaatgtgtgcgcgttctgttctatcttctttctcctctctgcccaaacgaaattgaccaaaagatgcaaagcccaatcatcgtttcttctgaaaacttttcgcatttgatatcttttctttgaaactgaaatcaagatacacaaactgaaaccaatttgttcaccaaaagaaaataaaaatgcgtgggtttcgatttcaaagatattcaggaaaagatctccgatagctttcgtctatggcaacactcttttcaattctgggttcgagcttcgtggttttaaaagcttgtaatttcgtgtgatcaagctcctgcgacgccgtttgatgcgattcaactttgaaaatttgatgaaaagcctcttggttatgcttctattgctcaggtattatagattatggtggaaacttaacaattaagtaaacatg

SEQ ID NO: 28609 - DNA, 3000 bp, Unknown
  misc_feature (1)..( 3000): 2750-1469P.txt file - cDNA_ID_2997851; gDNA_ID_2926235; Annot_ID_142735
tcgtcttacttacctaactatatatgctttaataatacaatgttgtaggctcatcgagaagtagggagagaggcggtgaggaaatcaatggtgcttctaaagaacggaaagacagacgccgataaaattgtgccgctcccgaagaaggtgaaaaagatcgttgtcgcgggacgacacgctaacgacatgggatggcaatgcggtggctttagtctcacttggcaaggatttaacggaaccggtgaagatatgcccactaacacgaaacatggactccctaccggtaaaataaaaggtaatttagaatgtcagagaatattaatccgtcacacatgcatgcattataatatcttggtttcccggatctttccaaaaaaaaccttgatggaatcaaatacacattaaatctttccaaacttgatggtggcccggatctttccaattatattcaaggtttaactatattgacatattcgttctaaaatgttatttcgaaacatatatatgtaggaaccaccatattggaagccatccagaaagcagtagatcccactactgaggttgtctacgtggaggaaccaaaccaagatacagcgaagcttcacgccgacgcagcatacacaattgtggtcgtcggagaaaccccttacgcagagacatttggggacagccccacgctgggtataaccaagccaggtccagacacgctcagccacacgtgtggtagtgggatgaagtgtctagtgatcctagtcactggacgtccgctcgtgatcgaaccttacattgatatgctcgatgctcttgcagtcgcatggcttcccggaaccgaaggacaaggagttgctgatgtcttgtttggtgatcatcccttcaccggcacgttgcctcgcacgtggatgaagcatgttacccagcttccgatgaacgttggcgacaagaactacgaccctctctaccccttcggatacggaatcaaaacctaaatcaataacgtacgataaccatgtatttatatgaacaatgtaactgtaacactttcccgatcaatattaattaaatttctgttacatatatgcaatcctatgttagaaattccatatcaaaattgaaagaaacctacaacaatatacataatgtggactatggccatgaaacgtaacatttaacttgttcacgatttgatgaccgatcatgcctatctcattatgggcttgagcccactccttcacctttgtttgcttcgaagatgtgaaagcaagaagattctcattttgagttaaaaaatccataagtctttaaggtttttgtgaaaatggagagaagacaagaaagaccacgtgacggcgaaacaggtcctacctagcaccatgcaatgtcggatgctgagatgcgttgatatttcatggaaaaggtgctttttataataataaaaagatagctaactgtttgataaatggtacagagtataagatttgtgtaattaaaacgttaagtttgctctcctaaatctattaatttttaaaccaaaaaaaaaaatctattaattttgggatgactttcataaataagaattaatgaaaaatatcccattacgagggaacatatagtcgctctcagtcctattttcattcatacgcagaagggaaacggatatacaaaaagagacaagtcggcttttcatataatgtgatcaacaacgatgatgatgattaatatcatgtgtttaattgaatatcctgaactgtagtaaatcaaacgagagcaataatatgtagatttgttggtgtcgtagatgtttttaaagagaatgtgcatttcaaaatcactagctaggccataggtgatatataggtccaaaaaacttctaggttatagacaaaacaatggtagcaataatgcataaccttttgtccgatgacagaaacgtttggtgattcttcaggatcttaaacacgtgaggaaattattttgtaattcactaaaattctctacaattttcacttggttcgaggtttgttgttgagataataattaatcaatttctatgtacaaagcatattctctactccaatgtcatttttcttttcttaatttagtaaaattttaaaataggattagagcaatagagctcataagagaatctatgttcgtttccataaatacataagcatagatccaaggacatatgcattggttccattcatgataaggtcacgcatgaactaccatttttatacgattacattgatcgaacaaaaacaccttacctcattttagagttcaagcttaatcttccaacgggagatgtattgggactttaggattgttatatttgttaaaaaaatttgaataatgttaagttttcaattagtcaaaaatagctaacaaagcaaggctaagaagataattgaccatgctatgatcagaatgtcgttagtatcaagctattaaacactctttaatggattgtcaattttaataacaaaaagaaaaacccaagagactgaaactaaacgtcacatgactcacatggtccttggatacgagttatcaaacaaggagagatctcaacacttgagtccaaactaatcttgtatagaaagtgacatccattttctctactcccactctctcaagtccaagttaattattcgtttccactcaattttcataactgatttcctcacacgtgtcatgcagagacaatacattcacatcattaaattactaatttagctactgattagagtcgtatttttgtcttctttttctagtcggctataagtaatcaatatgaaagcagcctttgattgatatcattatcaatcttttcaaatgtttaatacttgtaaaacaattaataataaaatacaagttcttcttgcatcacacaaaacattaaagttgataacaaaccaagaacgatcataaatactagtaataaattcagagagatagtattatcttcaagtttatcatcttcagagagagacgatg

SEQ ID NO: 28610 - DNA, 3000 bp, Unknown; identical to SEQ ID NO: 28609
  misc_feature (1)..( 3000): 2750-1469P.txt file - cDNA_ID_2997851; gDNA_ID_2926235; Annot_ID_203830

SEQ ID NO: 28611 - DNA, 3003 bp, Unknown
  misc_feature (1)..( 3003): 2750-1469P.txt file - cDNA_ID_2997863; gDNA_ID_2926235; Annot_ID_142739
ccactagctgatatacattaatatcttaataatcactaatagaaaattattatgtcgatcgtgtatatagtgtagcttaacgtgtaccttagtataatttgtaacgtgtatatatataacatgtaaatgttttgttataacatgtatttttgcattagcctgtttttttatagagtttagtaaagcttttactatgcgtaagctattagaactattttaaatctaaactaatttgaaagtaagattatgaatatatttctttcaactacttttagttttgatacatattatatagtatggtttttgggttgccagaattttcaaatataaatccgtaaatagcagtagcaccatattactcttctcctgcgaaaatatatatacacaatcatagttgattacctttttgatattgaagtagacaaggtaagggatggttccgacataaccggtaaggccaacataagggatataatatgaagctaagagatagttgagtgagttggcgtaaggatcaaaccgcggattagatttgcgtccaaccgctctatccataaacactgcgaaattctctctcgtcagatttattagcggacgtggaattcctcccgtcatatccgtaatcgcccttcaatatcatcgtaacttattttaaaattttaaaggtcatgcacaacaactattgaaggaaaatttgaatttgattgttttacctaagatgaccgatttcttgataaccaaactcctcgatgattcgattagttataggatcaaggttggctttcttggcccctatcggcggtggtccgcctttagcaagtgtcgcgttataggcatcaagtccttttccggtagccccttttaagaagaactcggcctcggtgaactccaagttcatcgcgaaatgaactcgatcgacatcgctcgctgatatattcccggagcaactacaagaaccggacttagccggatttgcatctactgcaataaccaagacgagaacgagacagagtttaaacatgcttttcctttcgtctctctaataatttatgtctacaaagcatgtacgcaagaacttagcaatttatatagggttcaaattttattttcgtctaacaattcaacgatattaagttataatgttggttagaattgaattgtttaggacattacgtgaatactaagttgatagcttatttaggtatcaatggaatattaacaagtttttctatattgctaactaccatacaacatttgacatttgtcattacgtaaggtaattaacatgatatacctgattcagtgaaatatatattattatcacacgttactatatgcccttgactccttgttatgttatatgtttactctcaaccgatccaagtaggtgtatggaagataaggcaaaagaagaagaagacgtggtaacttatgatggtgactaaatgaaaatatcgataccgtaccttaataagttaagcgatatctgcattataacttgtggtcaatgaaattacaaccacctgtcaagaaagtaaaatcaagagtgtggtcatttataacaaccaatctatgtatgaatgtatctaacttactaactcaaatcaaacttatatttagtttatctatctaagaaaaatgtgtttgacagcatttcgacatgaaattgaaaactagagtcttttcctgaatgaaaaatatttcattggaaaaatataatttatgctttcgcatggtcaatgaactgtacttggtcctgatgattcaagaggtttttttaccttttagattgagggtaaatattatgatcgtatagtatatgattaacacctattaatattcttggtcgtatttgtacaacatttttgaataatattaaaatataaacagaaatcattacagttttatatacgtttttataagtacattattataaatttataattgattttcagacacattttgtatcgtacatatttcttttaaatctgcgttaacagactagcatgagaaactagtgggccttatcttggaatggactgcgtttctgatgctcatgggcctaatcttggagtggactttaatttagtcaatgaaggcttaatttgtgaccagaagataacatctcgattaaacataattgtttgttttgtttactaactaattctaaatcatcccaaagcccatgatgtatctggatttactctgtttaattttgtacggaacataaatctgaatatttgcgactagtaaaaacaatctcaaaaccgtttgaggtaacgcatgcggaagcgcatctggtgtagtggtatcatagtaccctcccacggtactgaccagggttcgattccctggatgcgcaaatttttattttaaaacttatcacttgccaaaacgagttatataattgagcatttgacttttgctggagatttgtaaccatgaatcatgtggcagctctccttttggaaagggtccactgtcttgtcttcaccaactttagtacaaagagatgaatccagaagtaaccacaaaactccactcactcttctcttctctttctttattattaattttttcaccaaaccaaatacattagttgggcttaggcttgcaattacaaaacagataaaattagggtaaacgtgaacacacactctttctctttcaatctactacatacaaattatcttagcatgaagcgaaaggggtaaaaactcttaatccaccaattagaatttttattccaaaaatgaaagattagttaacgtttataattacagaaatttggaaatgtatgtcggtcacacatcataaagactatacaatactgaaaagaagataaacttttagtcatctgtcacagatattgtcgctttttacgagtggaaaatggaatagaaaagatccacctatcactcactacttaaacagtccaagaacacgactaaacactaaacatgtcttgtaattaatcaaagacgaaaggaggaaacaaaaatg

SEQ ID NO: 28612 - DNA, 3003 bp, Unknown
  misc_feature (1)..( 3003): 2750-1469P.txt file - cDNA_ID_2997867; gDNA_ID_2926235; Annot_ID_142740
catgtcttgtaattaatcaaagacgaaaggaggaaacaaaaatgaaacctttctctcaatttttcgtatttgtggttaccgtttccgcgacaagctacattgatgccttcactagaaacgattttccaaatgatttcctcttcggagccgccacttctgcttaccaagttcgactctgtttctgtgttttgtattgattataaaattaagttttttttttggttctctgaatgatgttggtggaaatagtgggaaggagcttttgatgaagacggaaaatctcctagcgtctgggatacaacctcccactgtggtaagctttttttgtttcaattagtttaaaattctttgtatacgaaatatttatagatccttgttcaaaaattgcagatagtggaagtaataatggagatatagcatgtgatgggtatcacaaatacaaggttagtttcttttctttgccgtttacttgtctaacaagttatcgtaagtctctggccctgcattcatagatgttattgtccaggaagatgttatgttgatggcagaaatgggcttagaatcattcagattctctatctcctggtcaagacttatacctagtaacgcctattcttggtttcttaatttccaagtaactaataatgttgtctctgacctcttatattagaccctttttgtctgtgtcatgtttcagatggaagaggacgcattaacccaaaaggtctattgttttacaagaatctcatcaaagagctacgaagccatggtgaggtttttgtcttttactttatcgcaactaaaaccaattcatagcttttgggttctgatagacatattggtaaaccttttaacaggaattgaaccacaggttacactttaccattatgatcttcctcagtctctggaagatgagtatggaggatggatcaaccgcaaaatcatgtaaaaggacaattaaagattctgatataaaaaatatggctagaaaataaagaatatttgttatattgcagagaagacttcactgcttttgcagatgtatgcttcagagagtttggggaggatgtgaagttatggactaaaatcaacgaagctactttattcgccattggttcttatggcgacggaatgaggtatggacattgtcctcctatgaattactctaccgcaaatgtttgtacggaaacatatattgcaggccataacatgttgctagctcactcctctgcttcaaatttgtataaactgaagtacaaggtatacacatttatctctgtttcgctcttaaagccctaaacccatatgaacataaacagtatgatggtacagactaagcaaagaggatccgtaggccttagtatatatgcttatgggctatctccttatacggactccaaggacgatgaaaccgcaactgaaagagctgaagctttcctctttggctggtgagaaaaatgctttctttgtttcagtaacttgaggataaaatctgatgactaaattggtaatccaggatgttaaagcctttggtagttggggattatccggatataatgaagagaaccttggggtcgagattaccggttttctcagaagaagagtcaaaacaagtgaaaggatcatctgactttgtaggagttgtacactacaacacattctatgtcacaaaccgacccgcaccttctctcgttaccagcattaacaaactcttctttgcagacattggcgcatatctgatcggtaagcctagtttcttttcattcgatcgaactcttttagttgatatataactcttcttcattggacagccgctgggaatgcttcattattcgaggtaaggaccaataaatccgcagaacacacaatacatatattcaggccaaaagctctggtttgatccttcttgctttcttgaagtttgatgctgttccatggggtctggaaggtattcttcagcatataaagcagagctataacaatcctccaatctacattcttgaaaatggtacaaacttcattctcttttgtctacttgctctgtttttgatcttaagattcttcaattcacaccaaaaaaacacacaaaaaaaaaaacaggtaaaccgatgaaacatggttcaacgctacaagacacaccaagagctgaattcattcaagcttacattggtgctgtgcacaacgccatcacgtaaaagaactctccttcttcatcttcaagttcatcatactagcattgatcgactttattcctgacaaatattttgactgatcaggaatggatcggacacgagaggttactttgtatggtcgatgattgatttgtatgagttaataggtagatatatgaccagctatggaatgtactatgtgaatttcagtgatcctggtcgcaagaggtctccaaagctctctgcttcttggtacactggtttcctcaatggtactattgatgttgcttctcaagatactattcagttgcagagaaaatgctcaggctcttcgtccttgtaatctatttaactaaatcatcctagttttgtttggttttcatttcatctatcgtatgaaaaaaaactcagtggtttgataagatttggatatgaataatgaaactgtcttgtgatttttgtcggtcatcataagatttggatatgaatattgttttgttattttccgaaatttgtttttaaactacaaccgaaccattatgatgtgttacctatattggcaatttggcatgtaggtagagtcagtacatggcaaggattacacacttcaccaaaaaaaagatatttctatagtcgttttcagatgtttatttgtcgcgtattacgagtggaagataatagaaaagatatagactatagtcctcacaattcaccaaaatacacttcactcaatatatgtatttctttttaaatggtccaagaaaacgacagaaccggactcttcaattatttgttcatttggactcaaaccggaggaggaaaatcaaaaatg

SEQ ID NO: 28613 - DNA, 3000 bp, Unknown
  misc_feature (1)..( 3000): 2750-1469P.txt file - cDNA_ID_2997871; gDNA_ID_2926235; Annot_ID_142742
gaagactacctcgagtgtcttcaccattccaaagaggttaggtttcgcctttttcctttttttagggtttctttcaattatcgttcctgtgttgttgtatgtgtcatcaattcacgcttttgattgcttgatctgtttcattgatgattcgtcctgttatcggtcgtctgtacgatcatcgatagtttctggatcacgagtttaagtcattcctagatccgttggaacaatctctcagtctggtcgtttcgtttgctacatgtataaaaacataagctttctttttgcttgaaactagaaaagttgaattgcaatctcccaagtatatatgtggatgctttcactaggttgcttgtagggattaggttaatataataccacttcccttatctgagatttagtttcatggccatgaattgtttagctgttaagtttggaagttgagacttactctttatctcttgtctctgtttgatctttcaaatggaacgatattgtctctcttctctatgtgttgaaatcataaatttgaatgaaactgaatgtataggcttgcgtgtgaacttttgagggaatcaaaagctttattattgttgtctccaatattgtttctttcttctttgcttagtataagcctatggtagatgaactgataaggagcgcatatttgtgtattttgatctagttccaacgaagaaacaggatatacaaagaagaacaacgtaaactaagagctgcatcaaggaaaggcgaagaaaccggggatgggactcatactcatcactagtcgagattttcctcctatctccaaagtttgcatctttcgaagaataaacaaaagtttcttgaagatttctgtatcttgtgtgccaaacttcatttgatcgtattcagtttgcttttgcaatggatttttttgtctttgctttgtctattacctttgaccgagttgtaatatgcctttggctactcgtcaaacacagactccttctttaatggtaataattactcctacagttatattaaaatcattattcgagagacattaaaaacagaacagtgggtggaataatgaaaaggtcctctataaatagttgtcattgactttcacttagtcttctctgcaactcctatatgtaatgtgtctagagagaaccagctttttcattgggtaatatcaaaatggggacgagatctctagaaataaatgtgacatcagcaaaagggcttaagaaagtgtcgaagatggatgtttttgtggccgtgaagttatccggtgatccaaaatgctctgaccaccgtgagcagcggacacaagcggcaagagacggtggaaccagccccaaatggagcaatgatgtcatgaagttcatcctcgaccaaaacttagcagaggctaaccgccttgtgatcactttcaagatcaagtgcgagcaacgtggaggagtagataaagacatcggcgaggttcatgttcaggtgaaagaacttctggatcatcttggaaacgataagaccggtcaaagatacgtcacatatcaaatcgggaaatccaaagccgatattagtttcacttattcgttcacaggtccggtggaggtcccgaccggtggcggctgctcacggtacgcagctcaagcgccggtgcgtcctgtatcgacctaccggcccgttttgaacggacccatgttgagtcagttgaacggacccgtgttgagccagttgaacggtcccgtgttgagtcagttgaatggtcccgtgttgagtcagttgcagggacccgtgttgagccagttgaacggacccgtgttgagtcagttgctaccaagtgttggatcgtttagttacaaccacgttccttgtcagccaccgatttatccaccacttgctcagcctgagattcttccaccggtatgcttccccggattgtatccgccgagtaacatgccgggaagtccacccacaatgtatcaatctatatttcctggcttatcatgtccaccagaaggttattcaacggtggctccgccgctgacacaaccgggactatatccaccgatgagtccttacagatattaattgattgtcaacgtctggaagcctagtcgtcggtttggagatttgttgattttatttaactaatgatgtcatcaattcccccaacttgtgtgtgtgttctttttcttcgaactcaacataaaaattgttgtgtgtttttttctctctttctaacaaaatcacaccctaaattgttacgttctttacttagacgtttttggtttgtaaaatgctctatctgtatcatgtttgtactgtcttgtactctccaaaaatggttcaccattgatgaatgatgcacctggttaatatatataacaaacctttttggaaaaagaataaaaattgttgcgttttttttatttttgaaaaatcttcttcataatattatttctacatttttttagttggcatagataaatgcgagatttatgtaacaatcaattaattatccttcaaaataaacaataggaagaaaaaaaaaaaatgatttttaatgaaataacacatttttttattgtattttcatttataaaaattcaaatatattttataacctaatggtaatagtatattatagttatacactatagtaggatctatgatatctatatctggagtttatctgaatcgtaaagcaaagaatctaatttttttaaaaattgtcttaataaaaataaaaaatctggtgttattcacaaagaaataatatttctgaactgtaaaaaaaaaagaatcagttaaaaattccctgtaaaatttgatattatccaattatttgttaaataaagaagtcgagtagccgcctgaaagatatatgacggcaggcaacaagcaaagcacgaagtcatcttcttcctatttcttctattcctccttctccacgcttcttcttcttcttcctcaatctctcttacgattccttcaaatcattcttccatg

SEQ ID NO: 28614 - DNA, 3003 bp, Unknown
  misc_feature (1)..( 3003): 2750-1469P.txt file - cDNA_ID_2997883; gDNA_ID_2926235; Annot_ID_142746
ttgggttgttttttcaaatttaatagttaattttccacttttaaagaaaacaattgcttttcattgttttggagaaggtagttcacgcccatggctgtttctaagctagggaatcttttcttatgtgagagtgagaaaaggttgttcaaatattacccagagacagactacctttgttgcctctccagacttttgtgttataacttctttcgtcgaaaatttagtctcacttcgttccaggcccgactcaatattattttgggttctgtgctaaaaaaaaaaatatcccctttaaacctttaaatccaaaaaattttagtttacgtggcagtgtttactgtctcttgtaaacgtaatacacttgtagttctattcaaccattgtaattttatctagaaaaataaaaattcctataaattaggaccctaaaatttaagagagaaaataaggactctgtgccttggcactgctggcacaccctgcttcgttcacaaccaggatctgttcggaaaatcagcacttgtgggtaccaatatggacttagctatgtacaacctgaatgtcttccgaaaatcatcagcacatctccgcaccggtctcgaatatctaatatcgtgatggaattgctgttcccaaatattttgcttacctctactctagtgtctctaattatattcggttatcgttacaaatattctacttgaagcggttacttatctagctggttttgcttatgtctacatcttactatttaatatttattctgttaagcttttccataatctattaacatttaatctcgccttgtttctaataaacacaatgctttaaaacaaaaattagtcattacacagtatacatactacatagcatattgcttaagaaaaccagagacgagaagcattctatttctacaaacagatgagatatagcttaccttaacattctatctctacacttattatgcatcaaagatgatgatgtcgttatggcttcacaagacgataggctataaatttatcatctctaaagagcatctccgcgtcttgaggaagagttatctcggggttccatgggcgacaaactacatgttggccagttggtatactcaggtggccagttcccattatgagcttctttttctcactctcatctactacacatgatgatgtttcactaccatcgtttgtgggattctgaggcatccacgaagaacaagcagcaatgttcctcttgataccattggcagctggtgcattaagagtaataacgtttgtaggattgtgaggtataggcaaagaagaagaagcaatgttcatcttcataccatcagtagttagtgcactaagagtaccatcgtttgtaggattctcaggctcattcaaagcaacgttaatctccttagcattactggctggtgcatcatgaagatctggaaattctgcacagaatcaagactgtagagcatgagttttgaatgaattaaccatcttgaccatttagcattaaactgaaattggaatccatttcatgcagttaaagtaaggttggctttcttatttcatagctgtttcctacctatctcaggaaaatacgtccctctgattggaccacaagttataacaaagaaagagagtttttcctttaacaaacaaaccaacggattattcatgtagtgtagtattcaaagaaaactaaccatcttcattcactttaatcccctttgatggggtatcaggggtcatcaccaccttggaagaaggttgagaatggatctcttgtggactgctcttcacatttgaatttacatcttcttgtctctcactaggcaaagtaggcgatccggtctggttcgagttcccatttttgatactcatgaatgcaactttagcagcgctcatttcagccaactttttggttttcgcctcttctccactgaaaactttaccagcaaactcaacagttgaagtaaaagtaggcgcatgcgatggaccagatgtagcagttgcataaaatggtaacagagaactctctttctgtgcaatttcttgtaacaggttcttgtaggcaacatcaattccctgaaacaacaaaaatttgaaaatcaaaatttaaacaaatgttgaaaaagcacataacttgtagtccaaaaagagtgtgaggaactagcctctggactttgtggcgtcaaagaagcaactgcaatttttgcagcggcatgttcagccgattttagtgtcggaaagaattcagagctctggaaagtctgtccacagaatgtaacattacatctaaatctaggagcatgaggaggcccttctctctcattcgcatacactggtagctccagattatgttgcagggcatacgcttgcagttgacctttgtatacatgatccatctctatctaaactggcaggaattaaccaaacataaagagatcaacgtgtatcagaatttctcaaacataaatggcaaacgaagagacgaatttcagatttcagaattggtcaaccaaacataaagagatcaacatgacaacatgtatcagaatttctcaaacataaatggcaaacgaagagacgaatttcagaattggtcagactcaatgatctagggtttcgtacagatcgataacatcaaaacagcgaaaggaatctacgattataaacacaaaatcgtacctctttgaaatggtgaagacacttcgagggaggaagtgaacaatcagacaaagcattcgctgattgaaactcatcgagaaaccataataagtatacacatgtaaattgtctcaaggatacgaaagattcgggttaacccagcttgaacgggtatgatccgaaataatccattaatgggccaaaattgggcttattcatgaaagttgtaaaggcccaatgaaactcgaagttgatcagaaggttgtcggcgaccaaatttctaaatccaattttgggagggagacgacggcggaggttgaaaggggaaagagcagaaatg

SEQ ID NO: 28615 - DNA, 3003 bp, Unknown; identical to SEQ ID NO: 28614
  misc_feature (1)..( 3003): 2750-1469P.txt file - cDNA_ID_2997883; gDNA_ID_2926235; Annot_ID_203842

SEQ ID NO: 28616 - DNA, 3000 bp, Unknown
  misc_feature (1)..( 3000): 2750-1469P.txt file - cDNA_ID_2997887; gDNA_ID_2926235; Annot_ID_142749
ggtggacgtcgtttggtccatagatcttctatgtaatgataaactaaacagagaagaatctgttttattttgtacttcagattcgttttcctaaatcaaaccaccatcgtgtccaaactaaaatacatagacttcttgtaagttgtaacgaaacacaaaacagctacacgatctttctttacatgtttgaaggaagagaatctctggacttatatatgaatatttaatgggctttagtctcctcaggcccaataaataagtgggcttaaatttacccctcttaaaccgccattgtaccacttgattttctcgagtcccttcttcatcacgaaagcgggatttagcgttagcaggtaaaaccctaatttcttcaagaaacatatcttgttgaataagttaggtttctttgtaaaaatcattgactcttgtgtctgtgaatttagtttaggttgagaggatgtatacgccgggagcggcgaagcctgagtacgcgagagctaaaatagctgtgtggtgggacatgaaggactgtccgattccagagggttatgatgctcgtctggtccgtccgagcatagaagcggcgttcaatgaactaggctactctggtcctatctccatcaccggctatggtgaccaaagagaaaccccttgtcagatcctgcgagggctctcttccaccggagtcgctgtagcacaaatcatacccggttagtccaattgctatcgatctctttgaatgaatttagtgctagcttggtttaaatttgaacaacatctcaagtcaatttcaacagaaagcagatgctcactcatgtattcgagtatgctggagtggcgagatcttaatcctcctccggctacaatgatgctcgtatccgatcagtggcagcatgtcttcgcttgggatctgtcccgtctacaacaacacacgaaatacaacctttttctggcttattcaactgagcctttcgcaggttcggcactgagaccttgtggagagtggatctggagaaatttacttgagaccaaaagggaatttgttcaggacaagtgcagcagcagttgtgaggtatctcccatgttttattgcaaatcttgctcttaccagggccaaagcgtggagggtttcaggaggcatgtctcgagtggaaagcatgcagtgaaagtaagtaaacatcctcctctagacccagtcaactataatgttgaataaaaatatagattttgatctctaaaatataaattctcgcaggaggttacaaaccgtatacatccagaacttgactatttgacgaggacgtgggcaaagaactacactgcgaagcctgagtacgcgacagctccaatagtggtgtggtgggacatgaaggactgtccgattccagagggttatgatgctcgtcaggtccgtccgagtttagaaggggcgttcaagaaactaggctactctggtcctgtctccatcaccggatgtggcgaccacaacaaaacccctgatcacatcctgcgagagctctcttccactggagtcgatcttgcacattccatcgacggttagtccattcggttaattatatccatctctctggaatttctactgaaatgcttttctgttactgtctgaaacagaagtcatatacagtcgcatgtttataaatatgaagcagtggaaagctcgtaatcctcctccggctacaatcatgctcatatccgatggtgtggtgatgatgttcgaaaatttaatcgccgacttactacaagagacgaagtacaacctttttctggcttattcgtacaggccttacaaaatgtctgtcctgctcacttctgcagagtggctttggaaaagcttacttgttgcaggtgtttttttctcctctccttatcatcatcatccactaatgactctgtttctgagctatataattacgctctctgtttcagagacaagaaaccacgttcttcgcaagtgcagtcaaagtcaaaggggtgaaccgtctaccaaaatgttttcttgcatgttgtgtctttgtgattgcaaaagccttgaagatttgaggacgcatctctcaagtgaagaccatgcagtgtgtgtaagcatcctcctctgtatcatcatttgagcaacaaaacctgtttaactctttccatttgttgtcaagcaggagcgttattttcctgagagaattcgaatgagaaaccgctgtagaaagcaatatcagaaggcaagtttttctaatgattgattaaatattttcaaacatgggatttcttcttattaacagttacatatatatcttgtagacccaagtactagaagattttcgaaagagcaaacgtatgaggaaagcataccggacgggttttggtcatcttcataatcagttacgtcttactaatcgttgagctcaaacctgtcctggaagttgttacttcattttataagttacaaattgctcaaaccctacttaagaaatgtaacgaaagggaccttgtactttgaacaacccatccaatgagaagagctgaccaggctaaaccacgaatctgagcatttttatttcatgtaaaaggtgaaaccattttgaaaagtcaaaatctctgtactcctgtgaatatttgaatgggctatgaaaataataactaaactgaaatttattccaattaggccttaatttataaacaaaaaacatatgaggatatttaatgggctttagtatcttaaggcccaataattagataggcctcaattcagccctcttaaaccgccactgagtttgtttacacttgatttctcgagtacacctcatcattcttcttcgtgtgagagagatctttttggaaaacgaaagcgggatttagcgtatagcaggtaaaaccctaatttcttcgatctgcgtttctatgaaaatctcttgatagtttctaaattcatcgttttcctccttttcagcttccaccgtttcgccgaatttcatcgagcttcaagtgaacatg

SEQ ID NO: 28617 - DNA, 3000 bp, Unknown
  misc_feature (1)..( 3000): 2750-1469P.txt file - cDNA_ID_2997895; gDNA_ID_2926235; Annot_ID_142751
ggctccataggcatagatgctataaagctctctgcttctttgatcaaaccagatcttccgtagagatcaaccatacaaccataatgctggattgatggcgtgataccaaattcctcaatcatcattttaaagtaagattttccttcgtttattagacctcgatgtacacaagcaccgagaatgcccacaaatgtcacagagtttgggtttatgttgtcactcgtggtcatctcagagaacagttggaagcactcatctgtgagaccgtacattgctaagcaacatatcatagcactgtaagctttgacatctttcttggatcccaaggcattgaaaacccttttcgccctctcgaggctcccacatttggcgtacatatcaatgagagctgtgcctaagacaatgtcaatctcaacgtggtacttatcgatgtaagcgtgaacccatttcccttgctcgagcgcacccaatcgcccacaagccgagagtacagtcgacattgtaaactcgttgggtctgacgaatgcttcgtttggtttaggtaattgcatctcccggaacaaatcaagcgcttctttgtatttcccacacataacgtagccgttaatcaagcagctccaggaaatcacgtttctttcaggcatttcgtcgaacagtttccgcgcatcatcgatcaacccagctttggcataagcattgaccacagagttccaggccggtaaatccttcgagcccgagtcatcgaaaactcgctgagctgatctcaagtcgccacaggaagaatacatgttgagcagtgaagttcggacaaatgggtctttgtcaagtccaaaaagaagaatctgagcatgagttcgttgcccaagaggaagatgaagcggattgtggaaagaagggagaagaaacggaaaggtatgaaaatcgggagagacgcgatggttgcgcatacggaggtagactgagatcggagaatgtcgttgaggcgacgaaacattgtgaacaatggcacgaatgatgatgttccacaagaaagattcaagctttagatgtcgaatatgaaagatgggatttgcataagctattattgccgcccccttgctcattgtctcaatctaacaagtgtatcagaaatcgattttaaatatcaagtacggttttgacaaaaccgaattgaaccggtatttaaatgaatatttggtttcttaatcaatgtacggacggagaggtaacaaaacaaaagggttttgtcctaattcaattttgcagagatggaggaagaattgctctccgccgtgccgtgctcttccctaaccgtcgagtcagttctccgtgtcgcgacggtaatcactagtatccaattgaaattcatgtttgtgttagtgtgtgtatagatagatgtctgagatttttgttgaagctcaggccggtggattatatgggttatgcgccggacctcgtgacgctcgtaaaataggtattgaaattagctttgatttagagagtttttacacttttcaattcattaatctgtgctttgttgctgatttgcttcgccaggtttaagcggcgtttctcaggcttcctttgtggcgaaatccattggcagattcggatttcaatgcggtaatttgcttcctctattgtttttccacccaaattaatcttcaatgactatggaatttgggtataaatctgtaattttggacttaagataattctcttctttgtcactagaagaagaatgctgcatatactttttttttgttttgaaagatcataattctctgttttgcttgccatgtaataatatataatgcagatttcttttagttgtaattttttttggattagttgctctgctcttctttaacttagatctaaattcttcaagtagtgattgcttctttagattttggtatatgcatcaagaattcatttttgtttcaggtcttgtaagtggtgtgtttactatgacacattgtgggcttcaacgatatcgaggcaagaatgattgggtgaatgctttggtaggaggagctgtggcgggagcagctgttgccattagcacaagaaactggacacaggttgttggcatggctggcctcgtctctgcttttagtgttttggctaattgcaccaggacagaaaacccaaacaacactaattaaggtgatatttagaacactgaattttgctaataatgcgagtgtctgtcgcagccacattcaccggatattgaaactatcttataagcttgcaggtctttgacaagtccattcaagaaactgtatggaattggaacttgaagatcaatacactgactctccggttcgatcctatttagttggctgaacccgtggatggttcttcttttctatagaccacacttttggtcttgtctctctgtagtcatcatgtacacacaaagtccctcgaacccgaaaccgtatttgcatcaatgcttattactgtataatgttatttacaagatagagatagtcatagaaaaattaaaacatcaaaactgatttttaataaagtgtatgttaatagccatgctgtttcttaggaaagccagtttattcacgaatccaccatttttctacttcaaaatttataaatgtatttcactctttttgatatgattctttttgttctatatgcttttttgaatactaaaagctatcagatcgttcgttgtgtaatttttttctataaaaaatatcgttgatttaataaaaaaatatagaaagtaagatataaagatcatgaatatataattttcttgacgaaaaattattttcttgatattcagaaaatctatattgagagagcaatacgtgtccaaaaacgtaattttctcatctgggcttctgaggaaaaaaaatatttgtatcatttgggcttcagtgtctttataaatagtgaaaacacaaaaccctaagagtcgctcttgctctcagccgtctgtcttacctccagaagtcgacgacaacaatg

SEQ ID NO: 28618 - DNA, 3000 bp, Unknown; identical to SEQ ID NO: 28617
  misc_feature (1)..( 3000): 2750-1469P.txt file - cDNA_ID_2997895; gDNA_ID_2926235; Annot_ID_203846

SEQ ID NO: 28619 - DNA, 3000 bp, Unknown
  misc_feature (1)..( 3000): 2750-1469P.txt file - cDNA_ID_2997897; gDNA_ID_2926235; Annot_ID_142752
gagtccaccctgacgaggtttctggtagaccaaggaaggaacttggcatttgagtttttcagatgcttcttttattctaccaaaggaacaattcacaatggcaacattataacaagctactttcccatctaattatccaagaaacatgtatggattatacagagcaaccaagatgtaacttctggtaccggaatttctatttctcgatcccgtgacagtgacagatagtcccccagtatcaggtcagtaattgatacatcaatttcaatatctttttgtttcaacaagctcttgttttgtctgtgctaacctactttgaatgtgtgtctgcagattctaaactgttctcattcaaaataagccatttagggtattacaaagaaaatatataataatattacaagatttggagttatagtagcttttcctgtagtggtgataggctttctaagttttaggaggtaagaaaaagttgcatctattcttttgcaattttaatttgttgaagttatcttatatttactcaaactcaactctgatgtccttttgttgctctttctcttggcagtgttgtcttttttgtagataagaaagtaaaagttacaaatagagttttgccgtcttgctttgccggaggagctttcttagtcactggtaacttctcgatctgattttcaggtgcagtcttccggcaaagttcttaattaggctttggttcgtgtaagctaaaacaatatgttatgtttttgactggaaattctcgactgagtctatatgtatatatgtatgccgcctctgatttcaagggccttctaaatgtataaactgtgcattgtccatcaaaaatgatggatattatctttaatacaaaaaacatatatgagtgagagaattttactgtcctctgatcagacactatatatatggctattttagttcttttattattttattcttttatttcaaaacctccaaaattcagtaatgtgtttattcaatccaacacaaacattgctgcaattgttatcaccaaaaatctctgcaagagcaagacccgtctctaaaatggtgaaatctattacaatctctcacaacaatttctctactaaaaagcttcgagatcatcttcattacaagatgacaatctccacagattctgaggttcttgatgattctcactggagttccaggccttgtcttcatcaaacagaacgcaatagccagtttctcactgtggtaagacaaagctatctctttatctttctcgttaagatcaagtaaaacctccttagtgtctgtaacatatccagcttctctcagcctctgcattatctcatcgagcatagcatagatcctttcgctctcttgttgagattcgtctcctacaacaaactcgtgaaccactccctctacttcaacatagctacatcccggaactttattaatgccctttacctgtagagagaatctgtatttacttcagaaactgtgcaacagttaagaaaagagttggaaaagagggaaatagttttgcattgcctccatttcgtgtctgatacacttgacttccatccacctccctgttttggcatagacgttagagagaagcacatatgctccactgttcataggatctagctcgatgagtcgcttgagggcaccttcacaagtcttgatatccccaagcattcttgatccgcttaagagagacccccaaataagtacatcaggctccataggcatagatgctataaagctctctgcttctttgatcaaaccagatcttccgtagagatcaaccatacaaccataatgctggattgatggcgtgataccaaattcctcaatcatcattttaaagtaagattttccttcgtttattagacctcgatgtacacaagcaccgagaatgcccacaaatgtcacagagtttgggtttatgttgtcactcgtggtcatctcagagaacagttggaagcactcatctgtgagaccgtacattgctaagcaacatatcatagcactgtaagctttgacatctttcttggatcccaaggcattgaaaacccttttcgccctctcgaggctcccacatttggcgtacatatcaatgagagctgtgcctaagacaatgtcaatctcaacgtggtacttatcgatgtaagcgtgaacccatttcccttgctcgagcgcacccaatcgcccacaagccgagagtacagtcgacattgtaaactcgttgggtctgacgaatgcttcgtttggtttaggtaattgcatctcccggaacaaatcaagcgcttctttgtatttcccacacataacgtagccgttaatcaagcagctccaggaaatcacgtttctttcaggcatttcgtcgaacagtttccgcgcatcatcgatcaacccagctttggcataagcattgaccacagagttccaggccggtaaatccttcgagcccgagtcatcgaaaactcgctgagctgatctcaagtcgccacaggaagaatacatgttgagcagtgaagttcggacaaatgggtctttgtcaagtccaaaaagaagaatctgagcatgagttcgttgcccaagaggaagatgaagcggattgtggaaagaagggagaagaaacggaaaggtatgaaaatcgggagagacgcgatggttgcgcatacggaggtagactgagatcggagaatgtcgttgaggcgacgaaacattgtgaacaatggcacgaatgatgatgttccacaagaaagattcaagctttagatgtcgaatatgaaagatgggatttgcataagctattattgccgcccccttgctcattgtctcaatctaacaagtgtatcagaaatcgattttaaatatcaagtacggttttgacaaaaccgaattgaaccggtatttaaatgaatatttggtttcttaatcaatgtacggacggagaggtaacaaaacaaaagggttttgtcctaattcaattttgcagagatg

SEQ ID NO: 28620 - DNA, 3003 bp, Unknown
  misc_feature (1)..( 3003): 2750-1469P.txt file - cDNA_ID_2997899; gDNA_ID_2926235; Annot_ID_142753
gcagcagtcttctggtgaacgacctggagagtagaagcaggaaatgaacataaattagggtgaaaacattaaagtaagaaaaactcttaatggaagtttacatccatggagtggtgaattatttaccgctccaagacgagattttcccttaacaatgcagtaagggacttccattttcctgcagagtgcaggtaaccagaccaccaactcgatagggtcaacatcgtgtgcaatgaccacaagctgtgccttgttctgctcgatgaggtaagtcacatggttgagaccatacttaacaacaatgggcttcttggattcagcaggctttccttctgcctcagcttgagccttgttcaaaaggcgttccttctttgcggctttgtcctctggcctatacttcagaagaatcttgaagaggctggtggctgcaattacatgacacacattaagcaactgatcatacaaacatatagatttctgaataaccataagaaaaagagactaaccgagattcttatcaagggtcttggtgaactggttaagagctggaggaaccttcaacctctgcttaaggatacgcttctgcctttgaagacggattgacttaggccatttgatgtaacgagaaagatccttcttaggaggcaaagcgccaccaataccgaattgctttgggcgtctctcaaacaatgggttggtaactttctcctaaaatacacacaacaacaaatctaatgagaaactccaccaagactaataataatactcagagaaaaacaaacaatgcttaaaggaaaagctaagagagcataccggcttcttctttgaagccactttaactcccttcttcggtgcctatgaatcaacaacaaacggcgataagcatcagaaacaagagtcacatatcaccatagcatcgatgcattcactatacaaactacgaaatcaaacaaagccagaatcctcagggacataagtataagccagattccaatatagatttgacgaaagaagctcaaattcgaggaaacaaagagctaatacagatcctaaacaaacgaaagtggcaatgaaagctgcaaaatggtgtaaaagcggcgtaccattgttgtcgtcgacttctggaggtaagacagacggctgagagcaagagcgactcttagggttttgtgttttcactatttataaagacactgaagcccaaatgatacaaatattttttttcctcagaagcccagatgagaaaattacgtttttggacacgtattgctctctcaatatagattttctgaatatcaagaaaataatttttcgtcaagaaaattatatattcatgatctttatatcttactttctatatttttttattaaatcaacgatattttttatagaaaaaaattacacaacgaacgatctgatagcttttagtattcaaaaaagcatatagaacaaaaagaatcatatcaaaaagagtgaaatacatttataaattttgaagtagaaaaatggtggattcgtgaataaactggctttcctaagaaacagcatggctattaacatacactttattaaaaatcagttttgatgttttaatttttctatgactatctctatcttgtaaataacattatacagtaataagcattgatgcaaatacggtttcgggttcgagggactttgtgtgtacatgatgactacagagagacaagaccaaaagtgtggtctatagaaaagaagaaccatccacgggttcagccaactaaataggatcgaaccggagagtcagtgtattgatcttcaagttccaattccatacagtttcttgaatggacttgtcaaagacctgcaagcttataagatagtttcaatatccggtgaatgtggctgcgacagacactcgcattattagcaaaattcagtgttctaaatatcaccttaattagtgttgtttgggttttctgtcctggtgcaattagccaaaacactaaaagcagagacgaggccagccatgccaacaacctgtgtccagtttcttgtgctaatggcaacagctgctcccgccacagctcctcctaccaaagcattcacccaatcattcttgcctcgatatcgttgaagcccacaatgtgtcatagtaaacacaccacttacaagacctgaaacaaaaatgaattcttgatgcatataccaaaatctaaagaagcaatcactacttgaagaatttagatctaagttaaagaagagcagagcaactaatccaaaaaaaattacaactaaaagaaatctgcattatatattattacatggcaagcaaaacagagaattatgatctttcaaaacaaaaaaaaagtatatgcagcattcttcttctagtgacaaagaagagaattatcttaagtccaaaattacagatttatacccaaattccatagtcattgaagattaatttgggtggaaaaacaatagaggaagcaaattaccgcattgaaatccgaatctgccaatggatttcgccacaaaggaagcctgagaaacgccgcttaaacctggcgaagcaaatcagcaacaaagcacagattaatgaattgaaaagtgtaaaaactctctaaatcaaagctaatttcaatacctattttacgagcgtcacgaggtccggcgcataacccatataatccaccggcctgagcttcaacaaaaatctcagacatctatctatacacacactaacacaaacatgaatttcaattggatactagtgattaccgtcgcgacacggagaactgactcgacggttagggaagagcacggcacggcggagagcaattcttcctccatctctgcaaaattgaattaggacaaaacccttttgttttgttacctctccgtccgtacattgattaagaaaccaaatattcatttaaataccggttcaattcggttttgtcaaaaccgtacttgatatttaaaatcgatttctgatacacttgttagattgagacaatg

SEQ ID NO: 28621 - DNA, 2473 bp, Unknown
  misc_feature (1)..( 2473): 2750-1469P.txt file - cDNA_ID_2997903; gDNA_ID_2926235; Annot_ID_142754
ttcaaagtttggcactaagcaaacatcctgcaagtctgaagcctaatctgaccataatctgaaaactgcagaggtacaaagaacaagccctttgtttaaccgtatgcaacaactagttctgagaatttcataagagtcttgaagaggcacaaaagataataagctttggtgtcattagtagcagaatttttgacatgagaaacattatgattttcacagcatcaatcaaaaaacagatgacaatgtagtaaataattcacaacaacaataaataagagaacatatggcaaccctgaattaatgagagtctctcatccctgatgctaaccctaaatttttcttctccagttcactctctctctcagttaaccatgggcaattatggagtcaaagttcctgttagagatcctctttgttctaaagaaggtaggtagtaatatttttatatattttcactatttaaaaaaaaatgattcaatttaatattagattagtatttgctctcatttttattttctatcttatattttaattaagtttaattgaagtttatagtgctatttgtgaaattagaaatgttgtgctaattttgaaagatatttttttttggtgctatttttgtcaattccccatagatattttgtttcattttatgtcaattcgcattttaattatacgttatttttctctgttaagagatgatcttcttgttaatttttcatcttaaattattttgtttaaatatatctcaatttgcatgtcattttttttttggtttgtctgtccagatttggatacaaaagacacttgtgagtgttgattttaggctctctcataaacgaactattcttgcagagattcacatgctagaaaatgtggaaattgcatatatttttttttttcttaagaacccaccattgcttattaccaaaattttaatcttttaaccaaactcttaacatcaaaatttttaaaattaattatatatattcataagaactatcctaagactactgccaataatgatgctttaagatcatccttattgatgagttcttagacaaaattcttaacatttttgatgtagaatataataattaaatattagggaatttttaagtggaagacagagtgtatcaaaaatctcttatttaagaactaattttactcttctaaaaaccttttttttttattttttattcatattttattttatctaatattttaagaaattatctaaatttttcttagaacccatggataatgatgctctaagtctacaaataaaaataatggcaactatggaaagacgaattaggttccattttactctctgagacactctctactatttaaaatgaaaatatattttctcataatgccatattaacgacacatactttataattatgataatattatcaactaattttttttaattttgagttggtattaacaaaattagttgctatataaccaatttctttgtgtttttgatatgtaactaaaattgttgcatttttttaatcaaaaaaatataatataccgtaataaatatagattgacatgaatattgaatatcttgtaattatatcacataaatgcatagtaaatggaattaagatgtcgaaatcaatgagaatgtgggtacatttacatttactttataaaatttcgttacattggtagcagtctttcatctcacaaaattttaattactactaatgtagtgaatgacaagtatatgaaaatattaacagaaaaaatataaaaaaaaataacagaaaaaactgagtttaaaacacgcgccatcataactctatcacgcaccttgtatagttcagaccaccgcaaagctagtgaaaccgagacgcaaggtatagcgatttatctcgcggtcataaaagtaaaattaaaggtgaaaaaatcatttattattattgtccctcatttttcttacacgtagagaagaaaaaatggataaagtaaattaaaaaacaaacaaaccgcggctgccctataccaaaacccgggagattgtacgatttcttaattggtttgggcctttggctttgggggtggtggcttgtacttaattgatttacccatcgaaagagatcgaaacacattttttgatcattcggcggaggaaatcgggaaaactcaattctgctttcattcgatcggattgtttccttcaattgaattcgtcgatactcaattgcaattttccactttctgtgtttcttactttgtctgttgtattcgctgatccgatttctaatttgatcaagctagggctaatacatcaaacgatttggggttgggtttcactgttccgttgatcgctggggttgatttttaggaggatttgtgtaccttgattgattttgagggtctgttgattgcaatgttagaaagggcctagggttaagtctagggttttgaggttaagatcgaatatatagttatg

SEQ ID NO: 28622 - DNA, 3003 bp, Unknown
  misc_feature (1)..( 3003): 2750-1469P.txt file - cDNA_ID_2997909; gDNA_ID_2926236; Annot_ID_142757
atacttgagcccaatatcgccctttgtggcccatttaccaaatcccaaacattgacccgtttgtcgaacgtcccctcggacaacaaatgtccagttcatttgtctgtagctggtgacttaaattagtgacaatcatcggcgagtagcaaccacaattttcagtcgctaaactttttagcgatcagtcgctgaatcaatcgataagtaaacgaataatttaacgatcataaatataaattactaatgattaaaataaaataaaataaattatttaaattaaacttaattaaataaatctgaattaaattcaaataaatcttataaaattaagttaaaataaaataaaatataataaaattaaatgaaatcttatttaattaaatgaaaataattcaaataaatcaaaataagtatagtcaaattaaatttgaaaaaaattaaagtaaataaatgtattaattttcttttgatggtgtataatatatataatttacatttttagtttaaattataaattatcataaaaaataatttaaaatttaaaaaatatagcgatttagagcgacagtcaaacgaacaatacaacaattactagcgacagttgttgttgcaattagttgctgaatccaacgacaaccaaacgaagaatacatattgtcgttggtcgaggatcgttgtcgctggattcaactacatacaaacgaacatgacctaatatttacgagagacatggaaatgtgttgttcaacttctctttttaataggtacaataattaagtaattcagttaatacttcccctccaaaaagtaaaccacctaattgatcacataagagatcacctaactttctactactaagagcaagctttattatatacacaatgaatctagtaattctctcataactaaatacaaaaatcacctaacttttgacaatataatgcgtatatgttcagttcaaaatgtatgattcgacgtatcaacttaaaattgaaatcacacattgtaagtcttttttttttataaaccttataccaatatatttgacaatttttaaaatttttgttactcgtgatgtgatgtctataaatcagtgaagactattttcacactttacattcaataaacaacaaagttttttttgtatccatatttcatgtactaagtctccacaaattatagccaaattcacacgtgttaatattttatcaatgaagttaatttaaatttacatttatttggtttttagtgcggaaaattcagctttttgttattgttttgtcaacgcattatgttttatctcttcaaatgatagtaaaaaataatattttaattaaaattaaaattaaaaatttggcttaaaaaagtttgttgagttttttggggtgaccacctgaaacctctctttgcacattgaccggaaaaaaagttttttgattgagtaacgagataaacttaatgagttgtcgaatttacccctaagacatagcgtaatttactaatcaagtactttaaccagactctttcactaatacaaaatctctatattttttttttctttctttaatttccaatttattttttgattacacatagtttctcttcattcatctctttctctccccgtcttttcttgttcctataatcatgtccgtccaataaaaccctaattttatctttccttgcgtcgtttcactccattacagagttgtagaatttagcttgccaaaaagtgtgaagattagggtttgttctagatgtcctacaatcaatccagacccgacagaagcgagactcaatatcgtagaactggtcgatccaccggtaaccaacaacaacaacaacaacaccgatcttcttccgccgccggttacggtaagggcgccggcgctcctggttctgcgcctgccccttccacttatcctgataattcttccttgtcttccaatcgcaggttttcatttcaaattcgacttttttttttttggatgattctctgagccattattggacatgattaattatgcaaagtttgatcctttattgttatttatgacagttttaagaagcccggcaatgctcaaggaggagggcagcctcgggtgaatctgccacctgtgaatcatcctaataatcacaacaatggtcccaatgctcactctcgctctcaaggtatgatcgttattcacggagtgccgcaaagtctttaaatttgtataatttcagattaatttggtcagtgtgtgagtgatcgtttggtttagttcaatctatcttacactgttagttacaggagaaccgggtgttggtggaccaaccaatccaactgaatcgttcaacagaaacaccggacctattccaaaggctccaacttctcagtctaccgtcatgagttccaagatcaatgagacgcccaacacagctaaaggtaggtttttgttgcatcgtctatttttttgtatgcatactgagctttgaagttgaactaaattcctctgtaattccataaaggtataagttttataatgtttattttgttttgtttagtggcagcctctggagacgcttctcaggcatttcctctccagtttgggtcacttggtcctgatttgatggtaatgctgttgttccttcctttgtttgtttgatttttccatcaacacctgaataatcttccctgttggttttctaggttcctgctcgaactacctcagcacctccgaatatggatgaccagaaacgtgcccaggtggaacaccttttagtattatgcatctgccgttactgtgattgttgcctacataaataattctttcttataggatgatgaatagtctgtgtctcgaactttgcttctgacttttaaatgctctatcatttgtcttgtattgcgatttgctggcctgattgcttgatctttaactcaaattggtttaaagaatatatactgaaacttaagatgtcttttattcactttgttctgaacttgacctttcgtttatg

SEQ ID NO: 28623 - DNA, 3003 bp, Unknown
  misc_feature (1)..( 3003): 2750-1469P.txt file - cDNA_ID_2997913; gDNA_ID_2926236; Annot_ID_142763
tagtcatacacccttcacagatacctttcaatccaatgtggaatatctttaaaccaaatgggaattctttatttcgggaaatcatctaaccattcatttaatgttttgtgtatatgaacacaagcaggtagtttccaaaaccgtattcaaagagaaaagcagaaatgttgaccttttctaaaaccaggttatcttcatgcgtatataaaaacggactttgcatgtttgcttactataacttaggacagagtggaatcccaagtaccaaaacagatttcttgcaaaaaaacaatggaggaaacaaataagagtgtggttaatgattactttaccagtgctatggaacttacagagtcaggtgaccctcacgtgcctacccgttacattcttccaccttcacaacgaccaatgctcggtccaagcattggcaccagtaccatcaatcttcctgtcattgatctctccttcttacacgatcctttgcttagactatgtgtcatccatgagattgaattggcctgcaagggatttggtttctttcaggtaacactcgtgttttggctacatacactacacatgtctgttaggtaagacacatggcaagttctgcgactcagattcatgcattgttacaatccaaacaaagagaagtttgatgcttaactgtcctattcatgtgtctatatttctcagatcatcaaactcagccatgagtttcatttctcaggtcactaggactagtatggaatgtacttatcacatctaccaatcatgcttgatatatgacttatgagaaatgcagtttttatcttttgcatttctatcatacccaacaaagtcccttatcaaaaattaaataaatgaaaaagacaaagtccttggtttctgtctttattgaggataaaacaagtagagagccatgtgaagatgcttatcttcattttctacacagatgtcaagtatactgcccagtttctttaaaaacactacactagtgtcattttcatccctcttattaattacattactctgatcttctctacaggttataaaccatggaatatcatcagcagtggtgaaagatgcacaagattcagctacaaggttctttgacttacctgccgatgagaagatgcatctggtttctgataattttcaggagccagtaaggtatggtaccagcataaaccattcaacagacagagttcattactggagagatttcataaaacattactcccatcctctctcaaactggatcaatttgtggccttccaatcctccctgctacaagtaagtaaacctatctaggccaacttcactatctgataataactcaaatttgttctctttttactggtctaagaatccaatttctcaatagatgtttcagaatttgcaagaaatttgtatctaaagaatgtgactcagaactgatttgatcatctcgaaatatcattttcctatcagggaaaaggtggggaaatacgcagaagcaacgcatgttttacataagcaactaattgaagctatctcagaaagtctaggactggagaaaaattacttacaggaagaaatagaagaaggctcacaagtcatggcggtaaactgctatccagcttgtcctgaacccgagattgccttgggaatgccaccacactcggactatggctcgctgacaatcttactccagagtagcgaagggctgcagataaaggactgcaacaacaactgggtttgtgtgccgtatattgaaggagctctgatagtccagttgggagatcaggtagaagtgatgagcaatggcatatacaagagtgtggttcatcgtgtaacagtgaacaaagattacaagcggctctcttttgcaagtcttcacagtctacctatgcacaagaaaataagtccagcaactcagctcgtcaatgaaaataaaccagctgcatatggagaattcagcttcaacgattttcttgattatatatccagaaacgatattacacagaaaagattcattgatacactcagaaagaaaaacctctgaagatggtgtcatataactcgacacggcaattccgatggttgattatttggacctagttgcatgcatcttgtatttaatctatgactatcttgtgcaagtgaatagtccttgtttatatcacataaaagtatatttagttgtcatataagtgtatccttatgctagattcatattagtttctcatctaagagcaaagtttgataaatggatcaaaacagtaagggttaagacttatcaaatctcaaataagttccaagacattcttcaaactctatataaacatgaattgtcctgaagcttatagagagaacaaaaaaaaaaaaaatcaaccagataacacagacaatgaaatgagatgtgaacaattaccaaacatttaacagcttaaattctccatctttacaatacagggaatcaaacatgttcacaaaccagccacgtatcgaaacaaggaagtaaaatgctcgattcaacgacataaatcgtacaaaatctgttaaataagcttgatttcgttccaacaaacacagaaaaataaaacttctcagaattaaaaacagcttaccgtcaagttctctaagtatgtacggccacagcctcttggtcccccgtcggcagattcccggtaaaatttaactccggcatcgcttacgtcttttttttatatttgttttattcctaatctttttcatatttactctttttaacagatatgttttaacatttacttatcgagaatgtagaaacttcggggattagaagttagggaaaaagggtgaatttgagaaaaaactatttaatttggacaaaatcagaattattatatagtattgggccgtttcagatattttaggaagctacaataaaatatataatgaaaactattagtgaaaaaacaaaagtctgcttcttcttcgccgtctctgtgcggcctcttcctcttcctcttctaaacaatg

SEQ ID NO: 28624 - DNA, 3000 bp, Unknown
  misc_feature (1)..( 3000): 2750-1469P.txt file - cDNA_ID_2997917; gDNA_ID_2926236; Annot_ID_142765
cattgaaatctacagcttctggttttggcattacaactcaaggaaaacataggcatttcactctactttctaagactccaagagtttctcgaactcatagtatataaataaataaaagaaactaaaatcagcaaaaatcatttgaagatgtaagcatgaagttcattgaaacactggtgttttgagaagttcatgtggacattttgacgaacaactggtgcgcaagtcaagtaaacatgttctgcgagatgttcgaataatgagactacacttaaaaacgaacttggtcattacgaaattggattgaaacttaaagtaacaatccagtttaatcttcaaatataagtgtttcacgtcctattgcttagctacttcaaagttttcaggaagccgtttatatacttcagatgaatgtattttgttgctttttattgggctatgtggccgtcatgggcttttaaggcttgtaattttcgttttaatggaagtgtaaaggaaaaaaaaaaaaattgttcatgttggtcgtcacgtcacggtcacttgcccaattcacttatctttattccagcttttggatttgagattgttataaaaaattctatgaaaatggaattaaaactgaatagtttccaattgatatatatggcaaactgctctttatattttttgttttttcttttcaacaattggagctattacattacgagattatcttgtattgtcaatataacacttatatctttctttctttttggctatatttatctacaaaacatgccaaatgaaagatagaaaacacacaaaaaatttctttacacatgaaaaaaaagagaagttaaaacatgggtggagattatttctgtcggtactggtaaccaagttgtgatccactctatatattacgtacatataataaaactatataagagtcatgcgatatatttttctcaaccaaaatatgactacttcaaagaatgagtcattttcttaagtggtgaggcctccacttcttggactcagtcaaatcattttacggccaccaggaccccaactaataactttatttcctgttttgcctagctagttgtaatatatattgcaacatttttgtgcacttacaaagtaaaccattgctattcatttgttctttataactcaatatactcataaaacaaaaaagccacatgtagtgaagtgaaatgaatacacataatcgtagatgctctttggtacttatagttatataataagcagggtctccaccagagaatatctgattaataaaaagcatctagattttggtgttgtttttgacagggcggtgatgatgagtcttttggaacaaagtgattggtaaagaaactagaaagctcaaaaaaaaggaagaatgcatgtggtttccttttgttctattcactaataaagactttttccaaagaggaaagtaaaacttttcaccgttttcagcttcagcttttcaccatcttgccgttttcctctctatcggtgcttttttcatcttctaccttagctcgtaagcctcagatccacgagccacgaggaccacgacccatttttttttttttgcttcgcattacttatttcacaatatttcatttaattaattaaagagctactagtaactaaaaaatgactttttaaaacgttaatgactagggttcttttgatcaactatttaatattgtgattaaccgtattattgtaatgttggttctggtaaccgttaataattgtgtcagaaaatgtctctttttttttaaattctaatttgtttttactaaaaaacaaactgaaaaagaaaccgaaaggtaaaattaatcgaggttaatgccaccatttgaaaatgattatttaacttttttttgttgtcggttataattttgtttttccgataaatatgagaaaattgagagtacagtgaagtagtatagtgtagtgggaaagtctggaaacagctgtatctaactttttcccttttctctatgattctgttgtgaataatgcagagccgccgtgagctcaggcgccaccgtaacgaagaacaaacctgaaggagaaaaataagccatgggatgtgcggcgtccaagctcgataacgaagatgctgtacggcgttgtaaggatcgccgccgtctgatgaaagaagctgtctacgctcgtcatcatctcgccgccgctcacgccgattactgccgatcgcttcgtatcactggatctgctctttcctcattcgcctccggtgagcctctctctgtatctgatcaaactccggctgttttcctccatactccccctcctccgctttctgaacaatctccggctaaatttgtccctccacgtttttcgccgtcgcctgctccttcttctgtttatcctccttcgacgtctccttccgtcgccagttctaagcagccttcagtcatgtccacctcttccaatcgacgccggaaacagcaaccaaaacctagactgcctcatattctctcggagtcaagtccttcttcttctccgagaagtgagagatccaatttcatgcccaatttgtatcccagtgcttatcagaactctacttactccgctactccttctcatgcctcctccgtctggaactgggagaatttctaccctccttctcctcccgattccgaattcttcaacaggaaggctcaagagaagaaacataactccgataatcgattcaacgacgaggatacggaaacagtgaggtcagagtatgatttcttcgacacgaggaagcaaaagcagaagcagttcgaatcaatgagaaatcaggtggaggaagagacggagacggagagagaggaagtacagtgtagtgaatgggaggatcacgatcattacagcaccacgagctcctcggacgcagcggaggaagaggaagaagatgatgatagagaatcaatttccgaggtcgggacacgctccgagtttggatctacggtgagaagtaattcgatg

SEQ ID NO: 28625 - DNA, 3003 bp, Unknown
  misc_feature (1)..( 3003): 2750-1469P.txt file - cDNA_ID_2997921; gDNA_ID_2926236; Annot_ID_142766
ctcgtggatctgaggcttacgagctaaggtagaagatgaaaaaagcaccgatagagaggaaaacggcaagatggtgaaaagctgaagctgaaaacggtgaaaagttttactttcctctttggaaaaagtctttattagtgaatagaacaaaaggaaaccacatgcattcttccttttttttgagctttctagtttctttaccaatcactttgttccaaaagactcatcatcaccgccctgtcaaaaacaacaccaaaatctagatgctttttattaatcagatattctctggtggagaccctgcttattatataactataagtaccaaagagcatctacgattatgtgtattcatttcacttcactacatgtggcttttttgttttatgagtatattgagttataaagaacaaatgaatagcaatggtttactttgtaagtgcacaaaaatgttgcaatatatattacaactagctaggcaaaacaggaaataaagttattagttggggtcctggtggccgtaaaatgatttgactgagtccaagaagtggaggcctcaccacttaagaaaatgactcattctttgaagtagtcatattttggttgagaaaaatatatcgcatgactcttatatagttttattatatgtacgtaatatatagagtggatcacaacttggttaccagtaccgacagaaataatctccacccatgttttaacttctcttttttttcatgtgtaaagaaattttttgtgtgttttctatctttcatttggcatgttttgtagataaatatagccaaaaagaaagaaagatataagtgttatattgacaatacaagataatctcgtaatgtaatagctccaattgttgaaaagaaaaaacaaaaaatataaagagcagtttgccatatatatcaattggaaactattcagttttaattccattttcatagaattttttataacaatctcaaatccaaaagctggaataaagataagtgaattgggcaagtgaccgtgacgtgacgaccaacatgaacaatttttttttttttcctttacacttccattaaaacgaaaattacaagccttaaaagcccatgacggccacatagcccaataaaaagcaacaaaatacattcatctgaagtatataaacggcttcctgaaaactttgaagtagctaagcaataggacgtgaaacacttatatttgaagattaaactggattgttactttaagtttcaatccaatttcgtaatgaccaagttcgtttttaagtgtagtctcattattcgaacatctcgcagaacatgtttacttgacttgcgcaccagttgttcgtcaaaatgtccacatgaacttctcaaaacaccagtgtttcaatgaacttcatgcttacatcttcaaatgatttttgctgattttagtttcttttatttatttatatactatgagttcgagaaactcttggagtcttagaaagtagagtgaaatgcctatgttttccttgagttgtaatgccaaaaccagaagctgtagatttcaatggagaaaactacaggaccatggaagctttatttttacaggctttcgcaatctgaagatgcactttgatgcctatggatacttcttgaccagttgcatgatgtcacatccaacaaggtaccacaaatttcacccttattttattatcttccgtaattggtacgggcatggatcttgctctcattaaacaataagaaaacagaattaaacaaggcaagaaacttgtcgtcgaaaagacgtccggctaaattgttgttgtccactaaatggttcttttgtcttctgaagatttatatggtcataaacttgtcatacatatttttaattattgattttgctataatggacggtgttaagctctcaagaatctcggaatatcctgattagcgtagaaaatataaaaatcccaacattatggatcaccactatcttgaattgtttattatagattttttacattttctgagagttttctttctttcacgttctaagaataggaccgtgctaaataatgcgattaagggagaattttgatcgaattatttgacgcgtgtgccaattgtttttttttgttttgtttgtccctctaaccttttcaatagacaaaaacagaggtcaatgctttgattagctcgaccttagacattaacaacttagtcagatttgttttttgacttttgtgaattttcttctcctgattactaggattaggagttacaattaatctaggattcttacggaggtaaaatgttagtcaaaagaagaaacctaatgcagtttagtttagatttcttactaccctaatgccattagatgctgagaggggctacaattttctacgtcttcaaatgtacattggtaaaggaatatctgttttctcagatctttttttttcatccttattttaattacattttgcggtaacaatagtgacaataaaaaaagaagaagaagagttagttgcattttgaatgagtcagctttcttctgcattgggttaatctggccggcaaaatctttgaattcgttattatatagaccttcttgtcttctttatatattgcttgcattacacatttgtctcaacttccagatttgcccctggtttaaaacgattgtcctgtttcctttgtgaaggtcaagctttgaagggctaacgggtgatgctttggtgaaggttttttctggtccaggtttgtgcttattttgcattgcttctctttgattcacgtctgcataaacatcaaataattcatttatgtttgagttgattatgtagaaaaaattattaggggagatgctttatgataagaaaaaaaagtggtcttgtggtatcttaaggcagaaggaaaatatttagtgtcttaatgagtaatagatttatctgtctatccagattttataactgagttttagtaacttccggctcaagcaaaaaggaagttcgatatg

SEQ ID NO: 28626 - DNA, 3003 bp, Unknown
  misc_feature (1)..( 3003): 2750-1469P.txt file - cDNA_ID_2997925; gDNA_ID_2926236; Annot_ID_142767
ctactccaccttggattcttgtgtattcataaaatgtcaaaaatctcaatacttgcaggtgaccagcttgcaattgccaaagaaacaggaagaaggcttggaatgggcacaaacatgtacccatcttcatctttgctttctgataacaacactgaaggagtttctgtcgatgaacttatcgagaacgcagatggttttgcaggagtctttcctggtaatgctacttacttgtaaacttcatttgtaactatgatctttgagagatatctgacattgacaaccccctttttctgatttttagagcataagtatgagattgtgaagagattacaatcccgaaaacacatatgtggtatgactggtgatggagtgaatgacgcacctgccttgaagaaagctgatattggaattgctgtggatgatgccactgatgctgctcggggtgcttctgatattgtcttaacagaacctggacttagtgttatcatcagtgctgtcttgactagccgtgcaattttccagagaatgaaaaattacacggtacataaatgcttctgcctcattggctattacctgataaagtttaaattgaatgcttatattgaatttttttggtttaccttcattttgcagatatatgctgtttctatcactatacgtattgtcgtaagtttctcagtcgaaattgcatcagattttcacaaatacttggtcttattttctatacctttgtgttacagatgggtttcatgcttctatgtgtcttctgggagtttgacttccctccattcatggttcttgtaattgcaatccttaacgatggttagtaactgttaactccctcgatgatttagcttacggcttttgctggtgcttgaagcattcaccctgctaaatttgctttcctgttgaaaaggtactataatgaccatatccaaggacagagtcaagccttctccaactccagattgttggaaactcaaagaaatttttgctactggtgttgtgcttggagcttacttggcgatcatgactgttgtgtttttctgggcagcatacgaaaccaacttcttccatgtaagctacacactatccctctccttgtttactctaatttcaactgtcagcaaaatataactatacttttttcccttttgtggtagaacattttccatgtgagaaacttcaaccagcaccatttcaaaatgaaagacaagaaagtggctgcacatttgaatgaacagatggcttccgcggtctaccttcaagtcagcacgatcagccaagcgttgatcttcgtgacccgttccaggagctggtcatttgttgagcgtcccggttttcttcttgtaattgctttcctaatagctcagctggtaaagagatttccgtcacctatctcattattttccttagttacttacctctttgtttatagtttgttaatagaatccaactctgtattattttgataggttgcatcggtgatatcggcaatggcaaattggccttttgctggaatcagaagcattggatggggttggactggagttatctggatattcaacatagtaacttacatgttacttgatcctatcaaattcctagtccgttatgctctaagtggcaaatcatgggaccgaatggtcgaggggagggtacgtagaccaaaaaaaagacagaatcacttaactctaaattcggtacttcacaattacgttggcctaactagaactcgtgatttgtttgcagactgcactcacaggaaagaagaattttggccaagaagaaagaatggctgcgtgggccaccgagaagcgtacacagcacggtttagagacgggtcaaaagccagtttatgagagaaatagcgcaacggaacttaacaatatggctgaggaagctaaaaggcgtgcagaaattgcaaggttagttttttttttatattagagatcgttagtctctgtcatgtttgagagatgatctcatttctagtatgctgatgaattttgcagaatgagagagcttcagacattgaaggggaaggttgaatcagctgcaaagctgaaaggctatgatcttgaggatcctaacagcaacaactacacaatctgagacagtctcaatctctgcttagttcattttgtcttttattttcgatgtattattattaattcttcttgatatattgacattagttttgatatctttgtggaagatgtctcacatgttgtaatctttcaattgatgcctgtaactttcttactttttatttgatgaaaattcttatttgattggttttgttcggttctttactgaaataaaaccaaaccgagtcaaaccaaactagactaaaccgtctgaacacaactcgaaccaaactaactatggttgaggacactcgaaccaaactaactatggttgaggtccgctagagttttattacaaccgaattaaccgaaccgaaaataaaccgaaatgcaccccctaactacacctaacgcaaaagaatatactccacagagatgtttgtttttttaaccagaccggtttaaatttgtttcttttcagatagaacagaagtatccaagtcttttaaagttttaattctcgcaaaccaacaattactgtttgactaattacttctcacgcgccaaattcgcacgtgtaagacaacccaactaaaagttaactaactcacaagtgcgtgctccacacgtgcctatctgttgataagaatgccacaattttcatctcatattctcattgaacaaaaataataaattctcagtgatccttcgagagattgattataaaatccggtcggcgacgagacttactttcgccgcaaaatttgttctccggtaccggatatttacgtatctgttctcaaattttaccattcccaccactaaaaccctagattaaaagcttcaattaccggaaaaagtctctacttaagagatttatctgtttgttgtcttaaatcacaggaagagaatg

SEQ ID NO: 28627 - DNA, 3003 bp, Unknown; identical to SEQ ID NO: 28626
  misc_feature (1)..( 3003): 2750-1469P.txt file - cDNA_ID_2997925; gDNA_ID_2926236; Annot_ID_203886

SEQ ID NO: 28628 - DNA, 3003 bp, Unknown
  misc_feature (1)..( 3003): 2750-1469P.txt file - cDNA_ID_2997951; gDNA_ID_2926237; Annot_ID_142783
gacctgcttacaagttacacctatgtgtttataactggttatactataccaatcatagttttaggtttcgattagtgtcataaacataatgatgtcgaatgaagtttttggaccatagaaaagatgatagttcataggaattaaaaaaaggaggataaagtaaaattagagaaggaaggccacacctgattacagaacaaatggtacaattctcatcacccaacaaaaatcagagcctagtatgcagatcacgtacgatcagtccaagtacagataaagtggacgcctataaaaacctagggcttcaatcactagcccacaaatctgtggaagaatcttatactgggccttttctttactaaataaaaagtaatttataacgttctggactttatttgagtataggtttctttctgcagttattaaatttactgggttaagagttcatacgtgttatgtgcatttcgctttaaaaagtcttagctcctgagatgatcgacaaatgagttgcggccaatattgggtcattagaaactattgggctataactttgggtccattgggccgaagtagcagctagaagctagtttctgttttctctaaaattaggcctaattcaggttactcaaaaatctagaataaccttatattactgtaaaatttgagaaatctggttgcataattctttatcatagtttctgtagagaacagaagcccacatgttatataaaactaggggttcaatggttacgacttacgatgtacgtggttctcaggcgtgagacccagcaagagcaaaggagatcgaaattattagttattagatgaaatttaaagtaatgagtttcaacttccctttacattgggaggcatttgtctcccgatccattaccaaaaaaaaaaaaaacttccctttacattttatcttaacctccttttgaactgttgtttagttagactcaaaacggtgtaatctatcaattatttttccattataatgactgtactttatccatttaattagtcttttttatttacccaagtggaaataagaaataacctaaaaaattcgattagtgcatggggatacagcaactttgaaaggtccaacaaaactgacctttgttgatcatattgatattccggtcataatattatttggtctttctaaggacatctcaatcatattaattgtgttttttttttggcagtccaaaatttgacttaatgaaaaaactcttgtggaaaaatcatagaggaaaaccccaataattcgaagatttgcattagataaattagaataatgcttttgaccccaagatgcagtatttattgctccaagttttgactcttcaaccaacttatatacgtatgacaatatgaccccaactcccaagttgcccaaagtccatagattctcccccacaaagtaataaagatcgcattaacaaatgaaaagaacaaaagaaaaataacaatcatgttttgtgtgatcgattactattaaaaattaaaaaaagatgaagaaagatttgggttgtataataatggcaaataaagtgaagccaaagagaagacattttttttttttttgtcgcacacccaaagggaacgaagattagagaacgcgtcattcactctctcgtcacgcacctctcacacaacatgactctcctccttggtttagcctaatttgctttgttttatttttcctgattctatttgtattttatttattaaatttgtattttgtaatgtcaaatttttattatgcttctcttttccctttttcacagaagttgatcgtttactgttttatgattttctaaaatttctcacaacatcaatacttttttttaatctcctaatggtatggtatttgcttgataatctttctgcctccattaattttgagtttggctaggatttttgatggaaatagacagcttaattaaaatcatgtaaacaaaataaaaacaggcgaagcaagcaagtggtaaagttgactggtaaaagtctctttcacgtgctcttgaaaagcgcgtgctagttgtgtgtgggtggatcacgcacacgcgtattgaagtgttaccgtcttaatcggtcagaattttgagtcgagaaattaaaagtggtgaattcttcttttaactccccccaactacaaaatttaccatttccacccccaactatttccataatcgaattattagacttcaaacctaataatttaaaacgaacaaacatattttcttaaatgaaaggagaatttaatagcataatcaattgtttgaccaaaaaaagagaagcataatcagctgttttccttgtatacgagtagaagagtcagcacaagagcgacaatggctcacctttgaaagtttggtttcaaccttttgacttttgacctaaaacatatccatattcgtcaagaagaacaaagaaagtattccaaaaaaaatataataaaaaaaaaaagaccaagaaaaataaaatggaaagaggaaacaaagaaggcagcttcctctctccttcttcattgcaaagaaagcaccaccttttaaagaatcctcctcacactccattcttcttaaaaaacccaccacaacacaattcccacttgtttcttcatcatcacctacttcaatcaaaaaacattccaactttcttctcaatttcattccaggtttgtgccctttcttcttgaatcttcttctatggaacttccaatttcgtctacttatgggcttaatttggtttacaagtcttgctatttctagaaaactcgtcttatcttgagtttcttggacagaaattcttgagtttcttgatttatctttgacttgtttcttgaaaaaaaaaaggaaaaaattttggttggaatatttcaacggagaagagtagaaacggtcgttggcttgtcttagtagaaagtagtttactttttttatatccgcaaaaattgcggcttcaaattctgcttcagaagactcttagaaaatg

SEQ ID NO: 28629 - DNA, 3003 bp, Unknown
  misc_feature (1)..( 3003): 2750-1469P.txt file - cDNA_ID_2997955; gDNA_ID_2926237; Annot_ID_142784
aagagatcaagattgtctctaagtatccagctgatgcttctttaccggatataaacgaaggggtttatggaagtgatgagtttaggatgtatagctttaaggttaagccatgttctagggcttattctcatgattggaccgagtgtgcttttgttcatccgggagaaaatgcgaggaggagagatccgaggaagtatccttacacttgtgtcccctgtcccgagttccgtaaaggatcatgcccgaaaggagattcttgcgagtatgctcacggggttttcgagtcgtggcttcaccccgcgcagtataaaacccggctttgtaaagatgaaacgggttgtgcaaggaaagtttgtttctttgctcataaacgcgaagagatgagacctgttaatgcttcaactggctctgccgtggctcagtctccgtttagcagcttggagatgatgccagggttgtctcctcttgcttattcttcaggagtttcgactcctccggtttctccaatggctaatggtgttccttcctctccaagaaacggcggatcatggcagaacagagtcaatacccttactccaccggctttgcagctcaatggtggaagcagattgaagtccacactgagcgctagagatatcgatatggagatggagatggaattgagactccgcggttttggcaacaatgtggaagagacgttcgggtcttatgtttcctctccaagtaggaattctcaaatgggtcaaaacatgaaccaacattatccatcttccccggtgagacaaccgccatctcaacacgggttcgaatcttcagcagctgcagcggttgcagtgatgaaagcgagatcaaccgcctttgcgaaacgtagcttgagcttcaaaccagctactcaagcagcaccacagtcgaatctctcggattggggatctccaaacgggaagctggaatggggaatgaaaggagaagagctgaataagatgagaagaagtgtttcctttggaatccatggaaacaacaacaataacgcagctagagactacagggacgagccagatgtgtcatgggttaactctttagttaaagacagtactgtggtgtctgagagaagctttggaatgaatgagagggttcggataatgtcgtgggctgagcaaatgtacagagagaaggagcagactgtggtgtaaacacacacaaagatggtttcttatatatattgcttttgggccatctctgcaaatttgattctttaatttttgtgactttctttagttgttactgttattagtagtatatggtttgttgtcactacgagtctacgtgatgaaaagatagaagttaattgcattagtttctatattcgtttctcatcctcttgtaatttatcaaaccatgaaatggctaagcaatccaaaccgtaatatggctgaaacaaatataccatgtcatcaacacgaaacatgcacaacgccacctcaatgagcttcaaaacaggctttaggctatactcaacaacggtacataacataagtcatcagaggcttcgcatacttcccaaattggtgatgttttaacaaagtcttactttaaaatttcattaaaatagtagaattttcttagattgacatactatacagtataagctttttcatagaaaatatgtcaaagatgttatgggacgcacgtgtgcctcagacacatcactgcgcacgtggtgaacttcaagtaaaattcttattatataaataaaggtatgagtacgtatgatatatccgatgtgtatctgactcactcatactaacaaaatacagaggtttgggttgggttactttggctttggttcaaagcaaaactgttgaacgaacaactaaaagtctaaaaccaaatggagtcataataaagtatacaaattctgccaagaaaataaataaatttacatatatatatatatgtagtaagatgatgtaaataaaatggattggtaatggcaatggttggtgccgtatacatatatgtgtgtatgagattccttagcctttacttctctcaaacagaaagcttcatactattatcattttgagtatttgacctgtctttttaattttcatttgattttgcaaaacatatatacatctatttctctcttaacgaacactgatgcttcaccctcaacatgcgatggaaacatgattgttacagaaaacgaaagattagtttcttatcccaaaacgtaagattaatttggtactaatctacttttagatttggtgattaggaggagtaaacttgtgtttaatataaaactgatctttgttgctttaatatgcatgtttggtgaattacacccggaaacataatcagatcaactggcacatgagacattaaattcatgttggatccttatgtttcatagaacattatgtttatgaaacaaaaatgtaaatcaatcggaaactttggtggtatacaagtaaataatttggaaaaatacatgtttaagcaaaagtaattgttactaatatcctaatttctacaattgttgtttcgatggtccctttctttaggtgaggattgagacaatcttttagaatctttgattccactcttcgctccaaactctactttgctataacaacaacttcaaaatagattagttaagcgaatcaggttacattttaaagaaaacgatatagagagagcaactttgtatataattttaaaattcttcacctgaaagcctttaaaaaccagttcaagataaacccatctcaccaaactttagtaatcacaaaactaattaacgtcaaacaataacaattttttcacaaatttaattcttttattcctttattcgttgctcttatatttccatcgatctttctccttgtctcacaaacattctgacattttagagagcctcgacagagaattatttttttcttttttattttcgtttacaagtttcaattcttctctatatattaaaaaaacaaacagatg

SEQ ID NO: 28630 - DNA, 3003 bp, Unknown
  misc_feature (1)..( 3003): 2750-1469P.txt file - cDNA_ID_2997955; gDNA_ID_2926237; Annot_ID_203919
atataaacgaaggggtttatggaagtgatgagtttaggatgtatagctttaaggttaagccatgttctagggcttattctcatgattggaccgagtgtgcttttgttcatccgggagaaaatgcgaggaggagagatccgaggaagtatccttacacttgtgtcccctgtcccgagttccgtaaaggatcatgcccgaaaggagattcttgcgagtatgctcacggggttttcgagtcgtggcttcaccccgcgcagtataaaacccggctttgtaaagatgaaacgggttgtgcaaggaaagtttgtttctttgctcataaacgcgaagagatgagacctgttaatgcttcaactggctctgccgtggctcagtctccgtttagcagcttggagatgatgccagggttgtctcctcttgcttattcttcaggagtttcgactcctccggtttctccaatggctaatggtgttccttcctctccaagaaacggcggatcatggcagaacagagtcaatacccttactccaccggctttgcagctcaatggtggaagcagattgaagtccacactgagcgctagagatatcgatatggagatggagatggaattgagactccgcggttttggcaacaatgtggaagagacgttcgggtcttatgtttcctctccaagtaggaattctcaaatgggtcaaaacatgaaccaacattatccatcttccccggtgagacaaccgccatctcaacacgggttcgaatcttcagcagctgcagcggttgcagtgatgaaagcgagatcaaccgcctttgcgaaacgtagcttgagcttcaaaccagctactcaagcagcaccacagtcgaatctctcggattggggatctccaaacgggaagctggaatggggaatgaaaggagaagagctgaataagatgagaagaagtgtttcctttggaatccatggaaacaacaacaataacgcagctagagactacagggacgagccagatgtgtcatgggttaactctttagttaaagacagtactgtggtgtctgagagaagctttggaatgaatgagagggttcggataatgtcgtgggctgagcaaatgtacagagagaaggagcagactgtggtgtaaacacacacaaagatggtttcttatatatattgcttttgggccatctctgcaaatttgattctttaatttttgtgactttctttagttgttactgttattagtagtatatggtttgttgtcactacgagtctacgtgatgaaaagatagaagttaattgcattagtttctatattcgtttctcatcctcttgtaatttatcaaaccatgaaatggctaagcaatccaaaccgtaatatggctgaaacaaatataccatgtcatcaacacgaaacatgcacaacgccacctcaatgagcttcaaaacaggctttaggctatactcaacaacggtacataacataagtcatcagaggcttcgcatacttcccaaattggtgatgttttaacaaagtcttactttaaaatttcattaaaatagtagaattttcttagattgacatactatacagtataagctttttcatagaaaatatgtcaaagatgttatgggacgcacgtgtgcctcagacacatcactgcgcacgtggtgaacttcaagtaaaattcttattatataaataaaggtatgagtacgtatgatatatccgatgtgtatctgactcactcatactaacaaaatacagaggtttgggttgggttactttggctttggttcaaagcaaaactgttgaacgaacaactaaaagtctaaaaccaaatggagtcataataaagtatacaaattctgccaagaaaataaataaatttacatatatatatatatgtagtaagatgatgtaaataaaatggattggtaatggcaatggttggtgccgtatacatatatgtgtgtatgagattccttagcctttacttctctcaaacagaaagcttcatactattatcattttgagtatttgacctgtctttttaattttcatttgattttgcaaaacatatatacatctatttctctcttaacgaacactgatgcttcaccctcaacatgcgatggaaacatgattgttacagaaaacgaaagattagtttcttatcccaaaacgtaagattaatttggtactaatctacttttagatttggtgattaggaggagtaaacttgtgtttaatataaaactgatctttgttgctttaatatgcatgtttggtgaattacacccggaaacataatcagatcaactggcacatgagacattaaattcatgttggatccttatgtttcatagaacattatgtttatgaaacaaaaatgtaaatcaatcggaaactttggtggtatacaagtaaataatttggaaaaatacatgtttaagcaaaagtaattgttactaatatcctaatttctacaattgttgtttcgatggtccctttctttaggtgaggattgagacaatcttttagaatctttgattccactcttcgctccaaactctactttgctataacaacaacttcaaaatagattagttaagcgaatcaggttacattttaaagaaaacgatatagagagagcaactttgtatataattttaaaattcttcacctgaaagcctttaaaaaccagttcaagataaacccatctcaccaaactttagtaatcacaaaactaattaacgtcaaacaataacaattttttcacaaatttaattcttttattcctttattcgttgctcttatatttccatcgatctttctccttgtctcacaaacattctgacattttagagagcctcgacagagaattatttttttcttttttattttcgtttacaagtttcaattcttctctatatattaaaaaaacaaacagatgcaaccttggagaagaaaatttccattgttcgaaacaggagttacaatg

SEQ ID NO: 28631 - DNA, 3000 bp, Unknown
  misc_feature (1)..( 3000): 2750-1469P.txt file - cDNA_ID_2997963; gDNA_ID_2926237; Annot_ID_142787
ttgtctttctctagccacttgtttagtctttctttgcctattcctttgtcttcttgcattgatttggcattcaatggaacgaaaatctttattcagcttgatttaacttaactttcaaacttttctctctctttgcagactccagatggtgcattgttggatatactccggaatggatatgacctccttacggagtgtgatatcaaactccccatggttagttcatagatacacatcttttgcatgccagtgtgaccttaaaattgataattaacatttttattctactcctccagattgaagctaatgataaatatgttgattccccacctccgtatctcattcttctgcatcctgccctcggccctctttgggaagtttcgagacagaaagtaagtcagtagaagatgcctgtcttcttttgtttcttgattcacaaattctagcatatcatttattatgactaaaatcatatatgaatcgttgttacagttcaagggagggtccatttccagttgctcagaactgcaactagagattgcagagttctcatggaacaatgttcaggttctcaatattttcattctgccaacaagattttgcatagctttcatcgcgttgagtttcttaatcaacttcatgtcccataggttgatggtagcttgatcgttactgctgaaaatgccatgggttcaacaacacctaatgataatggtgaaccaatattgcaatacgggttaaggtagaatagagtgttgtacttgactatctccgtaagatacgtgtctattggtttgcacttgggaattcacagaaaaacttgatttgtaggtgtggtaagtgtaaactgcataacgtgaacgtagtgaaccgaggaatcgattggaacagtaaatcaaatgtttactggagaaacgatgtgaacaggcttgagacctgtaaaatcatactgcacggaaatgcagaattcgaagccagcaatgtaactatagaggtaaagtaaagtaacatggaagtttgtgatggattagagtatcttctccttaaaatcaagtggtatatactctttttgcagggacaccatgtttttgaagtacccgacggtcacaaactgaagatcacatcaggaaatgcaggtcagtgaatcttatctaaagcaatgatagataaaaaaaatcgaccaattgacactattattgattgattgcattattttggtgttaaatttaggtttaagcatcaacttggaagcactgaaagaagaggtaatggaaacaggaagctggtattggaactaccaactcaatggatcccatattcatcttcaacaagtagaggtttcacaaagctaacccaacccgaataatttggagctaagcctcccaaagtagaaaaaagtttattacctctccttgtccatgaaaataaaaatagaaagtgtaatttgctgtaaatgtttgctcctctgtaaattaaacaaaacagttcaccatctatctgatgtgttctctttcatgaaaaaagctcgacaattgtacaattcataaattcatacttgcacagcaatacttgaacttgaagccacaagtcaaaacattcttaatggaaacaaaaaaactctgcatgtgaaaaaaaaaaacgcagagaagctaactgtttacacttacctccttcaaagttcatttttatgtctgtaacaatggtgatctcattcttagaatcaaaatcatgattgtaacacatttttctcatgaaattcacgcaaagcatcacccattctcaatcctctaacactcatctccttcaaaaccatcttagcttctttaaacctcttcctcttgataagcttactagccaaacttcccaaattctcttcatctaatctcttatctttccccgcgtacgccatcacaaactccacacttagcgcataatagccactctccaccatttctcctataacgtgcgcatgcgtggcgtacaataccgataacccttcttcctccatcctcctcagaatcgccatcgccgcttcaactctccctgacttacacgcgcctaacacaagcgcgtcgtaagtacgcgtgtctggcgacataactccttcctcctcttcctccatcttcctcaacaccctgctcgcctccgccacgtcaccgtcgtaacaatgcgaagttaaaaaataattgtatgaagtcacgtccaccggaatcgcgtgagatctcatcaattccaccacgcgccaagcttcttcgattctgttcttcttcgtgagcgtgtttaagatcggatgaaatacgcaggttgagagtccgaattctccgatcgccatatcgttgatcaagaccagagcgtcgtcgatccggccgagtttgcagagacgagcgatgagagtttcgtaggagtgtttccgagtgtagccggcgtcggtctgaggcaaaatacggcggagatcttctaaggaggaggagtaagagtctgtgtttgttaggaatttgaaagtagctgtcgtgttgaaacacgcgtttacgacgcggctgttgaggagacgacgtacggcttcgaaatcgccggagcttccggctttgaagatgaggttatcgaattcgacgcaagtacgacgaccaggtgaagcagttggattgggatttacggtggagaatgaacgtcccgagattgattgaagcagaaatctggaattgttcgcttctttaacgaatcgtcggagaagagacatcgtctgattcaggtcaacggagattaggggtttaagccggaacattagaaatgtagaatacagtgtagagatatactgcgcttgagattattgggctacactagttttgggagaatagatgggccttaaaggcccaatataaaaaggctacatgtttatttgtctcgtttcattgtctagggtttgtagaatatatataccatctttcatcctcaagtagtctctctcaccgcgattagggttttgagcaaaaaggagtgatg

SEQ ID NO: 28632 - DNA, 3000 bp, Unknown
  misc_feature (1)..( 3000): 2750-1469P.txt file - cDNA_ID_2997964; gDNA_ID_2926237; Annot_ID_142789
ctatggtcagatatagatgctgaggatttgtaagtatcagctttcgatttttgttctgtgaatgtttttagtttgttgaatttttaacgcagctgcttgataaagattaaatagctcttgttgattttcagttttagaacttgttgctagttcttgagctgaggtgtttgttggtgtatttacttttgcaatttaggtttctgagcttgctaagatctaatgttgtagtaaatgtataatgaatagttttgctaacatgatttgtaaaatgaattttggctgagtatcaacatcaatgtagttggtatagtagatctatgaatttttttagtgaactaatactatttctgagtggtaacaacatgaataccgacactgtgttttatgcattttgtattctaagacttgctaaatttactttgatagtgctgtagcataatcattttttccatttgagttagaaacatgtttctatttcctctcccttttgtactcaaattcattatacctcgtgtcttttttgcaggagagcagttggttttcacaggaaattacttggccgttttcgtaacccgtacacccatttgaatgcgttcagggaccgccctgtggcaagagctacacctccgtcatcttcggtttctacgagacctgatgccaaaagatcctctacattgcctccgccacaaaaaagtcctcctgcgcaacatgtttctgctccacctccttttgtgcaccatgtgactttacctagtctaacaagcagctccaaaacttcttcaaacagcacaattcctatagtggctggctgcatagcgggtgctgtgtttatcctccttttagctactggtgttttcttttttaaaagtaaggctgggaaatctgtgaatccctggcgtacaggtcttagtggacaacttcagaaagtgttcataactggtaattgcctttctactccctgatacaaaaatgtgaagtggcattgttggttctagaagatgagatttaatagtcgctccactttttttcttttcgatattaatgatgtatgatttgttactcaggtgtccccaaactcaaaagatctgagattgaagctgcctgtgaagattttagtaatgtcattgggtcttgccccattggtacattgttcaaagggacgctatcaagtggggtggagatagctgtggcttctgttgctactgcgtctgccaaagaatggacaaataatatagaaatgcagttcagaaagaaggtatttccggtcaaccagttttcttatattttaaggattttgatttctatcaccttatcgattatggtttcgatgatttcagatcgaaatgttatccaagataaaccacaagaattttgtcaaccttcttggttactgtgaagaagaagaacctttcactaggatcttggtctttgaatatgcatcaaacggaacagtctttgaacatttacactgtaagtaacaaagctctttagtcatatgagtcattattacactgtaagttgtcagattaaaagtgggaaaacaatatttacttttgctgcagataaagaatcagaacacttggactgggtaatgcggctaagaatagcaatgggcatagcttattgccttgaccatatgcacggactcaagccacctatagtccacagcaatcttctctcatcatcagttcaactcacagaggactacgcagtcaaaattgcggatttcaattttggatatttaaaaggcccatccgagacagaaagcagcaccaatgcactcatagatacaaacatctcagaaacaacacaagaagacaatgttcacagcttcgggttgctgttgtttgaactgatgacaggaaaactcccagagtcagttcaaaaaggtgactcgatagataccggattggctgtcttcttgagaggaaagacattaagggagatggtggatccgacaattgaaagctttgacgagaagattgagaatataggtgaagtgatcaaaagctgcataagagcagacgcgaaacagagaccgataatgaaggaagtcacagggagattacgagagatcactggattatcaccagacgacactatcccaaaactttcaccactctggtgggcagagctggaagttctgtccactgcgtgaagagacaactactgaacttcacaaaaaaatctgtaagtattaatatgaagatttgagtgaggtttttgagtctcttagaagctcttggcttctctttaggctactttcatctatctatctatatataagtatggaacttagtttatataacggctttaaaattcggtggatctatttggtcgtttatgtcgtaaacagaaaatgtcctaatcacggtaatacccctttttggtgtgcataatgttggtgggtggttactgtctttgtaaattagtgttactatgttcttgatatgtttaatcatcaggttctgaagtataattcacaaattctgctcgttcaaatttatttagttgaagatggtgctaccaattcaatgaataatttaaaaatgttttcgtttgtactccactatttaacactccacctcctaaatccacatgcaaatatcgtagctaataatcaaaacataatcaatcacaaaaacaaaattaatatcgctttgtgtcacatattatgctaaaaatgttggagtcgacatgaacaatgaagatggcccatcggtgtaatccaaaatggtgtcgtctgaaccgtcagattaaagattgcaacacacgacaatcacacatcatcttctacacaatcaaatcccttcgatcgaagctcattggattatattttttttccttcacattaaagacaaaaaaaaaaagcgaaagaaaagaagcaatcgtagagagtgattctgggcatatgcttggagtatctctccttatccctccttggggttctcttcaaaaccccttcttccttctccttctgtaaccatcttcttcaccatg

SEQ ID NO: 28633 - DNA, 3000 bp, Unknown
  misc_feature (1)..( 3000): 2750-1469P.txt file - cDNA_ID_2997968; gDNA_ID_2926238; Annot_ID_142793
atttatgggtctgtagtaactgtttgctgccaaattttgtgagtatgatgtgtttatgtctagatttaatgatgggaatatgtatttaaacctctggatatttttctgaaattagacgattacgaaaggggtgtgacgtaacgagaaattacactggatatgtatgtagttggcgtatattaaataatttaaatgtatataataaagagaaaaaaaagtggagacttggtgagtagagattagagaagggaataaaaagtggattcaacaactctgcttcggtgttgaagtgtaccgtggtaggtgaatctcttggtaggcgacttccttactaatcatccttaatttcttttatttattaaaaaacaaaataaaagagaaagaaaaatagtattggtatgaaaaaattaatgaatattgcaatagcggaaccttcgaattgatataacatttgccataacataacacactagtttggtatatatatatatatactaatttatctacttcacataaaaaataaaatttggagaaaatgagaattaaacgtttcatgtcaggatctttcgtttgccctttagatcatattgatacattgtgtggtaacaaggcttgtctagtgaaagaaatgtgatattttccgaacaaatttttttaaaattatattaaatggcgttgacctatatttgaaaaaaatatatatgcatatggttatttacatgtataggagtatagagtataatgtatttgaaaagctattttactttgatggaatgaaaggccaataaataaatgttgtgtgaagaagccatccaatttgcataaacatttaaacattttaaatggtgattataaattaaaaacagtgtcccatatgatattctatggagttgaacacttaatatgtgcgtgggatgggccgtctatattatcaacggaccctaacataattcgaatgactttgtgtttacacaatgacgaacaaaaccaattcagccgtactatatattaataaatggctcgtttttgttcgagaaagtggaacaaatggttgccttttaaaaatcctttgaccctaatgtcggaagttcgaagtatacacttgaaccatcccatctttaatttcccactctttttagttgggccatagcccatttcataggtttcatcgaaatttatttttctatttgtcaatgttgtcaagttgtcacaaagaaaaaaactttgtaacggacaacaacttagacaaaaatttttttaagtattttagacaaatctaaacctaccgctatgaagtgcgtaatgcgaatggttgagtatgtttctagcttatttaattgagagagaggacacgtttatagtttctattagctagatggattaataggaagggcttgagaggggtctctgttttggactttaatagcccaaaaacagaatacaagtcaagccatatgggtccactaaaactgcatgagagctacgtgtacacaactgttacacaataatattataccatttcacgtctcaattaactttctattataaacaattactttatatagtaatcaaacgtctttaagtttttaaacggtccatttttcacatttattacaaacaccaaaaaaaaaagtgaaaaaaatctaacgtaggagaagaaaattggtaaagcaccatcaagcaacgtcatgaataaataaataaaaactctttacaataaattatgtctgcctgtttcaatttaccaaacttcttttgattaaaatctttggaaccaaattaaattttaattacacgaaaatgtgtttgtaagaaaagatagtatcattcatcacatgtaatctctacgcctcttaatcctctcttccctcatccactgcttctttttttaataacccatttcatctctttccccttttacgctcttttctttcttcattttctgtggaaattttcagagcttttctgtgtaaattaaagagttcttttttgaaggaaataggcaatctcatcctgagaatcaaacaaccggaaaattcaataaatgaaacgcctttaattgttttttcttacaaaacttctaagcagattactttggcggagacccatctgattggtatttttgcaggtacacagtttcttcaattctctgtctttgttttgtttactttctctaccgctcgacgatcggtcttgaatctatttcatttactggatcgtttttttttatgtggaaatggtttttgttttaatgtgttgattcaattgcaatagctgtgaatctaaaggatcgggattctctaaccttagggtttctttctttatgattggagcctctttagtgcttaactgttttttgtttgtgatgaatcggaatgtataaagatgcaatcttgtaattcgctttagttatctgtagctacattctctcttttctctatttccgacaagattttgagataatgttgcaaggactttgatttttctttccgtatatttcagtgagtcccctaatgaagtttactgagttaagcagaagtgttggtttcttagttaactgctaaagtcatggttttgcaaatgtttctgttgtttgcttactaatggagttcttccagatgaagtttttagtgtgttttagcagtttctcttatatgaaattgatacttgtgaaatatgatggatgttttgaaactaatggtttactcgctgacgtttcagatattccgttcttggagtaccaactggcctggagctacattccttagcctggagtaaataataggctgaccctttgaaatcaacatggtaaaccgggaatatgtttctcagtcctgtgttatatctttccaaactctcatcaatggattgtttgttcaatttttgtgtctccttctttttgtctggctttaggtttcctcaagaacttaataacttttcgctggtttctgtcctggagcgttgttgtgtgtttggtcagaggtattaataagtccaatg

SEQ ID NO: 28634 - DNA, 3000 bp, Unknown; identical to SEQ ID NO: 28633
  misc_feature (1)..( 3000): 2750-1469P.txt file - cDNA_ID_2997968; gDNA_ID_2926206; Annot_ID_141753

SEQ ID NO: 28635 - DNA, 3003 bp, Unknown
  misc_feature (1)..( 3003): 2750-1469P.txt file - cDNA_ID_2997972; gDNA_ID_2926238; Annot_ID_142795
tttaaatacatattcccatcattaaatctagacataaacacatcatactcacaaaatttggcagcaaacagttactacagacccataaatgaaaaaacgtattcacttgttttcaattttcacataaccacttccctgagtttggtctcaatttgattgccccgccgaggcattactacgccaagtgcgattaaggtcccatacagtgtaacgggacccactataagacagcgaccgaccaattgcgtgttaggagagtttcaccaaccccggaccggtttttaccggatataacagaaccggtacgaaccggtctcattatcttccatcttctttatatagacctcatgccatgtgtgtgactcaccaagaaaaacacaatcgtttaatctcacccaagaagacaaaaacacagagagagaaagagagagaaatggcgacgacaacaacagaagcaacgaagacatcatcgaccaatggagaagatcagaagcagtctcagaatcttcgacatcaagaagttggtcacaagagtctcttacagagcgatgatctctaccaggtctgtttttttgttttactcaaaaactctgcttttcaattcaatttcagcaatctaaatctcaattaaaaaaatcaacacagtatatactggagacaagtgtgtatcctagagaaccagaatcaatgaaggaactcagggaagtgacagcaaaacatccatggaacataatgaccacatcagctgatgaaggacagttcttaaacatgcttatcaagctcgttaacgccaagaacacaatggagatcggagtttacactggctactctcttctcgccaccgctcttgctctccctgaagacggcaaagtaaatcaatctcttcatcctcctctgttttttggtgggttttgtcgaacttgggaattgaaagtttcatcctttttatcatcagattctggctatggatgtcaacagagagaattacgaattgggtttaccgatcattgagaaagccggcgttgctcacaagatcgacttcagggaaggccctgctcttcccgttcttgatgaaatcgttgctgacgtaagcattcttctttctgacgtaattaacaaaaaagatgatgaagataatgaaataattaaaaactcatggcctaattaggttgatttaatatcttgatgagaatttctgtatacgcaaatttgtttcctttttcatagaagaaagtgtggtaactgattattgtgtgtggttgggtgcaggagaagaaccatggaacatatgactttatattcgttgatgctgacaaagacaactacatcaactaccacaagcgtttgatcgatcttgtgaaaattggaggagtgattggctacgacaacactctgtggaatggttctgtcgtggctcctcctgatgcaccaatgaggaagtacgttcgttactacagagactttgttcttgagcttaacaaggctcttgctgctgaccctcggatcgagatctgtatgctccctgttggtgatggaatcactatctgccgtcggatcagttgatttgactcctccctactctgagtttgtccacagtggattactttccatcttcttatacctttcaatcgcattttcaccaaccactaaaatggacctttttatgtatttgtgttaagtaatatctccattgtccttgttttgctttcttctgaacaaagaaataatatgtaccttacttttcttcttggtctcgttcttttgtttttctccatgatacaacatctaaagaaattatttgtgtcacagcaacgtaagtcgataaaattagttgaacatattgagaaaaagttatcatagaccttcaattgttgaaagtcgatgttggtatttgtcaattgatattagattaccaaataaatattagacagtaagaaacgaacaaagtaggaagatgtaggtcaccggtctttgaaaatttatcagatagaattcataatacacagttaggtagtttcagttgagagttaaaagggaaaaatatgtaattgtgtgtgataaatacgtcaaaaattagttgatgagcaaaatcgtaaacaaaaatacttttttgcattagttttgttggattccctataaatacgggttcccatatctaactcgtagttagcataattataagcaacaaataaacacaaaatactgaatttagaaattttccagaaaattaattagagattttacattatttttacaaactttagtgaattatttcttaaacgtatgttagttatttattaactgaagtttcacatatttgatagaataacatttaaataaaaaaatttgaagtaaggttagaatgttcttataatactttataacttttttaaaaggtacaagccaaaattatcgcaaatgtaaataataaatcattgtaaaaatcttaaactaattaaaagatctaacgcaatctaaacaaagatttggtatcatcgcccatttatgttttgatataatcaaaactggttaataattaaattaaattatcaatttcttaattagttagaattcttgttaatgtaatcaactcaccattattttaattatttaaaatatgggttaatatctcttaatcatatctaagatgatattttcttccatttatgaaaagaaaaatatgttaattaagcattaaaaagaaggaaaaaataatttaaataatattaaatatatatacatcgtttttagagttcgagttcttccgtatttacagtttctcttttttccaaagcagggtttggattggtagtttttctggattaattttgtctcaaattctttcttctttttatttttttttgtgaaattctttgttttaattggtgtgacatcgtttccaaaatattttcaaatttgattgcttttgaagttttttttttttttctatgttttggaattcattatactagcgttgttgtttttctttctgcaagagtaatg

SEQ ID NO: 28636 - DNA, 3003 bp, Unknown; identical to SEQ ID NO: 28635
  misc_feature (1)..( 3003): 2750-1469P.txt file - cDNA_ID_2997972; gDNA_ID_2926206; Annot_ID_141755

SEQ ID NO: 28637 - DNA, 3000 bp, Unknown
  misc_feature (1)..( 3000): 2750-1469P.txt file - cDNA_ID_2997976; gDNA_ID_2926238; Annot_ID_142796
aagagaaagatagagagataagaagaagccatgggttcgatttcgatgcacataactccctctactgctctccctatacgccatttcagagctagagtctcttgttgctcttctggtaatttcgtttttcctccgtttgtgagaattgcatgtgattgtcgaattatagtaattgtcgattgtttgatggcttttcaaatcgagaaaatgcttgagcttatatctttgttgagtattttagaacaatcttttgtaggaaaatgcagtgactatgactgtctttttgattattcttggtggagacaacaaattaacaaaagaatgtgtaataattcttccaaagagacacattgggattgacttaagattagcgttgttgtgtagggcatgtatcatttatcaaagatgttgctgccactgaacctccaatgcatcttcatcacttactcaaagtgcttcaaacaagaggtaaaataatgctcaattttgttcctcatttatgtccaaacttatgtattcgtttcttttcatcacttattctggatttgtaataatggagaaagggaaacttatggttcttaaagtctcagttgcttcatatatcttctgcaggtgagacaatcatatctcctggagctaagcagggactgatccctcttgctattccgctttcgaagaattcgtcaggtaagaccacactttcgatagaatccattagctttttccaggagcttgtctttagttttgtttttctggtttttttttttgtctaagtaggctctgttactgcgcttttgagatggcctactgctccaccagggtaagagatttggatctctttcttggtaactcttgcagtagtaaaaatatgttgttgggttattcttggtttttaacttttttgtattcgagaacagaatggatatgccggttgtggaagtttggaggagtggagtcaggcttatagctagaaatgtaaagacttctcattctgtttatacgtagcttatccttttaagaggatttatgtcttttttgtgttaccaagaaacaatcttacattttttgatattcaggtagatgaatacattcaccggattctagttgaagaagatgcacaagagttgacagaactatatcgtgcttcgggagaggcaggtgaaaaactttacgaaaagggtgcttttgctgaatctgaaattgacaatctcgatgtctatgttttgaaaaaggcaagactgaaaaactcatgacttatagataaaaggttatgtacaccacaataaacagtatttgcttttgttttgtatcgtctaggttggactgtttccagatttgttggagcggaaagtattacggcattttgatgaaggagatcatgtaagacatttgacgcatatgatatgacattctattatcatgaatctctcttctgtgacactttttcaggacattttcttctttttgtctatggaaggtttcagctatggtgacaggagaattttacacaaagaaagacctctttccaggatttggacgaccttttgtatattatgcaaacatactacagaagtttgtaaactttacatacctaaaacatatctccattttattttcgtagagaaagatgtagccacttatcttcagattcttattcgcagggtagggcggaatgtagaagcaaaagatgcggctagggtagcattgagatcaccgtggtggacattaggatgtccgtatgaggtatgacaaaagtttttttgttcttctttttcggttgtactgagttttaaagcatagagacatattcatggtcatggtatcttgaaaacatgcaggaggttgctagtatagcacaatgggaagacgagcagatcgaattcataagggaaaaagtgagtgatgaaggtcgttttgaagatttgcataaaggcaaagctccaatccaagttgcgttggatgttgcggcttttctcttggatttggcttctatcgaaggaacttggtccgaatctttaaaccatattgctaaatgttatgaggaagctggattacaccatatctctaatttcgttttgtacacagattgaatccatattaatgtatgttcttcacaacactttccatgtatgaatcagagaactcactaccctttttcacttggaagatctttgcagctggatcaaaagagtaagcaagcttgtgcaagatccatatcgactttgcaagttttaagaaggcctggtaaaatgcagtcctcgggtggccacctcctgtcacgtagtcacgctggtctagatttccaaagaaagaagcttccatctttgggtggactaagaggagctacttgctcctgcagaatataccaaagttggaatcagggtttgtacctagagcatctagtggatccatgtccttgagagcaagaaactggcggaaaaaggtgtctgtgtcatcatcggccataaccgtagcactctctgagtttactgagaagttcttctgctgaaacccactgaacatcctttggcatatgtatgattcaaatgcatattccttgtgaggcctcttggcgtaaacaacatcaggctcaatagaattggctgcagtatcaagatcccatcctgctgctttcatcatgttgattagcggcttggagaaatcatgcacaactttagcagcagcttcgtaagtagatacaaagagttcagtagtcaagtcaggaaactgtaaatttccatctccaccagaaccttggtttgtagacattcctcttaacttaagattcttctcaagcttaagccgtttctggtttgcttcctcaatcttctgcagcatctgcgtgatctcggaatccttgttctgaatctcagactgaaacttcttcaccatgacctcataagtcttcaacaaactctgctgctcttgaatctctgcagctaaacgagagtcttgtggagagacacatacaggcttggggttattctctctgtaaaaatg

SEQ ID NO: 28638 - DNA, 3000 bp, Unknown; identical to SEQ ID NO: 28637
  misc_feature (1)..( 3000): 2750-1469P.txt file - cDNA_ID_2997976; gDNA_ID_2926206; Annot_ID_141756

SEQ ID NO: 28639 - DNA, 3003 bp, Unknown
  misc_feature (1)..( 3003): 2750-1469P.txt file - cDNA_ID_2997984; gDNA_ID_2926238; Annot_ID_142799
tgcatttgaatcatacatatgccaaaggatgttcagtgggtttcagcagaagaacttctcagtaaactcagagagtgctacggttatggccgatgatgacacagacacctttttccgccagtttcttgctctcaaggacatggatccactagatgctctaggtacaaaccctgattccaactttggtatattctgcaggagcaagtagctcctcttagtccacccaaagatggaagcttctttctttggaaatctagaccagcgtgactacgtgacaggaggtggccacccgaggactgcattttaccaggccttcttaaaacttgcaaagtcgatatggatcttgcacaagcttgcttactcttttgatccagctgcaaagatcttccaagtgaaaaagggtagtgagttctctgattcatacatggaaagtgttgtgaagaacatacattaatatggattcaatctgtgtacaaaacgaaattagagatatggtgtaatccagcttcctcataacatttagcaatatggtttaaagattcggaccaagttccttcgatagaagccaaatccaagagaaaagccgcaacatccaacgcaacttggattggagctttgcctttatgcaaatcttcaaaacgaccttcatcactcactttttcccttatgaattcgatctgctcgtcttcccattgtgctatactagcaacctcctgcatgttttcaagataccatgaccatgaatatgtctctatgctttaaaactcagtacaaccgaaaaagaagaacaaaaaaacttttgtcatacctcatacggacatcctaatgtccaccacggtgatctcaatgctaccctagccgcatcttttgcttctacattccgccctaccctgcgaataagaatctgaagataagtggctacatctttctctacgaaaataaaatggagatatgttttaggtatgtaaagtttacaaacttctgtagtatgtttgcataatatacaaaaggtcgtccaaatcctggaaagaggtctttctttgtgtaaaattctcctgtcaccatagctgaaaccttccatagacaaaaagaagaaaatgtcctgaaaaagtgtcacagaagagagattcatgataatagaatgtcatatcatatgcgtcaaatgtcttacatgatctccttcatcaaaatgccgtaatactttccgctccaacaaatctggaaacagtccaacctagacgatacaaaacaaaagcaaatactgtttattgtggtgtacataaccttttatctataagtcatgagtttttcagtcttgcctttttcaaaacatagacatcgagattgtcaatttcagattcagcaaaagcacccttttcgtaaagtttttcacctgcctctcccgaagcacgatatagttctgtcaactcttgtgcatcttcttcaactagaatccggtgaatgtattcatctacctgaatatcaaaaaatgtaagattgtttcttggtaacacaaaaaagacataaatcctcttaaaaggataagctacgtataaacagaatgagaagtctttacatttctagctataagcctgactccactcctccaaacttccacaaccggcatatccattctgttctcgaatacaaaaaagttaaaaaccaagaataacccaacaacatatttttactactgcaagagttaccaagaaagagatccaaatctcttaccctggtggagcagtaggccatctcaaaagcgcagtaacagagcctacttagacaaaaaaaaaaaccagaaaaacaaaactaaagacaagctcctggaaaaagctaatggattctatcgaaagtgtggtcttacctgacgaattcttcgaaagcggaatagcaagagggatcagtccctgcttagctccaggagatatgattgtctcacctgcagaagatatatgaagcaactgagactttaagaaccataagtttccctttctccattattacaaatccagaataagtgatgaaaagaaacgaatacataagtttggacataaatgaggaacaaaattgagcattattttacctcttgtttgaagcactttgagtaagtgatgaagatgcattggaggttcagtggcagcaacatctttgataaatgatacatgccctacacaacaacgctaatcttaagtcaatcccaatgtgtctctttggaagaattattacacattcttttgttaatttgttgtctccaccaagaataatcaaaaagacagtcatagtcactgcattttcctacaaaagattgttctaaaatactcaacaaagatataagctcaagcattttctcgatttgaaaagccatcaaacaatcgacaattactataattcgacaatcacatgcaattctcacaaacggaggaaaaacgaaattaccagaagagcaacaagagactctagctctgaaatggcgtatagggagagcagtagagggagttatgtgcatcgaaatcgaacccatggcttcttcttatctctctatctttctcttcactctgcttcctcaacctcacagaattttcgtaattcagcagtagcagcaaaagatagccattgattttgtttctgattcagcaaaaaaaaaagaaaaaaaaatgagatgggcttagtctgttacaatttaaggcccaaacccaacaaagactaaagacgcgtaaccgacaaaaaccgtcattaaatgtgcaagagggaaggtcaatttcgtcaactaccggtttacaagacccggttaggcctaccatataatcaattttctcggtgtctttgattttttttccgatctttttctattttaattctcgaggataataattattcgcgatagacgacgcctttcctcttagctcggcgttatcagactcaccgagtcgactcgctccgccgttgccgtctccgttaccaccgtctgcgcaatacgtaattcatagcccggatttctctatg

SEQ ID NO: 28640 - DNA, 3003 bp, Unknown; identical to SEQ ID NO: 28639
  misc_feature (1)..( 3003): 2750-1469P.txt file - cDNA_ID_2997984; gDNA_ID_2926206; Annot_ID_141759

SEQ ID NO: 28641 - DNA, 3003 bp, Unknown
  misc_feature (1)..( 3003): 2750-1469P.txt file - cDNA_ID_2997988; gDNA_ID_2926238; Annot_ID_142801
aggttcaatgtccctctctctctctctttatttgtagtgagttgactctcctagttcattatttaagaagttcttttattaaatattacaggtgatgcgggatcctaatggaacaagcaaaggctcaggttttgttgctttcgcaactcccgaagaagcaactgaagctgtaagtcagttgtatcgtcttgttgattgtatttatgaggactttgattgttagtaacagtggaatactgtacagatgtcacagttgagcggtaaaatgatcgaaagcaagccactctatgtggctattgcacagcggaaggaagacagaagggtcagactacaggtttgcttctcttggaatcacctcgtcttgtgatacacttactactcctactttgcctgttggagtttcaactctaaacaattggacccatcatgtacaagtcttagaatgtcccactgcgtataattatcaatactgatgctgattcttctttataatcaagtgcaacaatatataaagcataaacaacatatgtcctagtatttttgtatcacagaaaaatctcttttttctcctgctgctgagtatttgcattgatgtgaataggctcagttttcccaagtgaggccagttgcaatgcagccgtctgttggtccccgcatgccagtgtatcccccgggtggtcctggtattggacaacaaatgttctatggtcaggcccctcctgccatgattcctccccaggtaatcttcatgttactctactttaagtagccgtgtacgattttacacaaagatatgcacatgtttattttctaccttgggtataatgaattacaagctgacagatgcttttaagtcacatgaaaagtttttaaattctttagctctatagttgctatactcatacttgagcctttccaaatctattttgaaactgctgggataatattaacctgtacttatgcaatgccacagcctgggtatggataccaacagcagcttgttcctggaatgagacctggtgggggtcctgtacccagtttcttcatgcctatggttcagccacagcagcagcgtcctggaggaggaagacgtcctgggggaatccaacactcccagcagcaaaatcccatgatgcagcaacaggttcttctcttttccttatttaattgcaataaaggctgctttgcttgcttggctctcttttaatagttgatcgtatggtttttctgtttggatggtggttagatgcatccaaggggtcggatgttccggtatccccaagggcgtggtggtagtggtgatgtgcctccatatgatatgggcaacaacatgccattgactattggagctttggcttcaaatctgtctaatgctactccagagcaacagaggacggtgagagaatctcttaaaaaccaaatagagagactggttttgcttggattataataatgtgaccctttgggtgtgtttgtacagatgctgggtgaggtgctgtacccgttggtggagcaggttgaggcagagtctgcagccaaagtgactgggatgcttttggagatggaccagactgaagtgctccatctgttggagtcaccagaagctctcaaggccaaagttgcagaggctatggatgttctcaggagtgtcgctgctggtggtgcaaccgagcagctcgcttccttgaacctctcttaaattgctttttatcatttgatctttggcttttgtctctcccatacaattggagttgtttctttgctattcgttttctccctgggaatttggattcctccacataactgcgtttgtgttattttaaaccttcgtttttaaaccacaaaggaaaaacctatctgctttgttcttttgatttagttgcgtgttctagcttgttcgatctagtgttcacggaagatgaatttgattaccaataaggccaatgctggtgatccccctctttggccttttgactgttggtggttgttgcttctagtcattttttttaccagtttttcaagctctattttatggtaaaaaggtgtcctggtaaaaatggatgaatgggtctcattctcagcagacaatgtttgaatgagaaagaaatacattttaaactttttatacactttgcttctagattgattgggactagtcgaatagaaatcttagtagaggtctaaggaaacatgatacacatcttgtttggttgaaatcttaccattgtttttggtttcagttattgatctggtttttggactactttttctgcaactatttgagaatgagaaattacttaccaaaaaaaagaaagtcttcatctacgccaaggatttagaatattcgtacatgaattttgatttccagtacattgcgtcatgaactatatagtctacttgtttttttttgtatctatttgacatgcagcaaagccagcaacacatcttttattgagtctgatgatatttgtgaactaattcgaaaatatttaaaagattcgagtgtatgaaaggtttaactattatcaaaatctctagatatttcaactgatggcaacactcaacaatctcacaatcacgacataaaaatccaataacacttgaaaccaaaagagggttcaaattagggtttcttgttaaatcgaaattggacttttatttatttattaacatctgacttttgagttttgaccaaaaaaaaagatggaaaatatcgctttgaaattgaggacccaaaggaaacgtaaatatgccgaccaatcaaccatataccaaaaattgatatgtggctatgtccccaccaccaccacctatcatatcacaagttctctctacttttctccgaattttaccacccaatcaaaacgcttctctcttcttctacttcttcacttctctctccttcaacaaaattttctacctttgtttcttctctcagatttcataaagaaaagatttaatctttcattggaatctgtgagtaacagaggataagcgaatatg

SEQ ID NO: 28642 - DNA, 3003 bp, Unknown; identical to SEQ ID NO: 28641
  misc_feature (1)..( 3003): 2750-1469P.txt file - cDNA_ID_2997988; gDNA_ID_2926206; Annot_ID_141761

SEQ ID NO: 28643 - DNA, 3000 bp, Unknown
  misc_feature (1)..( 3000): 2750-1469P.txt file - cDNA_ID_2997992; gDNA_ID_2926238; Annot_ID_142802
aattcccaatcttttgttgggttggaggcgtcatatactgacaaggatgcaaggtatttggcactaggatttcgaagtttatagacctgacctggaataaatcatttgaaaatcaaattcgttttctacgtttccccatataacagagcacaccaggttaacaaaaatcgattgcagcaacacaatatttattcacatttcacaggaacaaggctcggttagaaggaaaatggtaaacctgtcctaactcgcactaggtgaagccgagcttcacaaattggggcagtttttaaaagtgtgccaccagaaaccacagatggatgaaggttcgccgactgtctgaccagcctccctactaacctagccacctgttcattgtcagcttctctggtttcacatacaagtttccaatcccacaaatcaacagacgggatctcaggcagggtcttcccaggggattcgatgacttgaccatattgtgctagccatctttcttcctcgcttgaaggagcagctagaaatgaaacagtgagcatgaaagctatgaatatgagccgaagaaaacacatcatcgaagtaataagatccccctaaacagcactacgggggttagttaattatttcaaattttaagatcagcttacgagagaaaaatactatccaccatgaggaataaggatttatttagcttcatatatcaaaaaccatgaccaagaaagctgatatggagcggaaataaagcaaatgaaaagaacagaagagataaaaaccttcaccaaagttctcttcttgtggatcaaaatcttcttcaggaatccattctccctcttcaagttcctcagcatcatcatctcctggagaacaaacacaatttgtagcttctctccttaaattccaaacttgaagagcaaattcattccaacgtatgcaatataaaattctaataagcattatcccaggcaaagaccattagctgacaacatctgacaatcctgattattttccccagaagccctctcatagctggaagcactgggatgttgattataaccatccagataaagttcaattagtgtatcttccaccctgataaaaaagtttcataaaccatttgatgaaaaaacatatattaatctccatgatctactaaaggatataaccaccaaccatgaggaaggtcgttgacgatgttcaggttcctggtcatttgggcaccctgttgactctttcgagcaaataacgtgtctatcagtatcagttaaatattatagatgctactcaataatccaccggaacactagatgaaaatttacctgaaggagtttctccaggattactcagagaaacttcacatccattttcaacattctcagcctgagaaaatgcacattttctgcctaagtcatcttcagatggctcataggtgacaatatctccaggagggttcaccgaagactcgtcgtattccaagggaacatattcgccattttcatgcttgtagtaacgaccatccttgctacaataataccaaccagcatttgggtcatggtaaaacccactactgcaattcacaaatcgaaacaaaagttagcatgcaaaaatgaatagagtccttagttcaatggaattaagcatcaatctcaataaagtctctgcctttttcatcactctttatagttaaaaacgataaatagcagataaagcttttaacactaagacaatcaaacctaaacacaatggacaatttctgcttatattcaatcaaaactaaagcaaactaaggaaattaggctatagaatcgatagatttgggaagagacgtagcctgtgatggatatatagctgcgtatcgctgtcccaaacgtaggagtcttcttccttgggttcctgcaactctttatcgtcgtcgggcatgaggattgattgctggaatctcaacgaaacaaccaaagattgcaaccaaagattgctgaaactagatcctggacaatcaaattgagcaaaagatcattactttgacgatgatgattcaatcaataatcgcttttcaaattttggtttcaaaaactggaatctacagttctgttgaagagaaacgaggaggagggtaactcggaaaaccatctctcgtttccgaatccaatttacggtttactgttaaaaaaccggagtgttacggtttaggcccagtaaggtttaggcccatcaagtagaaacccaagtcaatgacagaagcttttattagtgaagtctttctaactgtattgttttctcattcaccatctcatgttatcgtcaaagggaatgtgattgcaagaagttattaccagaatcatacactgaatataagaatcaatgaagctaagtcctaattcctaacaaattattgttgttgaaagagaaaaaaacaatagaagataactcaaagaagtatgtagagagaaagagtgagaaaagggaagaagaatgacgaatgcaatgacgtgagattcaactcctaccaaaattcctatcaactgtttttgttgtaattagacatgtcattgtcattgctgacaaaataaggaagacaaaacaaatccgacttggagataagcccgtttagatttattcaactcctatcataaggatatcaaatttttcccatatcatcaactttagaaagtttctcaaatatctgcaacgattgatctctttacttctttaaaaaacattaggttatgggtccgttttgtgattgtaaaagcgacacgtgattgattagcaacatttaaatccatatcttgttgaacaaaacggtgcagtttcggactttcgttaccatatattgtagttgttttgttatactgtatatataaagcaagcgttatctcccaaacttcactctcttaccttgcctcttgcttcaacctcctaagcacattcttatctctttctgaaacgagttcccaaattagctctacaaaaaccaggatcttgatttctcatcagttaaacatg

SEQ ID NO: 28644 - DNA, 3000 bp, Unknown; identical to SEQ ID NO: 28643
  misc_feature (1)..( 3000): 2750-1469P.txt file - cDNA_ID_2997992; gDNA_ID_2926206; Annot_ID_141762

SEQ ID NO: 28645 - DNA, 3003 bp, Unknown
  misc_feature (1)..( 3003): 2750-1469P.txt file - cDNA_ID_2997996; gDNA_ID_2926238; Annot_ID_142803
tttttagccgtatatatcgatgtgactgatcgaaagaacaaaccaaaaaaactcttaatggagttgtaatacataaataagacaagttgttagaagaaaaactgaagtcgataagcataaaagtgatgttatataatatcatggagtcacccaacagatatgtttcttctagaaatagtttgacgatgctaatcaaataaaatgtcttgtaatttaaatttcttttaaaattattttactttttagaaagaattaaaggttaggtatttgatattggtgtgtaccaaatcttagtagacttttatggtttttgttctttcttttaacagaacgaacaaatctaaacggaactaatgttgggtttgcgtcctgatggctcaagaacctaacttcacattcacttaccaatactacaaactaaaagatcatccattgtaaatttgaatgaacaaatacaatcttttactgttgtaactcaaaccatcagaattacaaaaacattattgttccataacttgcaatacattcaacttctttataccttctctttttgcagtttaactaacgtaagctcttccatcaacctatctacctctagatctgaagatcctccttctttcaccgcatttttcgccatttctgctaactccttggcccgtttcctcctctcttctccaaccatcacttccctcaccgctccctccactttctctctgctaatgaagtctccaactacttgcatcatcttcttcactcccacactcactcctgttttcaacacttgtgtcaccaatttctcgttgtagaactgctcggctcccacgggccatgtcaccattggcaggcccgctgccaccccttctaataacgagttccatccacaatgcgtcaaaaatccgccaattgctttgtgctcaagtatcagcacttgtggcgcccaccctcggattatcaatccttttcccttggtcttctcttcaaacccctctggtaaccaatcttccttctcaactatttatatgtaatgcaaacgcaaaagttagagtttgaaacagtagaatcctaattagatcattggtttttctctaaaacaaaaacagaggattttgctgcaaagagagtgatgtctatggtaccttggctgccttttctgttaaccacccagacaaaatcatgtcctgacatatctaaaccagctgcaatctctatcagctgctcgtttttaaagctagacatggttccaaaggccatgtaaatcactgaatcacatttcttggagtcgagccatttcaaacattcatgctcatcaatgcttgcctttttgcctctttctgctttctcctcgaactttctatttcctaaggaaagcggaccgatatgccacgctcttttcgccacaaagctcttgaaataatctgagtaagcctgttcaagctcgtagaagctgttcaccaacacgccaaagctatctctctctgagtctcttattgccttcataaacctccccattacagactcttcttctgtctccatgacctgttcctctgtaatcaaaatgtctcccgggagatcaggaatcacaaagggctcagaacttgttgccacattcttagggagccttatgcaatgagaagcacataaagagaagtagcctgtgccgtggaacacaagtctcggtactccgaacttctcagcaactttagtggaccaagggaagaacatgttaccgacaagacagtctggtctcattgtcacgaggagctcctctagtggctcttcgaaatatttcattgcgagtaaaaacttttgactcaagtcacctacgtttaggtcaggtgtggagaagatgaaatcagtattctcacagccatcaggcaaaccaagctctgtgcaagggaaattaaggatctggatggtgatgtcttcgagtcccgggttgtcttggttgaatgatttgatgggtttctcgaagaagagcttggcattgagaggtgtagtgaggatagtggatttagctcctttggtggcaaagagcttagccatgtctagagttggtatcatatggccatgagccatgaaagggaagagcaagaaatggagcttagagacttcgacaggagttcccatgtttaactgatgagaaatcaagatcctggtttttgtagagctaatttgggaactcgtttcagaaagagataagaatgtgcttaggaggttgaagcaagaggcaaggtaagagagtgaagtttgggagataacgcttgctttatatatacagtataacaaaacaactacaatatatggtaacgaaagtccgaaactgcaccgttttgttcaacaagatatggatttaaatgttgctaatcaatcacgtgtcgcttttacaatcacaaaacggacccataacctaatgttttttaaagaagtaaagagatcaatcgttgcagatatttgagaaactttctaaagttgatgatatgggaaaaatttgatatccttatgataggagttgaataaatctaaacgggcttatctccaagtcggatttgttttgtcttccttattttgtcagcaatgacaatgacatgtctaattacaacaaaaacagttgataggaattttggtaggagttgaatctcacgtcattgcattcgtcattcttcttcccttttctcactctttctctctacatacttctttgagttatcttctattgtttttttctctttcaacaacaataatttgttaggaattaggacttagcttcattgattcttatattcagtgtatgattctggtaataacttcttgcaatcacattccctttgacgataacatgagatggtgaatgagaaaacaatacagttagaaagacttcactaataaaagcttctgtcattgacttgggtttctacttgatgggcctaaaccttactgggcctaaaccgtaacactccggttttttaacagtaaaccgtaaattggattcggaaacgagagatg

SEQ ID NO: 28646 - DNA, 3003 bp, Unknown; identical to SEQ ID NO: 28645
  misc_feature (1)..( 3003): 2750-1469P.txt file - cDNA_ID_2997996; gDNA_ID_2926206; Annot_ID_141763

SEQ ID NO: 28647 - DNA, 3003 bp, Unknown
  misc_feature (1)..( 3003): 2750-1469P.txt file - cDNA_ID_2997998; gDNA_ID_2926238; Annot_ID_142804
aatggattcctgaagaagattttgatccacaagaagagaactttggtgaaggtttttatctcttctgttcttttcatttgctttatttccgctccatatcagctttcttggtcatggtttttgatatatgaagctaaataaatccttattcctcatggtggatagtatttttctctcgtaagctgatcttaaaatttgaaataattaactaacccccgtagtgctgtttagggggatcttattacttcgatgatgtgttttcttcggctcatattcatagctttcatgctcactgtttcatttctagctgctccttcaagcgaggaagaaagatggctagcacaatatggtcaagtcatcgaatcccctgggaagaccctgcctgagatcccgtctgttgatttgtgggattggaaacttgtatgtgaaaccagagaagctgacaatgaacaggtggctaggttagtagggaggctggtcagacagtcggcgaaccttcatccatctgtggtttctggtggcacacttttaaaaactgccccaatttgtgaagctcggcttcacctagtgcgagttaggacaggtttaccattttccttctaaccgagccttgttcctgtgaaatgtgaataaatattgtgttgctgcaatcgatttttgttaacctggtgtgctctgttatatggggaaacgtagaaaacgaatttgattttcaaatgatttattccaggtcaggtctataaacttcgaaatcctagtgccaaataccttgcatccttgtcagtatatgacgcctccaacccaacaaaagattgggaattccctgatatttcaactgaatggcaaaatcctgatacaaaacgcaaagccaagaaggggaaaccaaaaagggccagcaaacttacagtgaagcctagtgaagtagacatgattgaagaggtactccaaatccaccttcatggctgaattcttgtattttatgtttgaaaatgtttgtgaaggatgtaaacacctcttgagattctgtcaaatatctagcagaagacaaaacgcaaagctaagaaggtaaaaccaaaagctgactgcaaacttacggtgaagccttgtgaagtcgacatgtttgaagaggtactgcaaatccatcttcatggctgaattcttctattttttgtttcaaactgtttgtgaaggatattaacaccctgcttcttgaatttttgccaaatatctagcaagagacaaaacgcgaagctaagaaggtgaaaccaaaaactgactgcaaactcacagtgaagccacgagatgaagtcaacatgattgaagaggtactcggacctcaccttcatggctggattcttgtattttatgtttcagaatgtttgtgaaggatgtaaacatcctgctgcttgaacttctgcacaatatctagcaggagacatttttctaaagctctgtgtatggggaaattcagtgagaaacttaaatctgttaagagtatttcgaaggcatagtttagtgttattagaaccctagtaagctagtattttcattgttgctccttgttgtttatcagcagagaagctgttcatacagagatagagccgctgagagaagaaatttgcatggtggatatggtgttggaccaggtcaaaaaggaacaacagtggaccataacacggacgagcattcagttcccgacactggttctgaagaggatactgtagcagaagcattggagctatcatttggatctggaagttatgcaaggaggataatgggaaacatgggttggaaggaggtaacttgtggatcttatcacttgtgagttgtgatgttatttggtgtcaccgtaatttatgattactggggaaatgctaatgcagggtgagacgctagggaagaatacaaaaggtttggttgaaccgatacaagcagtgggcaacactgggaatgtagggctaggatttcctcaaaggagaaggaaataatatgaggtacaagatattcagtttaagggactcttagtgttcatatattacttgagaaattgagttactatataaacttggattggcttataacaagagaggttgcaataggtagctaaatttcatctagacttgtaagagttgagaatcatttacttgctgattttgagaaatagaatgagaaatcgaagtaccaagcaatagacaagttggtttcgatttttattggaccaagcaatagaactgtatcaagaaaacaacatatcggatttatggtccattttctcttggtcgacaattttttgaaatggcgcgacgttgaacaaaaattatacgaacaaagaaagctatttccaggttactgcctttatatttggatgacttgttccaaggggaaactttttttttttttgtctgtcatctgatgatattagaactttcaaaggaaccaagatgattgcaacagctacactgtaatctataaccatcatgccattggacgcatcctagtaaatacataagaaagacactccctttattttggtctccgttcttcagccacaccttataatatcatccacaagataataagtggtgtctagcaaataacaaagcgaagctatatctatatttatttacttattgattgtcgtgaatctatctttaatggtgacatgccatagaattatcactattgtgtggttgtgcttgtaattgtttgtaaaaattttgattttatgaatcaaagattatcaacatctagactttaatagttaaggaaataataatatttaaaaaacgcgtacctaaatctaatgaaaagtcaaaattacggtcaacgccttacgagacgcgtctggttcttgaaagcaagttctgcgttatttcatcatcaatcaaagtcgccattttatttttatttaaagtctcacgtcacggaattatctctctgaattcatcatcttcatcattaccttctttttctcaatctcgattgttttcttccaaattcatg

SEQ ID NO: 28648 - DNA, 3003 bp, Unknown; identical to SEQ ID NO: 28647
  misc_feature (1)..( 3003): 2750-1469P.txt file - cDNA_ID_2997998; gDNA_ID_2926206; Annot_ID_141764

SEQ ID NO: 28649 - DNA, 3000 bp, Unknown; identical to SEQ ID NO: 2981
  misc_feature (1)..( 3000): 2750-1469P.txt file - cDNA_ID_2998006; gDNA_ID_2926238; Annot_ID_142807

SEQ ID NO: 28650 - DNA, 3000 bp, Unknown; identical to SEQ ID NO: 2981
  misc_feature (1)..( 3000): 2750-1469P.txt file - cDNA_ID_2998006; gDNA_ID_2926207; Annot_ID_141767

SEQ ID NO: 28651 - DNA, 3000 bp, Unknown
  misc_feature (1)..( 3000): 2750-1469P.txt file - cDNA_ID_2998013; gDNA_ID_2926239; Annot_ID_142818
ctgggtaagtgttacatttctctgtcacgtcaatagcaataaatcagtctgtttgtttttaactatactaataaaagcctgcagattgtgtaaatgatgatcttgtctctttgattgacactaaaaaagttatgaactttgtgagaaaaccaaaccaagcttctttccttatcaggttcattgttggattgatctctctcttcaacaatgtcgatggaaacgaacattgttcgtggtgtcattatctttcatgtgttccaacatctaaatggagctgtaaccgagaaccagcctcttgcacggtaaaaaccttaagctcttttatttcgttcctcggtttctctagcctagtatcaaacctccttccattgtatctaatcacaaagcatctcttcttgttttttctgcagacgactcaattaggtaaccaattgagcatgacttgtttgaggaatgggaaatcagcatcttacattttggcaaatccctcggattcacggattaatagcttatgtgttcagctttgccgttgatttactgatttttagaaatattattatgtacacaaacacactctacactgtatctatcatatttttttcttgcttattatgtgtatgttttatagaggcccttgttcaataaataatacaatgttttcctaaattactataacggtgctttgctacaattttagaagagaatccatgatacaactttgctcttttggtggtaaaaactcgttgtaagatcaatcaactccaatgtttgtgtctgtcttcttttaaagaaggaaaaaaataaaaaataaatcgccgtctgtggggatcgaacccacggccacgtggttaaaagccacgcgctctaccactgagctaagacggctttgatgcttatgttctcttctaacttcaatatattacttaatagatatctctctcgttttaatttgttactaaggtcaatttacatcgtaaattcgtaatgtttgtttttttatagaaagaccactcgtaaaatgaaaaataaattaagaatatgtagatatattttttgtaatactctctcaaacaatttttattgattagaatctgaaaatggaaatttggcatggagatctttcatttggtaaaatatataacagaaatttggaatggaattttttatatagataactaatagtaatacgtgacaacttgtttttaaaaagattcaccagataaaacccaacatttggaagcaaccttgaacaaatcatgttgtttgataaagtcaacatgactaaacaatgatgcgtctcgcgttagaaaaataagaactaagaagcaatgaggcaaacaaataatttgccaaaaccttattacgagttctcacttcaaatcaatgtaccagaagttttttattttatttaaccacacatgcatgtagagataatttagctcactacgtacgtcttttgattcttgttgaagtgcaaagaccgtagctcaactgcgtcaagctctctggcaaaattgtctggtctatagtatccggtctgaggatcaggcatccaccataactcttctcctctcatcattttaccttgaacttgagaggtttttgcaatgtatggatctaactcttttgcagcggtctcgggtctaaagtatccggtatcagggtctgatgcccacgatggcttctcttgactacttccaattgtatatgccctttgagaggcttttgtgatcacaatgtatcttctcctagaataatatttataaaaaaaaaagaattctcatttagtttacaacgcaacatattcaaaagaattaaccaatatacagtattttctaaaaccataaggtttatacaaatggatagacttacattctgattgtgttgttgatcgagcgagataaacttttgagattgaaaagtgattgagacattaatcctctcaaatctcctatgaagaagattaagtgtaagaggatttttgtatagactattttatgaacgcgcgagttggtttatgtacgtttggaagatatagctttatatataggtatatagggaatttgttaatcataacaattttgttgttgttggaataaactaatactttgactttgtaatgttgatcagactttggaacaaaataaaaaattaaagtattggtaggttctgttaaaaaaaaaaaaaaaaattatagtgtaaagagaagtagtagtcccttgctcgacctgaagtcagattaaatcatcgaaaaatatacaaccaggacaatgacctaatcatgcttcaatttttaaagagttttaagcgtacgtgctaatttttaaatcaaatttattgatttaataacggtgaactaactaaacataaaacaatttttgaattggtctatacatattatgtgaaaaggtctgagacgatcaagattcaatggtttctctgaacggtcaaattatttgaagggtcaatcgagataatggcttttcttcgaataatataatttagcatcatttttgttggctcaactagaagtgtagcaaaaaagaattttgacttaatcaagcttagcttaactacctttgttccctacaattggtcaagtaaattgtttttttctccacttgccgggtgccggttagtggttacacgagcaagtttggtttcgactacggttcttaaaacatagtcggattttattttttctctaattcggtttcatatcggatttttagatagagttttggtttggttaaccatatcgaattggtgttgattggaaagaccaaaccgaataaagggtctttcgagtggacccgagacaagagaaaaagagactctctaaattagcaaaacacctttgttttctcatgaaattacaccatttgccactgaactacaccggtaaaccaacaagtccggcgacagtgacggcatttggattttcaatttccctcccccaaaaaatatttagcagtttcgtctttcgtgaatttcccaatg

SEQ ID NO: 28652 - DNA, 3000 bp, Unknown
  misc_feature (1)..( 3000): 2750-1469P.txt file - cDNA_ID_2998020; gDNA_ID_2926239; Annot_ID_142820
tgttattgttgttgtttctgatttttgcggttctagcatgaatcccaaagaaccgaggttttcgtcatcgtcatcatcgtatgggatcccaatctgaagaagcgttttggagtcatcaacgatggttttaccttgaaagagcactccaatgtttaatccacccttgagaatctgcgttaccgcctccaataccgctagtttcagtgagccaaccgtggctgattcgggaacgtctaccaatagctccgagatattcaacgacttaataccgaatttcactgaaaatgcaacaagagaatgttatataaataacaatttttcatatagatttgatctcaaatagatatacataccggtacatggagtatcatgtgattcagatgaatgattttggtaaaacagctttcgtttcttcaaaggatacatattctgcgattcttggctaatacacgaacctcgctcttttaagtgactcacctttcttttactatctacataaatccaaggaaatacaaaaaaaaaaaaaaagaaggtcaataatattcttcatttctctgtaaaaaagctttccttatatataagtaaagttcgcgagtgatatgatgacttgatcttaccgatcttggaacgtgaatcaaagttttcttcttgtgtgattggcgagttaggcatggaagggccaagagctaaccagtccttagacaataacacctgagaaaggttctccagaccaggttgcggcttaacctcaacttccattgtctccaagaagttattgacgacgacattatcgtccttcgtctcctttgtttcgtgagccaacgagccgataacaattcggtttttacgctcacctgagaatcttccagccacttgggctaaaacctcgaactccgatctttgttttctcataatttttagcctgcgtccctggataaaaaataaaagatgcaatcgagtgagccaaaatgtatgtaacttatggcaaaataaatcatgttcgaatgtatatgcgtactctgggtgatctacatgccctaggaacaacaggaagttggtaaatatcgacaccacagtccaccatgttccttgcaacacacacaactgcaaattgcttacgttaagcctgagcctgcgcaatctcggtttatcaaacattcatatatccgatatatgagacacaaaaatgatgaggataattggaaaaacaaacattcgtcacaaatctcatacaaattcacaaaccttttgattatctgaaacgattttgattttgtgcgagaaagaaaagtgagatttatgttggaatttgtttgtgtggaagtaaaatatatagaaagatatgagccgtataaaaacatccgcctttaaagttgggtttgtgtctgaacaaaaaccccatgaaaccacaaaaattctttacaaaaaaactccaatgttttaagaaaatttgaactcaattttaacaacacatgtcaacatctgagtagtctgaaattatcagtaaatttaaaacgttttctgaattatatttttctctaaagacatgtttttttttgggggctaaaactaaccaacgttttttttagcttttagacctaaaaccctcctccgaacagtttggaccagttcttcgttcccatgacttctcaacatcgatccttcttttaacacgtggacgactctacattattcatggataaatctcttctcattcactaatattttcttgttgtggaggaatttctttgcgagtactttttggataaataacgtggcaaaatggagtacatattttgttccattcggaagcattttaggatgtaactggcaatcagttaaagaaacgtgttgaataaggtgtatatataatagaaatcaagtcaaatgaatttgaatggaaaatgtgattgcagaacaataaattaaattgataatgtttaaaattaatgttgaatgatacttaattttaagtaaaactttggatttaatctttttcgctaacgtagctcccaagttaacgacaatatatggtcaacaaatttaaagttgccaaagcaatctaaggttatatatattattggtagttaattctcatatctagcgaaaaccataaaacaataatcattcttaagaaagcttcaacttcgtcactttcattaactatttatgttttaactgtttcaaatcaaactgataatgataggttggattttttagtagacaattcggattccaaatgccaaatggtatgtaggtacataaacaatatagagaaagagtaggtcaccgatagaaagcacgaccaaaagcgtcgatgtcaaagctcgatgcttacgtactaaagatacaagtagacgagtcaattacaataaaaagaaacccctggacgacggagcggttgaactacttaacaagtcagtcctaattcggatgataagcaaattaagcaaaagactcggttctcttttttctttttagggccacttttatttagggtaataaataactattatccttatgatcacaaaatttatttatttttcttactaaaacttttgtttataaattagtttgtaaacaattttgagacacgaaataacataacttttcctttttttgttttgatgattgttttttaggaaccatgtgtgatgcatatttggtaaagaccattgacttatttaactctttcctttttttcttgttttcagactcaaaaactccaaccaaaatttgcttattgttgtatagattgaactttgcacttagctcccaaagtccaacacccgattaaaaactcccataaagagctaaacacgaaacctaatttctccctacacacatctcaaatctctccaattttgttcaaagctcgaattctgttcaaagctcggatttttaattgcttcaatgggtgagaaagattcagaaacagctccgatttgggggaaaactcgagagagagagaggagcaacaacaacaatatacagccaatg

SEQ ID NO: 28653 - DNA, 3003 bp, Unknown
  misc_feature (1)..( 3003): 2750-1469P.txt file - cDNA_ID_2998039; gDNA_ID_2926239; Annot_ID_142829
tggtgttgcatacccaatcaccaacgacgaataagctaaccaagatagggttttggagatctttctttcccctgagagcataaacatcaagacatgctagcccaaagctccacaacaattgaagacccattgacgcaatcaagtagctgaaaccaaccccaaaatcataatcaacatcaacgagacttgtactactactaataaacaccaaaattgcttgcagaaattccactaccatttctactaaatccgacaactaaacgaacaaaacaaggttaaaggaaacaaatcaaaacttgaagaaagcgaaaccgtaccaaaaagcagtgtgaacagagaactctttagcagagaccataacgccgattgaagcagcagctgaagcacattgtccgattctcagtaacagaccacacacagttcccggacctcctaaaagcttcttcatttcaatcaataacgactccaatttctcttcccaaacccagaaattccgacaaaatcagcgaggaaagaggaacaaaatcgaacaaaaccctagttcagcaagtaaaaagctacatttgcttcaggagaaattttggcggggaaaaaaagaaattgcagaggaaattcatagctaagaataaccctataagaggattttgtcacctacaaacagaatttcccgaaacggcttagattcgattataagctaagcttcttccttgtttctcctttgacattctctttttcttgctttgctttttagtggactgagataagtgagataagcatcctacgtggcagcacaaactaactttttttttttttttttgtctttttttttttttagcgattgtatttggtcgttaagaatctgaagtattatttgttgtatttttgagttctaaaaatgtgtatgcaaatgcaatgcctttttgcctgtctctatgtggctattagaccattacataagttttcgtagtaactcgtaaaattgatcaaaattgcaacaaaacagagttaaattgagttccaacacaagttaagtgtttgtgcttatggatcaaatatcatcatcttatcaagtctttacaaacagtggaatcatcatctcaataactccactgtaattagacctatcttaagctaccctacattgtaccaaaacctgttcttaatagctcagtgctgataaaagatccgataccaacactgtaacaaatccatcgctagtcaaatctactcacaagaactgaaagagatggatctctagaagatatagtaagccaatatattatttctgggaacgcggcttgactcagcttgtcatttcttcctttactacacttttaagtttaccctccttatgtggattttttctttgtgcttgaatgtgatgcacaaatgcagctactataacatggagctttgggggaggcttgcttgttgaagagacattgtgaccagcatcttttaaagctttggcaacattcttctgtgctttctggtagtgcacgttacacagtacaggaacagtcgatgctagtgttggttttccacaaagtaatggtcctgctggagatctgaatgtacaaagcaaacaaatgcagagttagtagagaaccgctcaaataatcatcatgtgctaattacaaaccagcatgaaaaagtacatatctatgaaatctggattgtaacaaaccgaatctgataataacagtgtatcaatctgaaaccaggttaatgttgtattccaagtcacttacattttcaaagagctcatctcaatgttcagttggaacacattttcaaagatgacataataatgctaataatactcataaccctacctcgtttgcaaagataccttaatagagacatctttgtcacttatgtatatcaacgcagcacatcaatcaaggttatgaaacaagtcaaagtaccgaatctatatacggttaccaaagctaaaattttctcccaatccctacggaaatctttgaaacagagcaaagtctcaatcctaaaacctttccgcaggctcaaagaagaaagaaactatttcttggcacaaacattgctttgcagtttcaattcatcatcactacaacatcttaaaccgactatacaatataaaagaacacaacttgaagcaaacctgttgatgacgtttgtgcaaccagtgtagagcttctgcttactatccttgagaatatgcaattgacagtatttggtaagcgccatagctttagctttgcatccatacatacagaacccggaattgctgtttgcatactgatcaccatcattacccttatctccactaccttctggatcaagcctccgtctcttattcgattgattttgttcgtctttaaactgactaaccccatacttacaccaataatccctgtgttgcgccttgagatcctccattaaagcccaataatggtttttataacacttggccagctgctttaggttgtctgctcggcgtcggagaagctctgggcgtgtgaggtgactagagcttgcgaggatttcatcttcttgtaacatcgtaatcggtgaattcgaggtcgatggtaagacgtttgtgctaggtttagggttccgaatttggggttcaactgaagtggaagccacagcggtggaagatgcagcgttggaggaagacggaggtcttgggggtttcaaggagaaagggttttgctcagtgttcttggcagctgacgccattgtcgtcgccggaaaatgatgacagagaagattcaaaatgcgagatttttttttctcttaattacttgattgaaaacatccatgggcccaaaccaattatttaactattttatcaatgtatgggccaaattattcaacaaataggcccaaaggaaattggatgtgaaacctgattttctgaattaggtcaagtataagtactaatagcatctctttcgagattacgccgctcatttttagggtttcagatataggcagattctcacatttgcaaacatg

SEQ ID NO: 28654 - DNA, 3003 bp, Unknown; identical to SEQ ID NO: 28653
  misc_feature (1)..( 3003): 2750-1469P.txt file - cDNA_ID_2998039; gDNA_ID_2926239; Annot_ID_203999

SEQ ID NO: 28655 - DNA, 3003 bp, Unknown
  misc_feature (1)..( 3003): 2750-1469P.txt file - cDNA_ID_2998042; gDNA_ID_2926239; Annot_ID_142835
gagaattcaaagaaagagaagaagagagcgtcatcgggctaccagcatactattggtagaggtcatagacgatgttaaactcgatcgcactaaaatacgtggccgagaagtagaggaggacgacgaagaagaagaaccaacaatctatcatccgaaaaataaaaacacacagagaaatcagctcgagagtggacgcacgcgtgtctatacgattgatatgtacatgtaaggagagacaacaaacctgtttgggaatggggaacgaattgaaggaagccattgagacgcagatgggagcggaggaaggagatgattggagtcagtggagagatatagtttgtgtgcaaattgtatggtctacgacttctctcttctaatttgcctaattccctctctccgtttcgttgccactcttttttttttttttttttttttttttactcagttgtaaatttttatacacaaaatatctaaacccaaatccaaattttatgcaaccataactgaataaaccgacgttttcattcaatgtatatgtttatagcaatatcctaatcactagaacatgaaatgcaaacgtaaagaaatataaacttggtctatattaaaagagaagacaaaataatgctttgtgtaattatgaaaaagataagccatgaggattctatgttgtacaaatctaccagaggaccaaaaaagaaaagtgaaagaaacagaggatcatcgactaaaatccggcatgccctccgtcgcaggcggcacaaccagtatcatcatcatcattttcgcgattaggtttagtgctgatgcagcaacacacgagagccgccagcaagatgaatccccaaacaaatgcaaatgattgtgccagcttcaagaatttctccatttttgtgttcatacaattcctcttcttgtcatgatcacatctctaataaaccacccaaaagccttgaaaatttcattttaatatcggcagaaataaaagaatggaacattgtagatatgcatatcgagaaagatgtgaacaagtgttttaatttatagagaaagaggaatcaagaccaacatgttcgagagtataaaatgacctgtgactcctttatatattaaaccatgatgggatatgatgttgaatgatctgtgggcatgtgtgggatttattatatgttttaatgaccttttttgccagatcgaataattttgttggttgattctttttttatgttatttatcattatgtatgcgtatatgactattacaacctcattttaattacctttaatggaataaatgatacataactgaattattcagccatgaaccaaacacgaggaataaagaagaagaaaaaaaagacaaagcattcaagttttttaaaaggaaggtaagttttctgtttgtttttatgctggagattaaaagtgaattactgtacatagatggtttggttgaattatgaaaataatgctatgtttttgttatttatttaagaaaactgtcacaagtgtaatatattatacattgccaaagttcttcatttatatattgccacaagtgtaagaattccttgaatcatttttattttgatttagtgtatcatctaagtttttctgtctcttgactcacatatggttctaagtctaagtggatgcatatgaatccctactgggccaaaaataaagagaagtccatggagattataaaaaaagttttatggcccactggacaagaagacaagttcatacatggttccgctaatatatgaaaaagcacaaatttggtccggtatggttaacaattttgatcaaattgtcagcattttcttatatccaaagagttccagatcatttgaaagaccatttgaagattatgaatgttgtactatccgagttaagaacaaaaaaaatctgattttcaaaggaaacacatgtgagaatcatagacataaacatgcaacattgcaacaaatgaccaatcatgagagagtttgccaaataccatgctaaagattcgaaccaggacctttaggtatttagtttgagtatattatctcccaaatttgaaactgaaacgtaaggattatggaaagaaataaacggctggaaagagttagcaaaagcggctaaagtcacaatcaagcagaaaaagctagtgggcttttcacaacggcacgctatataggctgctctggatcctacaaattaaaattcttgtgtgactacttaacgctatttcctactatttatttatacgtttatatcaatatacacgtaatcccattttcacacttcatataaaacgtttatactccatctttatttttattttatcgacaaatttgtttctgtgaattgtttcaaatcttcaatccaaaagcagttcatacagaagtttgttttggaaatgtaaacacaaaaaatatttgtaacggacaccaataatttcaatagatattaattaatctgatcaaggaacaacagattttttgttttgtttaaggtagtaatgtttacaattcgaaaatatttgaagatttgtagtaacgacgcgtagaaacataagttcgtagttatttcataactttaaattgttatgattggtgtagcttgtagcgatgacttcatagtttaagaccactaatcatgctgtcattatgtccactcaaagccgtaattttaaataaaaccatactattaaaatttaatacaaatcatcatcatctccgatcgtataaatcagaagcgtcattttacaagttgattcctttgctctaataatattagtaaaaaaaaactttgcattgaattcaattcaaaataaacctttctttctttctttctttcttctctatcattttatctgaatccgcctcccaaattcaatcctttaattttcaactccaaatcgatccttcaatcaatttctgaaacttttagtcatcatcagctcaatttcggatctccggagttgtatttttactcctttgtcggaggtaaaatg

SEQ ID NO: 28656 - DNA, 3003 bp, Unknown
  misc_feature (1)..( 3003): 2750-1469P.txt file - cDNA_ID_2998049; gDNA_ID_2926239; Annot_ID_142842
atttgatattctcaatcgtgaaattgttattgtcaccgaaatcaaaatggactccaccaccccacccagaaaaaaaaaaaaaaacaagataacgagaagtaataattaaaacaaaaaatcattggttaaattatatagtcaagatctcttgttcggttcagacagtctcgtgttgtccatgtgatgtggctttaatcctctgtatgtcaaataacatcaaaccctttcaatattgtcgaatgttttcatgttctttaggaaacaaatgtttttctctagacatcttttaaaatgttttcatgatcatattaactggccacaaaattctaggcctgctatagagaaactcaagttatatcttaagaaacaattacgagtcctgtcttttagatgtcatatcagaatgtaattagtatagttcgatgagtcttttatttatttatttttgaatgaatgttcgatgatcagtcttacattcctagctcacatcattattatagtattacataatgtgtttattttaaatattcgtttttggcattctcttaaattgggtgtttgccaatttaaaactagaatgcattgtaaaataaactagaataataatcaccatctacaactaaaagaaatcacctaactagtacttaaatatatgaatgatcatcaatctaatccttgttttgagttggaacccataacccctagaaaacaatttctaatttcttaacatacaactacgaaagtagttaagtacacaaacaagaaccattaataatagtttttccacttattataaaattttgcaacctaatgagcaaagacgggcaaaacaactttgctgaaccaattttatgttaaggtgtgtttttgcaaaagaaataataattctttgggatcgatcgacggcgtcttcgactttattatcaacatacaaagacaagaaagcatgtcatgcacgttttatgggccgggaataatgatctatccacaattatatatgtatatttgggtcacacataacggtgtatattgtaatattttcttattaaaggttcgaagactgatttaattgtatcacaaaactaagtttaagagcctttttttttatggtttaaggctaacatacgataatggagtgggagtattcacactaattaaaaagcatggtcaacaataatatgtgatttagtgagtataaatagttgttattatcgtgataagtcaaggaagtagaaaacgatgttgtaataacttcgtttatctttcggcgaaaaagagaaattgttagcatttaggggaaattcaaaatcgaagctctctctttctgctttcacttttttttatttgcggaaaatgtgttctatgatttcggaaagtttgtggaaggccaatcatagtaacattcattctcccgtcagcacaatccaacacatcatctactctaaaagctttaagcaatttaggtatgaagaatttaatacatcatatgcataatgcatcttttatctttctttttttgtcacacatacattataccaaattacatgtatttggattatccaaagctaacccacatagctaagaaacttataattgatgtctatgatgtaaaataaataaaacatggaaacatttttgccgtaaatgtagagagtatgactagtaggaacataaaagttcgtagtgaaattgatatttttagggaagtggtaaagaaatacagtactcttttgcatagacatgatattgacatgcagatgtaaaacgcatgtaaattcctctctattattatgtttcatacgtacataaaacataccatccaactagataaacatgggaataaattgcaattttcattttcctctcgcaattttgtgactatcttataaaaactaaaaaaaattctcgtgacatctcaagtttatctcatgtcttagaggactaaaaacttttatccatcaccgaataaatataaatttaacaaaatgattattcatattagctttcttaaactagtgggaaaataggagataacttgtacgcgaagtatcacaactcgttctctggttatgccaagtggatattagatggggcaaatgtcgccttacgacactcaacaaatcaaactttgccacgtcacaccatcgtacagtgcagttgagttgtttttattttcggcaccgttattaaacccaacagaatttttgtaacttacaatgggtaaacccgtcatttgcacccgtctcgagaaagtatccattaaaaacttgaaagaaacgcgctttccacgacggtatgtgttaatccttacttaaatgacaataatagccctgtctctctctgctaatcatttcagttattagactttcatcatttaaatcacaataattgttccacgtacctaaagaaagatccgacttgtgtatcttaaataggaaataaaacatcgtatactacgtatcaaaaacattcacgcttcacattaaatgctaactaaaattacaaaagggataaaatcacaattgaatcctaaactccaagttgtaaggataattaagtaaaataaaacaaggcacgtgccagtcaaatgacggttataaccctatcacgtggtagtcaactcgctttacagatattccgagagtgaggtcccacaaagtcacttgccattaccctctctgtattagttagtcgtagtagtctagtagtagttggtagcgcgtcaacttcactttctaactgtaagcgcgtgaagaacgaaaccttttccccaccaccaccaccaccacctctctatactacttcttcttcttcttcttccttctacaaatacatgacagtctctttccctcgtcttctagtatttttttgttttctgttatttttcgcctgagactgggtccctgagatttcacaaaactcgttattgaaacttaacaaaacagcaacctccgttattaaagttcccttctcgatttccgtgaaaatttcactttagccatg

SEQ ID NO: 28657 - DNA, 3003 bp, Unknown
  misc_feature (1)..( 3003): 2750-1469P.txt file - cDNA_ID_2998053; gDNA_ID_2926240; Annot_ID_142847
tcgattcttaactaatgtttcccttaatcaattgaatttgatgggtggacggaaaaaaaaactgtatttcatttgtagtataatatgtggggaaattagtgaagaaaagaacatagaatcaatattggcattttctttcaaaaatggggcaataagaaaagaactattaattagaactgagacgatcacacacataaagaatcgcattcttgctttgccgtgagaaagtttgaaatgaaaataaattgtgatactttgcctgtgtacatacataaagagtcttgggcattgcatatacttactatagcttcagccaattgttgtgacagctaaacattaaatcttttcacacaaaaaaaaaaaaaaaagggaaagacttgtaagccttgaatctgtaacccatgcatcatcttgaccacactccttccgatcgtctcttatgcccagtagaacgaattcaaaaagataaagatggcaaagtgacaacaattagtgggggaatccattacataatcaaaagttcctatttcatttctaacgctgaagacgaaaagcctgttcatctcctctccttgattcttcgcaaccgaaaagaagacaaggtactatcttttactttttgctatgtttgtcagatagcactattaggtgaagcctattacgtttacttctgcagctattgccccaattactaccacaaagaatgtgttgagtctccttccgtgtttcattcctctgatcatccaaaacatcctcttcaacttctctggattcccgacatgtctttagaagaagaacgtgataaacgatgttgttcttgtaaacgtggcgtagacgcactattttactattgctctatttgcgattttgcagtccatatggcatgtgcgggaaatccaacatccccaaccattgacaatccaaaaaggcataagcatacccttcattactttcccaggaaatccggtctgttttgcgatgtttgtgcgttggtggacgattctgattacttatatgtatgtctcctatgtgatttcattgtccataaacgatgtgtctacttaccatatgtcataaaggtgtctcgtcacaatcatcgtctcacttttactcccaatcttccttacgaagaaccaacggtgacggattgtggagtttgtcatgcaaagataaacgaaaattacggagaatactcttgcactaagaagggatgcgtttatgcagtgcattccagatgtgctatgcaaagtgatgtgtgtgacgggaaaaaacttgaaggagagcctgaagaagtatatgaagacactaaaatgtttgaggagaaaggcgatgggattatacagcatcagagtcatccacgtcaccaattgagacttgaaaaaatattccacgatgaaagccatcattgtcaagcgtgcagacgtccttcttatgatcatggtggtaatgtgtatcgatgtatgcaatgtgatgatttcatttttcatgaatcgtgtgcatatcttcctcgtactaaacaatttatgctacatgttcatccattgactctagatcccagttacaatttcatagattggttccaatgtgggaaatgttatcgttactcttgcggtttccggtgcatgtgttcgtgtgccgtgtgacttttttccggtgttggacacactttgtgcttctatatgtgagccgtttgatcatcactctcatccacattccttgttcattactagtggtgaacacgaaagcaaaatctgttccatctgtcaatcatcggagccacaacctttaaattgtttgaaatgcgattttgttttgtgcttttattgtgccactcttcctcataaagcaaggtacaaacatgatgagcatttcctcactttttcttatgaagaagatgcaaatgatgagctttatggttgtgaaatatgcgaggaagatataaatccaaagaatgggttatatgcatgcaacgagtgcggagtcacactccacatcgaatgtttactagggagagatccgaatacgacgcctggatcattttcaaattcggtaggaacgttgtatattcttcccaacacttattcaactcgacctatatgcacaacatgcagaagacgttgtccgtaccaaataaagataaattcatcgggcggtccctatatattctgctcttttgattgctatcaaagattgtgtcgtagcgaagactggtcctaatgcttgggaggcctaaagcaaatcactaaatatgtggtcttctcgtaaaagaatttgtatatgtatttgttttttttacttatatattttgagctgtatcaaggatggtgtcagaatcattcatgtgattattttaaggttttcttgatttagacatcaaatatttctagaaatttcgagcgtgtttcgcaagttcaagacataaactcatgtttttagttgtttatagaacgatgattatatatattcgtaaatttcttgggggataagacacgtaaagaccaacacaacttaattagatgagtcaacaatcatcgtgcataactccaaatttctactttttcacttatttgaccgtcatcgatattttatttcattagtaaaaacacaggaagattactcaaaagtcttgaagtctttgatcgttaaaaatgaacatgtgcaaggagacacacaaaaattccaaatcaattatataattgcaacttgcaaagatcgaagcgatttcttcttatatacgagttattatatgtataaaaatgataagacatagtaaatgacagacgcaaaaacattgaccaaaagttgtaaaaatgatatagaaagacgtcaacaccaacaaaaaaatgatatagagagaaacgttcgtttacacgcgtttttgtctatataaagtatacatttatacatccctggaaatttttcagattttcaaaaatcagattcaaaggaaacagaacacaaagttttgtggggtttgaccaaagagagtcaacgaagaagatg

SEQ ID NO: 28658 - DNA, 3003 bp, Unknown
  misc_feature (1)..( 3003): 2750-1469P.txt file - cDNA_ID_2998057; gDNA_ID_2926240; Annot_ID_142848
acacctttggccgaacgtatcagttttctcaccgagtaatttattcttctttgttttcttcttttaccatttatttgctttctatctaaaataacgttattagttcatttacaaacatatattttgattttcttcttaaacaggcaaattgctttccataccggtccaacaggtgatcatttagatttcgttgactttatatttgttgccatgtgaatcgaaccgggttattcgcagcacaaaaccgaattcttaaattaaatcaacgcattatttttgtggtttaatctaggtgtcttttatagtgcattgatctttgataacttgacatgcaagctatatacatgaaggaaattggatttttgattctgtgaaagtgtttgcattttctctcacttatgaaaattaatgaaaataattgaatgaatgaatgaagttggaggattaatgaacgccacatgtggaaacgcaacggagatgataatagcgattctagcggttgggcaaaggaagatgagaatagtgaaactctcacttcttggctctattctctccaatcttctcttcgtcttaggcacttctctattccttggtggcatctctaatctccgcaaacaccaatctttcgacccagtacgttattgtctcctctcaatcaacattcaagatatatgtatcatatcttatagattgacaacaacgtacaacaaaaaaatcaaaatgtgtatcgatcatctaatcatgtgtgtaattctgcaagaacagagacagggagatatgaacagcatgttgttgtatctggcgctgttatgtcagacactaccaatgataatgagattcacaatggaggctgaagaatacgatgggtcagatgtagttgtgttgtcaagagcaagcagcttcgtgatgctcattgcttacttggcttttctcatctttcacctcttctcttctcatctctctcctcctcctcctcctcttcctcaggttctctctcactctctcttataccatactcttcacgatatgaatcatcttgtgctgcttcttatctatgtgtgcttcggttaaatgtataaaagagggaggacgtgcatgacgatgacgtgagtgacaaggaagaagaaggagccgtgattggaatgtggagtgcgattttttggcttattataatgacacttctcgttgctttgctctcagactaccttgtctccactatccaggtgtgtgttgactagagctttttggaaaaatatgttatcaaaaatataatattttcttcaaaacgtataaaaaatatgaaatggacaggacgcagcagactcgtggggattatcagtgggattcataggaataatattattaccaattgttggtaatgcagctgagcatgctggtgctgtcatcttcgccttccgtaacaaactcgtatgttttacttcttctttttttccctagttaattacaacaaataaataacatcaccatattaatcctggttttgaacaaaatatgaaaatgtacaggatataactcttggaattgctcttggatctgcaacacaaattgctttgttcgtggtaagcataatattagtattgatttctgtaaaattagggaaaacaaatatttcttataatatattcctcttagtttataagcttggctcaattatcaagtttaggtgtaaacttaaatatatggagaatatctttcttacaacctggtgctaactgagaaaatatttcattatggttcagttttcttacaacaatataattttgacaaactcaaatttgaatgtaggtaccagtgacagtgttagtggcatggacaatgggaatagaaatggaccttaacttcaaccttcttgagaccgcttgttttgccttgtccattcttgttacttccttagtattacaggtgccatttcactcattacattatttattgaatcttgaggttgtgttagttttattaatatatatgttattatatgattaataggatgggacttcgaactatatgaaaggcttggttctcctcttgtgttatgttgtcatagcggcctgcttctttgtctctaactcaccctcaagtaagcttctcttttgattatgatgactgttttctacgatgaataaatacactatgatattcatttgctttgtatttctccaattgcagccgaaaccaatacaactaatcatacaataacgaaaaggtaagttatgtttaagggtatcaattagtgcaccatagtaaacaaaaatgtaacattttaagaaatctatcaaatatattgatgaatgttagttttaactgtcaactggcaatcatgataatcatagaaacctaacttctagaaagttaaatcatttttagattctcggactacattatatattatgatatatggttcttgtttattttttttaattgcaggtaactcgaatattgttttgtctttcttttagtgtattgttgttttctttgattacatatttagtttttgaattattgtgtaagtatatatatttttaagaatttgttttttacatcattttttataaggaatatgtaaattaaacgtaatagataattctaacataatcaaaccttgttcatacatgtcagaactgcatgtctatataggaatacaattaaattaaaactaaaaatataaatgccttctcatggaattttttgattcgtatcagaagatatttggcaggaatttattttcttagtgattaaaaaacaaaaaacaaatgttcgaagtatcggagaaggcccaactgagcccactagtttaaattgtactttgtgattcccttgggccttgtggatcccattaagtactaactgttatttacaagaatgccatcatcggaggccatttataaattttggactcaattttgttgcaaataaaaatctgaaattctcaggcgagattccggaagcaaaacattcctaaatttcgccaagtgatccgccatg

SEQ ID NO: 28659 - DNA, 3003 bp, Unknown; identical to SEQ ID NO: 28658
  misc_feature (1)..( 3003): 2750-1469P.txt file - cDNA_ID_2998057; gDNA_ID_2926240; Annot_ID_204038

SEQ ID NO: 28660 - DNA, 3003 bp, Unknown
  misc_feature (1)..( 3003): 2750-1469P.txt file - cDNA_ID_2998060; gDNA_ID_2926240; Annot_ID_142849
tattttcttagtgattaaaaaacaaaaaacaaatgttcgaagtatcggagaaggcccaactgagcccactagtttaaattgtactttgtgattcccttgggccttgtggatcccattaagtactaactgttatttacaagaatgccatcatcggaggccatttataaattttggactcaattttgttgcaaataaaaatctgaaattctcaggcgagattccggaagcaaaacattcctaaatttcgccaagtgatccgccatgggagaagagaagtctctgcttcagttccgtagttttccttcactcaagacctctgatttcgctctcaccgaagaaccttcatggaggctggagaacaacgtgtcgtcgaatcgccggagaggaaacaagagaagcggtggcgtttttaccaattttgcgtccctttccgtagcgattaggagagatcggagagaatctacatttaacggtcgtaatggcggcggaggcggagcgttcgcatcggtttcggtggtgattccgaaggaagaggatgaattcgcgcctacctcggcccagctgttgaaaaaccccattgctttactgtcgatagtaccgaaagacgccgcactattcttcgccggagcgttcgccggagccgccgcaaagtcagtgacggcaccgcttgaccgaataaagctcctaatgcaggtaagggctctctctcctctccttctcaacaacttttaaggttttctggcacgtgtgttttctccattttaaaaagtaaaataaaaataaaactggtgactggtgagcacaacgaatacgctgtcgtttcggctagttgttgcttgtgggacattgttgattttcctcttcttttttcttttcctaagagactcttccatgacatggtctatgataaaattgatcatgtatttatatctcattatttcaagccaagaaccttgaggggaatctatggagtatttgtgattgtgttcttgttacaggcttgtagtaatgtacattgattcttaaatgatgtcttattaattcatagacacatggtgttcgagctgggcaacaaagtgctaagaaggctattggtttcattgaggtatatatactctcaatcgtgtaatttttaagaggattagttagttgttcttattgtaaaagtcttgttgatttggttttgtttgggatgactacaggccattactcttatcggaaaggaagaaggtattaaaggttattggaaaggaaatctacctcaggtacgtcacacaatttcttgcatccttttggaaagaatggtgttgaattttgtagagtttgattgcacataatcttagtctgaatgttccaggtgataaggattgtaccttatagcgcagtccagttgtttgcatatgaaacatacaaggtatataatctttctatatctgattctggtttcgtttcgaaagtttttgaaaccgtgtctaatcagtaatcactttgttctgtacattctgccttttttatgttgtttagaaactcttcagggggaaagacggtcaattgtcagtcctcggaaggctcggtgctggtgcttgtgctggcatgacgtctactctggtaagtaacgttgtttataggcctgagtgagtttgtctaatcgtaaagtaacttaagactcttactacttaatgcagattacataccctttagatgtgctgagattgaggttagctgttgaaccaggttatcgaaccatgtcccaggtatattcatcgcattatacaccaactttctcttccataaattaatcaggttttaaagcagacatgtcatatctaggttgccttgaacatgctgcgggaggaaggagttgcatcattctacaacggtctaggtccttcgcttttaagtatagctccttacattgccatcaacttctgcgtctttgatctgtaagtctactaacagttcaaacattacccctgaatatttttaactagattgtttacatattcgataatacaatatatgcacagggtaaagaaatctctgccagagaagtatcaacaaaagacacaatcatctttgttaacagcagtagtagctgctgctattgctaccggtacttgctatccattggataccattagaaggcagatgcaattgaagggtactccatataaatcggtattagacgctttctcaggtaggaacaaaaacatcattatctgcttttattcttccagtttccggtgactgaccttattaaacccttaaaccgttgtgcaggtatcattgcgcgtgaaggagttgttggcttgtaccgtggctttgtccccaatgcactcaaaagcatgccaaacagcaggtagttatagttttgataaaacaagttcatttttttcatttttcttgtttcagtattaacattttggaatcctctttttgtattgtttcagtattaagcttacaacattcgacatcgtcaagaaactcatagcagcgagtgagaaggagatccaaagaatcgcggatgataaccgcaagaaagcaagtcctaacacaatcgatgaacaaacctgaagacgcaattttggatttccacaaggtcatttttgcccgttatcttatgacctttgtttgtgtgttttgtaatttggaatgtaataagttgtatgttctcctcataattcaaaatgtgcttgaattgaatcctgaagccagagagggtaataaatggctgtttgtgttacgtttggtcgcgctggttttgtataaaccgaatttaaccgggttgctacactcgaaattatatcgttttctggaattgggtcatctatctatttcgcggttgcagagagaagttgtcgacgacggtgtcttttgtatcctcctcctccagaccaacaaactcagaaccctaagccctaactccgtaaaatcattttcgtcgccatgtactgtactttgcgatttcctttgcctcttcacattccccaaactcgaacaatg

SEQ ID NO: 28661 - DNA, 3003 bp, Unknown
  misc_feature (1)..( 3003): 2750-1469P.txt file - cDNA_ID_2998064; gDNA_ID_2926240; Annot_ID_142857
aaagttaaaccaaatctagataatttttccctctgattttgaatttttctgacggtttggggatattagcgcagaattggagctaggttagtggattgttcattgtccggtgtcggagatgagagatcagtcgaggaatttcgaaatggtaatttcatggggagatgaattgatccatgttttggatgataggaaaggatttgacgtgttggtacaaactctcgagcaactgagagctattccattctcctgcgacgaagattttaaagagatacatgaatctctccaaggttgaatgccttcttaaattgggttgatgtgtgtttgattaagtggtgaatttaattttgttgcgcagatttgcagaagaaactcgatgtttgcaaggagaagacagatgaggcaaattcagagattgcggatgaagaagaaattgagcgtcttcagaaagagcttgatgaagagctagaactagagtgcaagctgaaggaggagcttagatacgtatttcactgaactgagcttaaacatctcgtccgttgattcaatgtcatgactaattttggtttttgtcgacacattcatagctgatgaactcaaagacctgaattctcaggaggcattatttgaagagcacagattagctataaagaggaacaagcgggaccagttgagaaccgagtaagattttgacgaatccgctttttagtcttttttgggcttcatatttccgtctttatgttgtttgaatgttcatatttacttgttagatttaacaagtagtgattttgcttatgctctattttttgttctttgcaggacaaagcttcctatgtatgcttctgtcactcgagttataccaaacattgatgattcattgaagacctcaggctgtatccttttgctttaaacaaatttctatctactttgtgaactttctaaatttaaatctcgttcaaccttgtcctaagggtttttaatccttaatacgacagatatggttggtcgagacaaaaggctaatggacaagttcgaattcgattcaaacaagagtacttctgtctacgagacatgtaatggtatttgggatattataaacaggcaatagacagccttaacaaccaaaccgcctttgtttatgattcgttagatgtaaaaagcttcatggcctctgtactatgaacaatatctgatgttatgagttccttttttgttcttgttgaatacctctctgtaggtatcagtgcttaactttttttttttttttatctactgtaacctttagcctccaaaatcttcagaaacatatctaaatattggatgttgaaaaagaatgcatcttatatttatctatttgtgcagattgttgcaaatccagtcttaacgtgtagaacgaattggagaggagcaaattctgactggtaagcagtttctgatttcccatacatttcagtgcattgaattatcttaggaattctaaggataattcctaaggatttttgattcaaatcttagtgattggaatagcaaacttggggactgttacttagcttctccactgaactattggacctgcttagtgtctccaccgaactgttgaggatcctgcacgcttctggtacttggttacttccataagcattgcatacatacatgacaaagttctggtagttctgttcaccaaagacatataaatgaaaagttttctttctcctttgatcttgaaagttattagcttaatttataggactaacctcttgaagtggtaggttattcacaaccacccatggtacaaatctatgtgctggataaagttcagaagtttcttcagcatacctctgttcaagctgcacattgtcacatagatgtcattttttcttgcttattatatgtttagctttcctgttgtggctgtataagttaactaatgttctctcctctgagcaggatttacctggtttccgtatccgttaatgtaacaatcaaccgctgctctgctcaatccaaccatttctaaacaatcagcccatttttcaagtttgttctccaagactagctgttccgtacagtagatgtatccaaaatgcttcatctgcaagtgacataggcagagcacatataattcacattaacagtcaaagcctctatatggtaatcttactgcataaatccaagaagattttggtagcttttaccgtttaagagacttaccacatcagggtatgcgtttattgcacaggcatgaattgcgttgagcgcacactcagcttctccgtgctgaaaacaaagcaacagtcaaatgctatgtcctaattctatgatgtacaatgcaagtgagacatagcaagaagagtccaagacctggcagagaatggttccatctggtctgatagcggcgttgccccatggaacgagctggagatcaatggatgagattaagccggtttcgaagatcttaggcaagcggttgacgatgaattctgcacagaaggggcatagagcttcgtagtataaacttagtgtaactttctggcttgaagacagagataagaggcagaagaagattgtgcaacttgtgatgcaaagcctctgatatgatgccattggtggaaacaagaagaagaggaagattgcagagaattgtttttgactcttgctttattcttgtgtctcattaaacaaggaaagtaagacataaaactgtttcttattactttcagtgattcgttgatgctttattattgtttaaaggcatcttgggcgttttggcgttgaaacaattgttgcggcgttgtttgatttaactgaaaacggcacgtagttagttttcggaatatcaaaacgacatgatgtttaatcgctgggttgggtcagtcacacttcgtcttccacatctaatccacctgagcttactgagtcggaacaacatcagccaataaagccctgaaccctaattttcttttggctttggctggagaacgactgtatgtgtgttcaacaatg

SEQ ID NO: 28662 - DNA, 3000 bp, Unknown
  misc_feature (1)..( 3000): 2750-1469P.txt file - cDNA_ID_2998068; gDNA_ID_2926240; Annot_ID_142858
ttttttaataaatccttttgtttctttcttttaaaaaatttcacacttctccttttttcttctttttaattcagttttttgcaaagaaaaatggatggattcttttgggcatgtgagatcaaacacgcttcaattgcgagtgtgatttattctcaaatctgactattataaatgctgttaagccaaaagtagagtaataatgttccatattttaggcttatcataatcaattcttttaacttatgtacaaaaacttttttaaacacctttagttacctctttaaatgtacatcaaaatgattatcatctcatgcttctactttttttggtgtgagtgtcaaattcattttgaatatatgagagaacataaattaacccaagtaaaaaattgtaagaccaaatcattgagcacacgaatagtagttctttacaattggaaaaaaaaaagaacaaagtagaattgctccggccatattgaagttatgatcagatttataaataagttgatgtatactcacagtaggaggctttaaatcaaaaccaaaacgtaaatggaaaagcttgaaactttggaaccagacagaacacagacaggtgttagaatttatcgactcggagaccatttctttgaacctcataagcatctctgcttctgctcttcttcattcctgcagtgaaatagacctttgatgcatctgtagatatgcttgtcacttttacccatatcattacttttgtcttgattccttccacatctgttagctttcctttctcaagatgtcctgttactgttgttgtgaacttcaacactgatgaatccttgtatccaacttcgcatatcgatgggatcaaaacggttagtttctttgtctcttcatcgaactcgtagtttgtagcatctcccgggaagattccaatcggcaaatcatattcttttagtaactcaggcaacggcttctgcattttccctgtcaacatgatgacaaatggggaatttcaaaaaaacaaaaaattgaaagatgcagtcagaagaagaataaaaaaaagcaaacctttgattttgttgaccaaccattttgttcctccttcaatgctcgttgacaccgactggcataaacaaaaacattgttttatatgttagaaaagatcacagtttcaaacaaaataatctaaccacatgagcaagaagagaagacattataggatcatatatttgaatcatttcttaagatatcatggttttggtaattagatgttcttccttatgtgacgtgatttacctaacaatgaactcaaaacattcgtacaactgcatgataccaaaattacgataaaggtggttgattatatcggaaccacgtcaatagatcaaaatcgattaggaaaacagatgaatcagattctataggatgggtcaaaaaaagacgtacgttgagatcgttgccgacggagtcaaactgcttgttagccttttggcctaaccagtaggatccaaccttgttgaagatctgatccatattctctcgagaaaggatagagaagattttgagaaaacgaaggacgactttctttctttttcttccgggaaagaattttgggaacccaccactctcgcaccgttggattcgttatttgtgcactattcctgcagccaattaacttatgacatgtggcaaatacataaacaccaatatatttattgaagcaagcaggcagcattatactgtacaaattacaaaaaaaagtacttgcctatcactcctccttgggactgactatctatctattgggccttcaatgaaaatcagattaaataggtgcaacacaacttgggaactgaagaaccacatggcacaaaacagagtaaaattaaagactacaatcaatcctttttttttgccattcctcccatgattttacttgtctattagacgaacctcagctaaatttgtaattacagtcgaaaatattattaagctctttaacacttttatagcctacccttgtctttgtgcattccagagtaatacgaatcgattcaaatcaagccaataaaataaaaccaagcctaactacactttatttaatgcttaatttttgtccttgccaacattacaactttttagaaaaaccatttgatatgattttttaacttgggccgtgacattactaatgaggcccacaatgtacttactccgacgtgtaattgtctccgataaagacaaggaaccatttggaacctctcacgcgctttagctggaaattacgtggagttgagctactcgcgactctatcctatgtataattgtatatcagttttccgtctccatcaaatatcctagagagccacgaatttttccttctttgttgtaaattatgaatattaggccacataatacggaaagtcttaaagggtttggaccattctcaatcttatgttctagtagcttgatgattttttataaaaacaatatggaaatacttttatctctatccgatttcctatgtcaatatgtgtcacaggattttacacgtctaacttatgttggaaacgctatcatcttttctttttttttttttatagtaaacaattgtatttgttatcatctacaactctaaaaaatacatttcgaaaaataggagagagcgagtaggaaataagaaagtggcaacgcgagagtaggaaccggaaatggtaaaaagattctgaggataaaagagaaagcagagaaacagacaaactttatttggagagatgttaacgtggatcgaatatcctcacgttcacactatcccattggatgtagcacgaggccgccacacgcccctacatctggctttcatatccaccctccacgtggatctcaatccaacggtgaccacacgccttttccctcttatataaacccttcctccttcctctttcttatcatcatcaccatctcttacaacaaatctcaggcggctcaacactatcctcttctacattttccaacgatg

SEQ ID NO: 28663 - DNA, 3000 bp, Unknown; identical to SEQ ID NO: 28662
  misc_feature (1)..( 3000): 2750-1469P.txt file - cDNA_ID_2998068; gDNA_ID_2926240; Annot_ID_204050

SEQ ID NO: 28664 - DNA, 3003 bp, Unknown
  misc_feature (1)..( 3003): 2750-1469P.txt file - cDNA_ID_2998072; gDNA_ID_2926240; Annot_ID_142860
tcagaatctttttaccatttccggttcctactctcgcgttgccactttcttatttcctactcgctctctcctatttttcgaaatgtattttttagagttgtagatgataacaaatacaattgtttactataaaaaaaaaaaaagaaaagatgatagcgtttccaacataagttagacgtgtaaaatcctgtgacacatattgacataggaaatcggatagagataaaagtatttccatattgtttttataaaaaatcatcaagctactagaacataagattgagaatggtccaaaccctttaagactttccgtattatgtggcctaatattcataatttacaacaaagaaggaaaaattcgtggctctctaggatatttgatggagacggaaaactgatatacaattatacataggatagagtcgcgagtagctcaactccacgtaatttccagctaaagcgcgtgagaggttccaaatggttccttgtctttatcggagacaattacacgtcggagtaagtacattgtgggcctcattagtaatgtcacggcccaagttaaaaaatcatatcaaatggtttttctaaaaagttgtaatgttggcaaggacaaaaattaagcattaaataaagtgtagttaggcttggttttattttattggcttgatttgaatcgattcgtattactctggaatgcacaaagacaagggtaggctataaaagtgttaaagagcttaataatattttcgactgtaattacaaatttagctgaggttcgtctaatagacaagtaaaatcatgggaggaatggcaaaaaaaaaggattgattgtagtctttaattttactctgttttgtgccatgtggttcttcagttcccaagttgtgttgcacctatttaatctgattttcattgaaggcccaatagatagatagtcagtcccaaggaggagtgataggcaagtacttttttttgtaatttgtacagtataatgctgcctgcttgcttcaataaatatattggtgtttatgtatttgccacatgtcataagttaattggctgcaggaatagtgcacaaataacgaatccaacggtgcgagagtggtgggttcccaaaattctttcccggaagaaaaagaaagaaagtcgtccttcgttttctcaaaatcttctctatcctttctcgagagaatatggatcagatcttcaacaaggttggatcctactggttaggccaaaaggctaacaagcagtttgactccgtcggcaacgatctcaacgtacgtctttttttgacccatcctatagaatctgattcatctgttttcctaatcgattttgatctattgacgtggttccgatataatcaaccacctttatcgtaattttggtatcatgcagttgtacgaatgttttgagttcattgttaggtaaatcacgtcacataaggaagaacatctaattaccaaaaccatgatatcttaagaaatgattcaaatatatgatcctataatgtcttctcttcttgctcatgtggttagattattttgtttgaaactgtgatcttttctaacatataaaacaatgtttttgtttatgccagtcggtgtcaacgagcattgaaggaggaacaaaatggttggtcaacaaaatcaaaggtttgcttttttttattcttcttctgactgcatctttcaattttttgtttttttgaaattccccatttgtcatcatgttgacagggaaaatgcagaagccgttgcctgagttactaaaagaatatgatttgccgattggaatcttcccgggagatgctacaaactacgagttcgatgaagagacaaagaaactaaccgttttgatcccatcgatatgcgaagttggatacaaggattcatcagtgttgaagttcacaacaacagtaacaggacatcttgagaaaggaaagctaacagatgtggaaggaatcaagacaaaagtaatgatatgggtaaaagtgacaagcatatctacagatgcatcaaaggtctatttcactgcaggaatgaagaagagcagaagcagagatgcttatgaggttcaaagaaatggtctccgagtcgataaattctaacacctgtctgtgttctgtctggttccaaagtttcaagcttttccatttacgttttggttttgatttaaagcctcctactgtgagtatacatcaacttatttataaatctgatcataacttcaatatggccggagcaattctactttgttcttttttttttccaattgtaaagaactactattcgtgtgctcaatgatttggtcttacaattttttacttgggttaatttatgttctctcatatattcaaaatgaatttgacactcacaccaaaaaaagtagaagcatgagatgataatcattttgatgtacatttaaagaggtaactaaaggtgtttaaaaaagtttttgtacataagttaaaagaattgattatgataagcctaaaatatggaacattattactctacttttggcttaacagcatttataatagtcagatttgagaataaatcacactcgcaattgaagcgtgtttgatctcacatgcccaaaagaatccatccatttttctttgcaaaaaactgaattaaaaagaagaaaaaaggagaagtgtgaaattttttaaaagaaagaaacaaaaggatttattaaaaaaaaaaaaaaagagatgaagacagctcgagggatgcaatagagccaagaggaggagaaagatgggatctggtaaacaaaacacgtcaaagtcaaattacaaatttatattttataaaacagataacaacaacaaattaaacttttattaatctctctctgcctctactcactggatcatcatagctccaaacttgtaccagtcgcatcaaagcaagttttggtgaagaagaagagacgaggtcttcctcttactgtggtggtgacattttctctaaaaagaaagtctccgatatg

SEQ ID NO: 28665 - DNA, 3000 bp, Unknown
  misc_feature (1)..( 3000): 2750-1469P.txt file - cDNA_ID_2998076; gDNA_ID_2926240; Annot_ID_142861
tctctcgatttaacctctagttcgtttcgttctgttcgaattttgtttcgattcttcgttttctcctgagatttgccttgtgtgcgtctttatctcttaatcattttcttctccttattgaataacagcgattcgagtgttgttttcttcacatgcatgatatagaaaccctaagcaattttatctcgttgctccgttctattctagtggttcacatttccggagtcttctcttgacttatttgtacaatcttcgttggggttcttcttttttattttaccacgatttctaggccattcctggcccttgaatttctcattgctgaagtttgttttcaaaaacaatattggtctgctttgacgattgcttgtttatgttagtgatgtttaaatatttttgtcctgtaatgttgtttcttagatcattatctgattgcattgttcattgtggtaatttgcagtatgtgatgattgtcttgaaaggctcagtgcctatgtcatttggcgggaccgaggatcctgcagcttatggtgaattagtttctatcggtggccttaatgcggatgtgaacaagaagctaagcgctgctgtttccgccattcttgagactaagctatcggtgcccaagtctcgattcttcctcaagttttatgacaccaaggcaagcaattccctctctctgataacttttttgatgtagtgacataacatatgcaaatgtgttaatgatttcatatgcccgatatgcgtccatgtctcattttcattgttcgttgtctctctaggaccatcaaagtcaagaatatgcacaatgtttacacgctttacaccagcactactaggtcatgaatagggaacaaatacatcttatgtgtgtaagttcatcatcataagacggacctataacttttactcataaactaggcattataaacaattaaatcaaatgcataaaccgttccactactcgaattcaatctttacacccacactgttgagttatttaggagattcgttcaacttctctaaatccgttgtctaactggcttagagggtcatccatcatctggagtgtttatgcctataaccacctgatatatcaattatacatttcttttctcgtgtggttcttcttgcagggatccttctttggttggaacggggcgactctttaattccgtggtaggtgattagtgtgattgtcttgaaatgtatgatctactctcatcgatcaagtaactttgaactacttcgtattgtaaacatatctaaggtttgatggagttgcattaagaaataacatttatgctatatatgatgctacaacttactatcagggtaaacaatggttatttagtctttgtctactcgttagatataattatgtttagaattcgaagatgaatgttatcaaagaaaaaaggatttgacattgtcaagtctactactccatatgacagatcaacattgtgttaaaaatattttctattagggaaacttcctgtgactggaacattaatggtcaaatgcactttgcctaagtaatcaagaattattgtataaactacgttaagcaaaaaaataacctgagttataatatcaggaggttatttttatttttattttagcaaatgaatatagattagctatcagatgaagcaaggtgtataatcaaagttgaaagacgcgtaattgtgatcctatatatacataacactaccgcaacttcagcaacctctaaatcattcgtctcctaaaattttccaatctcaaaatcccaaaagaacaaaatcgaatggtgtcaacaaatccccctgttcttccaatttccaccaccgcaacagacaccaccaatcagcctccgattgtaaccgctgtggtggaatcgcaacctccagtcgtccgtgcatttgtcaacggtgtgaccgagacggtctgtggtggtctatctcgtagccgtccgtggtcagagctcctcgatcgatccgctttcacaaagcctgactctctctccgaggccgggacgcgattccggaaaaattcctcttatttcagggtgaattacgtttgcattgtcgctctgatccttggtttctctcttctcgcccacccattctctctcatcctcctcctatgtctcgccgcttcctggctcttcctctacctcttccgtccatcagatcgtcctcttatcctcttcggccgatctttctccgaatacgaaactctcggtggcctaatcctctccacgatcgcagtgatcttcttcacaagcgtcggatctgtattgatatccgctctcatgatcggaatagcaacaatctgtgtccatggcgcctttagagctcccgatgatctcttcctcgacgaacaagatcatgccgcctccggattcctctcattcatcggtgttcccgcgatcccctctgtagcaccctctgcctcctcagcggcttcccccgtgtaaattatagttctcagaatctggcgtgtttagagatttgaaggtggagattgttgcaatgtaattttctgtgatacttgaccattgttgcaatgtaattttcattgaagtcagtcaccaatcacattgaacagatgttttaaaatgtccacgtaagcaattattgtttggaacgatttcgggttagcattcgtgccgttagttaccgcaataaaaggccgtggcaatatcacacttgtcttggaacgctatgtccgtaaaaaccaagcccaaagttaaaataaaaccacgcgtctcataatttcggcccaaatctttttcaactttcccgcctttgtcagaacttttaactttttggatttttggtgatgattttggtttggggaaagaaaataaaacaataaaaataaaaattccgcactcccgactcctccctcttggcgtggtaggcaattctgaatcgcgaggtttagttctccggctgaatcatataacgacgaatcggaaaacttggaaaccctagaactgaataaatg

SEQ ID NO: 28666 - DNA, 3000 bp, Unknown
  misc_feature (1)..( 3000): 2750-1469P.txt file - cDNA_ID_2998082; gDNA_ID_2926240; Annot_ID_142864
accctattttcataaaatcaaaaggggaattggcaaaactaaccaacaaaaagtttataattaagaaactaacattaaaaaaagaaaaaaatgatatcctctatattttgtatattaattccaagtttacccctctatctatttctctcatctctctttatgtgtacctctctcttccgttctctctcccttctctctttctctctctccccctctctctttctctctctttctttttccctccccctctctttctccccagtaaagtcctcacacctacatcgttacttgtttttgttttcaaatcagagtctcttaattacttttgggtgagatttgatttgggggtttcgaattacagagagaggaacacaatttggattcagggaatcgactttcgttgttgcgcttggtgtcttggttatgaaattgagttttgttgttgcaagttgagagatactattctatttgtaaatatactatttacgtataccttgttttatatacgttttaaaatgaattatttgttttgattaaggatgttaagtgatttaattattggtttagatttaaacccttgggttccctatatattatcccttagggtttaatatctttccataaaaaaatattgtgtatctatacagaacgttatgttattcattgacaacactattcacatctaaattattttgtgtctgttttaaaaaatttaagtcatgatatatgtagaaaactatacaactttttaattgatatatcatgaacttgaattaattttttaaagattagataatatgaattacaattgggaaggggtaaagaaaaaagaaagagaaaaaggaacttctctcataccacctgatttcttttctcacctcaacactaataataaagccacgtcaccacattttccttcctcgctgacaaacgtaacaccaggacagtgatgtcttttcacaccccttgaaggttatttattacatttacaaatttatggtgttagttagttaattatttagtgaaaaaatgttatatctgcaaatcacccaaatcaaaatactgtcataagaaaatgggatcaagaacattcattctctcaacccatttacgatcctacgtacttaggtaatacgtaccatggctataaaacaaatatttctatcacgcaaccacacttaagtacaaaactagcgattattataatgtctgtttctctttgtttagttgagcatttatataatgtttagtacaacttttactgtttggcttatgcaacattgcatgtccacatctaataaaatctaaaaagggtaaaagtataaaagaggaagatgtgtctcctttttcatttgtttgatagaagtattatagttttcacggtttacatttttccatttaagttagctactattagtaataagtcttaatgtctcacttcattagaaacaatcataataacttaatatctccctacatatatttcttcggagacaaacaatattttatcaacaaaagaaacaatattcttattaattagtttatgaccatgcctatatgctaaaaggtatattgaattgtgttattgtattcatgttttcattgcatgatttgacaacacatgattttttatagataatattatatttacttcttctttttcttttaatatgaccaattattgtttttcttcaaattcatcgaggaaattcattgttacgcgcattttatatgcaaaggataattttttcttaaaaatgataaattaatagatatatattttttaaaaatattttgcatcgatgtctatttttccgcagaaggaaatacttgtaaacagtttgactaatgtctaatttctttcaaaatttaccgtagaaaaagtaaaaaggagaaagttgtatattagaaagcagaagaaattgaaaaaaaagaagaagaagaaggtatatttaaaatttgcagcttaaaaggctctaaaaattccgtcgctcagtttccgtcgctcctccggctttgtcatcgtcttttgcattgccatcagtcatgatggcctaagcttcttctccctctctctctctttctctctgagacctcgtcttcttcgatttttcaccgctctcactcaacttctctgttgatcaagctccgattccagtttaagtgagcatttaggtttcagtcgttgccttttgcttattttcctagggttttgtcatcgcatggttcttatcgtgtttcgatttcacgaggagttgagatgtaaggttggaatttcgttgtttactgatttggaaactctgctctgcgcttttgtttcagaattatctgtttgttgatttcgctcctggttgggtttttgtgtgttaagttatatggccttgttcgttagctgactgaaaattgtatacatttgtgtttcgtatttcatcatgtgaatttcttcgtgattttgtaatttcacatcaatggctgcctcataagctacctcttgagtgtcttaataatgcacaccatgtgtttgaaggttttcatccttctgttgtctagttagtaaaaccgtacgaaaaatctggagactgtgtctgtcttgattacatgcttgagcaataagacccgtttcaatcattggaaggactggatttgttgttacactgtaaatcctttgatattctttccttttacccaatcaatgtcaggatggctcaaaggaggggaaagttttccttcagaaacctgacgaaaagtcaactaggtggtgttgtctttggctgcactaagaataccatcaaagaatgtatgtcgaaacagttgtttggtgagtcttcttgaatagcttattcttttcccatgcttgtttttgcttctgctgaatgtagctgtttgtttgctgtctactttgattctttgcttgctcattgtcgtatgctgttgcatttttttgtttctaaactctatttcgcaatgtttgtatgtatatgcttcttgaatccgctgatg

SEQ ID NO: 28667 - DNA, 3003 bp, Unknown
  misc_feature (1)..( 3003): 2750-1469P.txt file - cDNA_ID_2998086; gDNA_ID_2926240; Annot_ID_142865
gatcaacagagaagttgagtgagagcggtgaaaaatcgaagaagacgaggtctcagagagaaagagagagagagggagaagaagcttaggccatcatgactgatggcaatgcaaaagacgatgacaaagccggaggagcgacggaaactgagcgacggaatttttagagccttttaagctgcaaattttaaatataccttcttcttcttcttttttttcaatttcttctgctttctaatatacaactttctcctttttactttttctacggtaaattttgaaagaaattagacattagtcaaactgtttacaagtatttccttctgcggaaaaatagacatcgatgcaaaatatttttaaaaaatatatatctattaatttatcatttttaagaaaaaattatcctttgcatataaaatgcgcgtaacaatgaatttcctcgatgaatttgaagaaaaacaataattggtcatattaaaagaaaaagaagaagtaaatataatattatctataaaaaatcatgtgttgtcaaatcatgcaatgaaaacatgaatacaataacacaattcaatataccttttagcatataggcatggtcataaactaattaataagaatattgtttcttttgttgataaaatattgtttgtctccgaagaaatatatgtagggagatattaagttattatgattgtttctaatgaagtgagacattaagacttattactaatagtagctaacttaaatggaaaaatgtaaaccgtgaaaactataatacttctatcaaacaaatgaaaaaggagacacatcttcctcttttatacttttaccctttttagattttattagatgtggacatgcaatgttgcataagccaaacagtaaaagttgtactaaacattatataaatgctcaactaaacaaagagaaacagacattataataatcgctagttttgtacttaagtgtggttgcgtgatagaaatatttgttttatagccatggtacgtattacctaagtacgtaggatcgtaaatgggttgagagaatgaatgttcttgatcccattttcttatgacagtattttgatttgggtgatttgcagatataacattttttcactaaataattaactaactaacaccataaatttgtaaatgtaataaataaccttcaaggggtgtgaaaagacatcactgtcctggtgttacgtttgtcagcgaggaaggaaaatgtggtgacgtggctttattattagtgttgaggtgagaaaagaaatcaggtggtatgagagaagttcctttttctctttcttttttctttaccccttcccaattgtaattcatattatctaatctttaaaaaattaattcaagttcatgatatatcaattaaaaagttgtatagttttctacatatatcatgacttaaattttttaaaacagacacaaaataatttagatgtgaatagtgttgtcaatgaataacataacgttctgtatagatacacaatatttttttatggaaagatattaaaccctaagggataatatatagggaacccaagggtttaaatctaaaccaataattaaatcacttaacatccttaatcaaaacaaataattcattttaaaacgtatataaaacaaggtatacgtaaatagtatatttacaaatagaatagtatctctcaacttgcaacaacaaaactcaatttcataaccaagacaccaagcgcaacaacgaaagtcgattccctgaatccaaattgtgttcctctctctgtaattcgaaacccccaaatcaaatctcacccaaaagtaattaagagactctgatttgaaaacaaaaacaagtaacgatgtaggtgtgaggactttactggggagaaagagagggggagggaaaaagaaagagagagaaagagagagggggagagagagaaagagagaagggagagagaacggaagagagaggtacacataaagagagatgagagaaatagatagaggggtaaacttggaattaatatacaaaatatagaggatatcatttttttctttttttaatgttagtttcttaattataaactttttgttggttagttttgccaattccccttttgattttatgaaaatagggttttctcaataattaagttggtatcatgagtaaaaaatcatttcaagcataaacaatcttaaactcttaaattgtttacgactaaagctttttttgttttcgtaaacacatcagatttatcacaagatgcaaccaaaagatttgccaaatcctcaaaaaaaaaaatcgatcaaagcgtttgcgttttttcttttcttttattttttttaatgaaaaataatgaagaaaacaatttcatgcaataattacgttggaagcctttttgggctcgaaattcgaatgctttatctatgatgggattgcaagaattttttattaaaaaaaaaaagttatggcgtttcggttaaactcagaaactctaatcgagttagaaaactcacgatcgagttttggagctttggttaggattgaactacaccagttattgcaaactccgaaaagaaatcaaggtccgcataaccacgaaccaaacaagaccggaattaaatccccaaaagattaaatgttccaatttggaccggtccacagaaacacaaaaccaggaccggaccaagcaaataacaaaagataaaattggtcaacgaaaagtcagctataatctctgctctccacaacaaattaacaatgaagctagaggtgtgtgggagaatgggttggcacacacgggtcacagtttcacagacacgcggctcctcgatggttgtcttccgccgacagccgccgcgtgtatgtccttcccatacggaatctgccacgttgcgtttgtataatctgcctgactagggctttagcagtgtataagagacgagacgagacgcgattcaccggagagtcaaagaggcaaggaggagaaagccaatg

SEQ ID NO: 28668 - DNA, 3000 bp, Unknown
  misc_feature (1)..( 3000): 2750-1469P.txt file - cDNA_ID_2998102; gDNA_ID_2926241; Annot_ID_142879
ctgttgcctgcttctaccaagttttaaacgctcagataatcttgatttaagtttatatatatgtttcttgtcaaatatcagagggtatatatctacatgaaacaattttttttaatgtttcattaaataagtctatatgaaatgaaaatagcgttgataatttgaaagaaaaataaaaggaaaagttagaattttttgcttaatattgattagttttaatgctaatcatgattatttattcccatctgacttgatccaaaaaaccagaaatagattaccaagttgatatgaatatattttcaaaccgaccaagtttttcttttgtgtggaaattttatttacgaaatttatatttttcatttatagtatatattcatgaattgctttttacgaatttagtgacaaccaattcgaaacctaaaagaaaataaaaaattaaacggttgtaatatttggagtcgatatgttttcatttggatttatattgtaatatctggagtatatgtttttcgtttggatttttgttgtatttactttcttactttttggcttattcaagacatgcgattgtgttagtctttactctttatatacttagtgatcgttccattttgacattcactttcttacaaattttttcaagtttcaggactactaataggaaaattctcttaatcatcttcaaaattggggattcgaccattttttacataattttgttatatattgccataatttgagattttgttattgaattttatttaattccaatatttatgaaatgtcttgaatcaagctttgtttttcgactaagttatttgcttcttttttggggggttttggtaaaaactttgtttacttttcgacttattttgcttcttttgtgctgtgttttaagttttatttagtgtttcgactaacattataatattttttagtgtggtttttatttagtgtttcgactggcattttaaggtgtttcgaatgacattttcgtgtttttgtcatttaatggtttattctccttctttttttggggctttgataaaaaatttatttactgtttttcgacttattttactgtttttcgatttatttagtgtttcgaaactaacatttttgtttctttccttttttgttactaaaaaatttgtttactgtttttcgacttattttgctgtttttgtgctgcgatttaagatttatttagtgtttcgtttgttttccttttttgttactaaaaaatttgtttactgtttttagacttattttgctgtttttgtgcttttaagatttatttaatgtttcgactaccatttttgttactaaaaaactttctttattcttttagttgtgtgtgtaagttttatttcgagtatttcggattcacgtttttcgtgtttagttatttaaaataaactaagatttcgggtcaggttcaaattcattaaataggggcttcgggtacctgtcatttgggcgactgtcattccaaggtttgtttgtttttgttattttagagtggttgttattttcttgtgtgtgtctagcgatttgttgtaggttgctgtaggaactacactagtcacgcattgggcgctatgctcactcacacgcccatctatacaacctatacatacaactatacaatctccccctatttatacatctatacaatcacaccctaataatacatctatactatcacaccctaacatacatctaaaccatcgcaccctaaacattcatctatttatacattcacaccctaaacatacatctatatactcacaccctatcatacatctacacattcacaccctaaacattatcattcacatctacatacatacatgtatctttatccggaaagaaagaggaaaatacaaaatattgcacagtcttgtcaacttcaaaggctggcacagcagaaaatggaaaatactggatatagtcccaaggcttcgttttcccttcttcaaccttctgcaaaattaattaatcaaaatcagtatttcgttttttccgttgcacatgcatttacatacaaatcaaacatttcagtcaaaaattaaaacccattcttcctatgttttacataaaaactaaaatcttcattctatgttttcctagacagaacataaatatatctagcttaatttcaacagcaacaaaaagaacatatatctagatataaaatttcagtttatttaagacacatatgtagctaaaaatcagtgtatgtcatagttcatagatgaagtcaagacagcaatgtatataaaacagaacattaatttaaattccaagttcaactccataaaagatgttaaaaagatgaagaacatatctataagctaacaagaaccgtttatatgattaaaaaaaaaactagaataactaagacaagagtatttttaccttgtaagagaggatgcttatgtttgtttctctcggctaatgagcaatgtagacaagtttgactacgagaactcctaaagtagaagaacggaattttttaaaaaaaaagactgtattcgacatttgtaagaaaataaccaagtaaagaggattcagatttctgattcaagaaaggagtatttatagagaggcattatctgaatctctttccaataaaatattataatttcaaacgggaagaaaaatgttaccgtttcacaacgttcatattttttccactgtcaacaagtcaaatcaaactatacgttagaacaatagtaaaaatcgtaaacgcacttaagactctttgatccgtttactgagtaaaaaatctctgaaagcttaaggcccaaaattaaggcccattatatgttaccgtttcacaacgctcatattttttcactccaacaagtcaagagcaaaatattggaaacctaaattatgactcttaaggcccaaaagtaaggcccattaagtgtgatataacgacgttaaaataaatgaattgccaaaaacaaattagaagaagaaaaatcgatg

SEQ ID NO: 28669 - DNA, 3000 bp, Unknown
  misc_feature (1)..( 3000): 2750-1469P.txt file - cDNA_ID_2998114; gDNA_ID_2926241; Annot_ID_142887
tctcttcctttgctctcaaccagcagtattggtgatgaaattgaatcctctggtattctgaaaaagcttggatactacatcgactctgcagatggtcttctactctgcggccgccatccaaaagcttactacttgtgggatccgagtacacagaagcagcagcaacttccacgtcccagagttcatttcgaagaactttgtatgtctttgatttctgaggatagtcctgatcaagggtttagctacaaggtggtccgggcagagtgtgtagcctttcctgttaacagtacaaaggtgaaggtagagactttttcctcaaaaacttctacgtggagctactcagagcttatttgtctcgagcctctatctctcagcccgtggactccagggagagtgattaaaggcgttgtttattggcatgctagaggaggtaaaattgccatatatgactcaaacagtgaggagaaacggattgatgtgataaagcttccgaaaacatatgactatgatgaacaggttctgggagaaaccgatgatgggtctttacaatacggatggagcaataagtcggtaatggaggtatggaagcttgaaaaggtaggcaatgtgcttgaatggaacctgctgtttaaggtgaatttcaaggcgatgtggaaaatgaaccaagcggtagctacaagattcagcacttggactaaagaaacgcagctgcttgcgctcttcaatcagaagtcggacttggtgtacatcagatgtgatacacaaatcttcatctatcacacagagactaaaagggtcgaagtagttcagtaccaaggacgaaaatcgacactcgtttgggatttcaacaaagtggtgccttactttcgacgtacctggccttgttctcctctgtttgaaaacaatgccatgatgatcgacactcctcaatgcaacgcctcttccgcaggaagtaactaagtagtttatgcttttaatcagtttatgtatgtaggctattcaactatcttttatgttttgatgctgaaggtttttggttttggccattgatgaacctctcatggttttgatgtattctctcatgggtgtcattaaagactctgcctttttgcatttgcgttttggatctgcgttttgtggttgactccgtttgtagctaatttatgataatttacacatagaacaaatggttcaatctaacaaattataaaacagatcaatttatttacacagataatcgatgtcacttgtctacatagttcttaagttataggttgatccaaatagtttcaatattataagttgaattaatgggtcacttggagaatgtccacattctttgaaatgtaatgacgaatgtttgttctttcaattttctaaaaaacgaataaacataataataattataaagtcatgtagtgatctaagaaacagatcatagtttctctctatgtaatcttaggtacagataataactttatgatctcattattggtacattgattttttttctattttctttttgcttgcaacctttttcttcccttttatctttttatgaatgatgaaaatgttatgttaagatatttgtaaagatcattgatttgaataaatagagacccgtctaaatatgcaccaacaattctgacttcaagtgagatttacatttcaaaattatgcattatgcctagaaaaaagatgatcactaatattgttggatttgaagggaaaaagaagctggtgttaaaagagtggtgggacattatgacaactcaaaaggatctttaactgtgttgagaaactccaatgcattatttataaaggcctaaacaaaacctataggtcgctctctatatatgttcatatcatatatatggctcacatggctcatcattgtttcaatgacatgataactaaagttgtaatgatctactcaacaacgaattttggtctatatggaccaccaccatcaactaatttttattgatattcatccgattacgagatttgtgaatctttgataaatttagctcattattatgaaacttttaaagtaataaatatgtgcatgttttgagtttctaccaagtttgggtgttaaaactcagtttcataattaaaactccgttactgctatttcgtataatgtcattttagtgagttataaacatttagtgactaatactttttagcattctcaacaagacaacaatcacccctaactacaagaaaatgaaacccaaaatagtctttgattaaaaatctccaaagtttgatgtatctaattttatttctctattaatgattaaactgtactatcactcattgtcgtcattattcttttctcccaaagctataataatttacgagtccaatgtatatagttttcaagcgatataatggttacattaaaatatgtataatctactttaacatactttcatatatattttggaggcatagatattagatacgttgacaagccacatgttcttttatcacaagccaaaagtaggaagaaagaaaagaatgtatgaatttataaagtgattggttaagaagcaaaagaaaaaggagagttaggggtttgaacaagtcagtaatcatatagatagtgaaagtgacagttggaaaaggtgagagagagagaggatcatcactatatttagacatcacttgaaatcatctcttcacaagtgtctgaatctcccacatcatctttcttcctgattctcatcatttggtttgtgttcgttcataggtaaagtaagattcttccatacctattagacactaatgtgttgttacatcattatatcgtttgttctattgatgtgatttatatattgatgagtctaatgatcttgaaacacaaaatctgtggatatatacctattttggttcgatctttaatggatcttctttagatgtttgttctgttttcttgatcaacttaataagaggattttatcatttgttaccagagaactccatctaatg

SEQ ID NO: 28670 - DNA, 3003 bp, Unknown
  misc_feature (1)..( 3003): 2750-1469P.txt file - cDNA_ID_2998138; gDNA_ID_2926241; Annot_ID_142897
agttctacagtctcgttaaaaacgccgtttctctgccttgtgtccttctcgccgcctgtcagaatctgtctctctccgccaattcgtccggagatttagccgatcgtgtctcccggaggttctcaatcgaagaaatggggcgcgagatacgcgaaggcaggtttgatattcgttcatgttgcgtcgaattcatctcttcaagtcttgttcttcccaatttaaaactcaaagtgttgatagaagctattagaatggttcttgagattgtgtatgatgatcgattcgctacgttttcgtatggtggacgtgttggtatgggtaggcatacagcgattcgttacctgaaaaactcggttgagaatccacggtggtggtttcgtgtttcgtttgctcgagaaatgtttgaagaacgtaatgtggatatactgtgtggctttgttggagagaagatcaacgatgttatgttgattgagatgatcaagaagctgtttgagtttgggattctgaagattgagcttggtggatgtaatagtggaagaggttttccacaagagtgtggcttgtgttcgattttgatcaatgtttactttgatggacttgacaaagagattcaagatttgaggctaaagatgaaagttaagaatcctcgcgttggtacaggagatgaggaatcaacaggtaatgttttctttaagccagtgaatatttatgcagttaggtatttggatgagatacttgtgataacatcaggctcgaaaatgctgacgatggatttgaagaagcggattgttgacattttggaacagagactagagttgagagtagatagattgaacacatcgattcatagtgcagtgtcagagaagattaactttttagggatgtatcttcaggctgttccaccttcggttttgcgcccgcctaagtctgagaaggcggtcagagcaatgaagaagtatcagaggcagaaagacgttaggaagttggagttaagaaatgctagggagaggaatcgtaagacactggggcttaaaatatttagacatgtcttgaagaaaatcaagcagagcaatgggtttaaatttgaaggtgagatagagaatgaggttagggatattttccagagctggggagaggaagttatgcaagactttatgggttctctcgaagagcgatggaaatggcactggctgctcactagaggagattttctctctttgagacatattagagagaaattaccacaagacctgattgatgcttatgatgaatttcaggagcaggtggacaaacatttggctccgacccaggctaaaaaggtacttgaggatgaggagaggagagtagaagaagaagaggaacagagatatgctgaaaggacagttgaggatttgactaagttatgcatgaaggtgtcagctccggaggaacttgtcagaaaggctattaagttagttgggttcacaaacagcatgggacgaccacggcctatcattcacctcggtgactctcgaggattctgatatcatcaaatggtatgcacgggtagggcgtaaatggcttgatttcttctgctgttgccacaattataagatcggtaaaatcattggtacgtatcatatgaggttctcatgtatttgacactagcatgagaagcatggatccactaaaaagcttattagacactacacgaaagatctcagagtatcagatcttgacgggagggaagaggcccattttccatcggaaagagaggttaagatgatgggagacaagaacctttcagaccctaaacctgtggatggcacactatcgttgcttttgatcaggctcgcatctgatgagcccttgcatcactgtgctgctagtttttgtgaacgatcagatacaattatgcaccgtgtacatctactgcaaaaccgtttacatatcaacccactagacgaagagaaatgggttcctggcatgggcaccatccactcagctttgaatcggaaatgtctccctttgtgctccactcacatcagtgatgtatacttgggtaaaataacccttcaggatgttgatagtagttcattcatcgatctcaggtgatgtctgttactctcttctacaattggttataacatctgcacgagagtaagaagtaaaaatggccattgctgagatcaggcgaaaatgcgtgccaacagggtgtatcacatacacattttgtcttgatttcatcatgataggaaaatgaatgaatacttcataagcaactgtctggctgcgcaatggcatagtaagcttcataattgtcagggggtttggttcttctcaggatcaggaaacaaagatttgagcattagttacctgaaaaacgcaatgatcatctgcatacacctgagctgtaccttgcacggagcgaacatgtttgttcctttacggtcgtcagtatcacgctcagcattgtgatctcatttgacacaccaaaagcagttgacacgatggatatttgtcgaattggcggttggcaattgacagttgtataactataattttgcaatcgtgtaatgtatgaatctacattttagtattgtagtagtaagagggacacttttcttctgtatcatgtaaagaaagaagtgaggtcaattactgttctggtaaactcgcgaggacgtctagtataattgcgaaaatgtaggagtggatatgtgaatacaagaagttttgaggggccaatttgcaaaaagacatgaaaaagaaaaatgtgtcgcgtgtccctcacatggattgccgacgggaagcattaggggtaaagtcgtaaataaatttgagatcttcatcttctctgtctcctctgttcgaagctgagctttttttggttgcttcagtcactcaatagattcacatggtttcagacagaaaagtataaagaaagatttgaatagcaagcgtgcgagagttgaagaagaggaaggattgttttaagagcaagaaaggaatttgaaaaccatg

SEQ ID NO: 28671 - DNA, 3003 bp, Unknown
  misc_feature (1)..( 3003): 2750-1469P.txt file - cDNA_ID_2998145; gDNA_ID_2926242; Annot_ID_142899
tgtagtagggtacgcaaggtgaattcccgagagtgcccttttctgcgcagccgaactcacatctcgaccaggccgggtttcggcccggcgggccggctcgagttctaaagtgatggtcggggctgggtcgatattccttgaaatgggccggttgatcactgaggcccaattgatgtatcaacacatatctaagattattcaacttcatgtgaatgagcaagcaccttttttctgttttattagacttagacatttttaattgtctccaaaaattgtatacttaacaaaaaattgaagctcgaatttcatcaaatcatgtttatttattggattattttagtatgtaggagttgtcttatcctggttactctaattaacatattaatggtagtggctggtgatcgagaaacaatataaactaattcaagtgcacattattttcacgatattacgctagttatatctgggactgcaaaaaaacaattagatattttcatgtgtttcgtaattaacggagagattatttaaccacaaaaatgatggccatgtgtcaaacaatgaacaagtgataaagacgagaaagagtaaaacaagtaatctgatggaacgtgcgaagatgtagaacatgaaccatgtcatctggccacgttgcttagttaatctggtcctaacgaatatgctttatggatctttcctaattctgaatagaaaatacaaataaatgatttatgagttacgtattttagataagccgtgtacggacgacggactttttcttatggatattgaaatcgaaatagcatatgcttttgacacaataataagaaggatagcgaattatggtgtaacattttggcaaaatataaaatagcgccaattatccaccaagtccactattttcgtccttttcaacatatacactattttaaaaatttatattctaatttgcattttatatttttaaatcagagtctattaacatatagttatatttggcatgagatattgatttaaaagattgaacttgtgcaactcaccagttcaagaaataattaaaaaaaaggagatacatgattcatccctgtttaagttttaattgacttagacgtctgtttatcaattcggcaatatggcttgagataaactaaaatgttagtgttttcaaccaaaaaaaagaaaaaacacaaaaactttaggtcaaccattttaatctcttaaacgcaataaatctaatcgcctgataggtgaggagaaaatgctcaagtgtaatgttcatatcatctgggttggtctatctgagaattcatgggccaattaaattcaccagcccaatacatagataaccaaaagccgaaaaaggaaatgttgttagcgcccaaaagcccaaatgattactttttagaactttagacgaattaaatctttaattgacatttaataataaattacaataactaaatactaattatattagttcaattaaattttagttaatggacacaaaataaaaaatgtaaccggaactctttggtcgaaaacggactcttcaagtgctttggaatagacggacgcaaaatgaatatcatcaagtgcagtttaatttgtaaacaaattctctctacgcaaacaaaaaaatcactggtgaatgtcatttaattatctattcatttatttcccgtaaaagaaagtgcgtaaaggttttcttgttgaaaacatgtgtgtgatgaatgattaataaaccagaaaatgttatgtctggtctgttcttatccttgacgatacagacatacgtggatttcactagacatatatagtcacacagacgactaaaattaattgatccttatttttgcattattttcgaccttttttttctttgttaaatacattcgatctattgaaaagatagttaccatttttctaatgaacttatccgatttgcttcgaaataaccttacttaatttcaatcaaactcgaataaggtgatttactttataagttataaccatacaaattttattagactgatacagttcttaatgacttgattgtcggcatatttcaaccaataatttaacacatttttgcggctttttctttattttcaccaaaaaagtctatattcgggggaggtttcggtaactataaaatctgaattaccaaaacaaaagaatgtacatactgtatatgaatctgagacttttagaatggggcatatagctttccatcatctgtcttgcaattaaacttgtaaactttcaatatgttttacctacttagattacatcacggaccacacaacttgcactgatcagtaagtatctcatttttttcaaagttttattttactcaattaactgttcatatctatatggttttcttaaggtgttgtatatatatatattgtttaaggtgtcgtattttcctttaattctggtatattgattgacaacaatgtaacgtcgccgaaccatattcgtaaatgacatttccgttgtaaggcataaaccataaagatatctaatagtggagttcatcactattacataaaattttgagccaaaaaacaaaaggttacattttatatattacaaaatatagtaaaatgattatagaggtgaaaaaacaaaatagatatacaaattttttaaaaagaaaggttactaaaaataatatacaatataacaaaacaaaacaaaaatcaaaagaaatagatatatgaaaaatcataaaattggtagggcacaaagttttaatatcatccgctcaaaaaaccagagagatagggtcccattataattttcctcattttcatatgcattcaataatctatctatatgtacagtgacataagtgtcagcctttacatctatgtacatatagcttctagattctcattcattccaatcacagagctgataatttcagcagaatatttactattttttataaagaaacaaaaaaacatagaaaggtttggtttttcaaagaacgtgaaaatg

SEQ ID NO: 28672 - DNA, 3003 bp, Unknown
  misc_feature (1)..( 3003): 2750-1469P.txt file - cDNA_ID_2998149; gDNA_ID_2926242; Annot_ID_142900
ttattttttggcagaacgctggtgtgcattatgagacttggaatactggtattctagggccagtcacattgaagggagtaaactctggaacatgggacatgtctaaatggaagtggtcttacaaggttctcttgaacatgtgtttgataaaaacaattttaccaaccacaacaatactaaactaaatgtgtttctttttatttgtgatgagtagattggtcttagaggtgaagctatgagccttcacaccttagctggaagttcagctgtgaaatggtggatcaaaggattcgtggtcaagaagcaacccttgacctggtacaaggtaagaaatattctctcattttcttcaaaatagatcttttaagcttaaatttgtgtttcgaaacacaaatgaaatggtttaaaatctatgccaaactatatgatattttcatatacctacctatacgtacaaaattattggttaatgaattttcaaaaatggcaaatgaattaaaaggtttatatatgagatgttgaatgtttttttaatacatgtgtaaaacactttaaacatacattttacattagttaggaatgtagctaacattcttaatctggtttttgtgatgaattataactatggatgttattgaaattatgaacataatataagatatagattcatatcggattcttgttgtctctatttgtagtcttcttttgatacaccgagaggcaacgaaccactggctttggacatgaacacaatggggaaaggtcaagtttgggtaaatggacataacattggacgccactggcctgcctacacggctcgtgggaactgtggacgttgcaactatgctggaatttacaacgagaagaaatgtctcagtcactgtggtgaaccttctcaaagatggtgagaaaaaagaaacaatatccttctcttcttcttatttggtctaaaatctaattcacatgattgatttattaatgttttaggtaccatgtacctcgttcatggctaaaaccgtttgggaaccttctagttatatttgaggaatggggtggtgatccaagtggaatctctcttgttaaaaggacagccaaatgaagcttcttacttcaaattttttccggaagcatgcagagattgtcatgtacagatatagttgcattcattggctcattgtggaagaatattatatatatatgtatcctgctctaaaaatgtattacaattgtataaaataatatttatacaatagaccaaaacaagccaatctcaatcaccccataagaggggttcttcttcaggcttgatcaactaccccttcctgattgctctaacgtaactaataatcattttagcctcccattttgaaaggatgaaccttggattgggttctgcacttgagagtggatgtattgcatcatcccatttgaaccaatcaacataaagctggcaccaagagaatcaatcaaaaggtcacattttaagtgacatattagtagaaaaacggctagacttaaaccacataacgtaccacatatggataaaagttagcatgttccatcattctacgaatggtctttctctcctcttcagtcagctccacttcctcgtcattatattcatcatgaatcttgcccctaagccccataaattgcatcaccataatgcaactaaataacaaactatatataaaaataaacagaaaagtcttcaaactgaccaattcttggagtcatcattagtttatctcgcatttctttcttggtaatcttcttcccaatgatgtcataatcaatatgtttctcatccttataccactccaagggaacatccccaaatctatttcttggagcaacctacacatcaaagatttcgtttggaaatggagaaaagatagttacaaaatctagaatgaatagataaagcatcaacctcatcggcgacttcatcttgctcagaaccttggtcacttccatattcctcaccatctacttgttcaccatcatcatcatcattatcatctgatccctcatgacctaatacatgtagatgccggcacaattactcgctctctctctattacttgcaacatactagagctagaatccctatcaccccataaatgttcattataatctcccacaagtatcaaactataataaacctatatttgatgaatgtggtggtggtgacccaagtgggatctctcttgtaaaaagaacagccaattgaagcaagcatttgtgtggtttacaaaatcatgcatagattgtcatgtatagatatagtcacatttattggctcattgtggaagaatgttacatgtatccatgctctaataatgtattcctagtgtatgaaataactattcacaaaataaaccaaaacatcaaatcttttttaccaatcttttgaatagttatttcacttgagctctgatcaacattttttatggtatggtaaaaaatccacctctcagataaagcatcacatcagatgaaacacgaattttctttttcagtaccgtcagattaaaagattgcccacacgtgtttcccgtttactcttcttagattcttattcaatttgtacaaactctttttttacatatccacgtttccggaaacgacaaagaagaacaattcaataaagtgataaacccttctccattcctaaattaaaataattaattaactcttaacattcatgaatctctaatcctaatcaccattaataatttatccattagattaaatcttctttcttctcttccttaacttagaagactcttaaatctaataactctgttcacttccttcacacgaatcaaaaacaaaaagcttcgtacatttcgcctagctttcttcgttctagggtttcggatcttacttaattacccaaaacccttgaatccattactctgtgtgagcttaaatctcttaccttttatcactttcaatcgattgggtattaagttgtaaaggaaggaacttggaatcatg

SEQ ID NO: 28673 - DNA, 3003 bp, Unknown; identical to SEQ ID NO: 28672
  misc_feature (1)..( 3003): 2750-1469P.txt file - cDNA_ID_2998149; gDNA_ID_2926242; Annot_ID_204114

SEQ ID NO: 28674 - DNA, 3000 bp, Unknown
  misc_feature (1)..( 3000): 2750-1469P.txt file - cDNA_ID_2998156; gDNA_ID_2926242; Annot_ID_142902
catgcttcttccgactactttctacgtttcttcgtaaatcgtcgtaacacttcaaccaaacaatttttttatatatcatttctttttgtaggcatccgtcaataatcaatattaatgtaatgatcactttagatactatagaaaaacctaaaaagaataggttcatgcatgattcgtgtcgattacgaatatctatattttaggaggattattatcaattcgattggatttagcaaaatgttctgaaattaatggttttaccggttacaatattaagtacaccaaactttaaactctgacaactctagcattgaagattagtagtaactctgacaaacgtatcattacttcacatatgacaacgacgtctaaaccacaacagtttaattaatttgtcagtataaaattagacaaaattgaaactaatcgacgacggattagttcctacatgccgatcatgtcaacgtacgttacatacattaatcatgggctgtatgaaaaaataagttatactgtagatataactaaacaacccaaattttactaatttctcttaacacgattttaggtaatgtattgaaactcaatttctttcaactagatctaccttggaaccaaagtcaacttagccaacctccacgaacaaatccaacgtacgtgcatttaggtcaggactagtttgactaatttagcgtatgcacattcgattaatatttattcaaatatactttgattataacaaatataaaatatgataacacaaatttcggtaatagcgctgttggtggtaagtttcattattaggtatccactacttataacatgacacatggagttggattcacgtcatccattagataatttgaatgacaaattgtccaaaatacaaattttaaaaaatttatgcaaatgtcattccattgtcacagctagaaagttcataggtccctaaatctaacacttcaagcataaatcccgaataaaaacgttgaagaattaattactccaattatgcttttaaagatgtagtttggttacgcgcggtcgattatttttgttgacgtatttgtccctttttgacaattctttcatgacatatatttagtccacatgatgaatacaaatgttgtgattttcctttacatttcatcgaaatcagatggtgaaaccaattatataacatatggactttgagtctttaacagcttaaactaggcttcgttttagataggttttcgatagactttgacacattaaaatttaaaactatatacataaattagaataggtgattataattagattattattttgtgttagctagaataagatcgacgagaaaaagaagctagaataagatcttataatataatgtataaagatatatgtgaaatatagataaaatataactgcatgtgtatgtcggtatattctaaaatttcgtaataaagatcagtcattaaaatgaatcatgtggatgtaattctcgtcgtctctattccgaacatcgcaagtattgttttccttttgcatagtgcattttttaaatgtcatattccaataataatctatagtgatactcgaccactatttccggtttgacgctagtcatttccacacgcgtgattaactattacatgtcgttgttaggtggtgtcagattaactatgaacagaaaacaaaagaaggaacataatgaatgaacataatgaaactgcagaaatcttttattataggaaacgaataatctcttctgattctatactagaattaagcctgacatcgcatgatttctgatgcacttgtattatgtaacaagacccatttgcaattgataagtcatttggagacccactaaacagaaaaagtgaatattccttctttttattgttctttctcttttgacatagtgaatatttatacttaataaatcagtaatattcgatgatcaaatgttttaatgtgtggattctagtgatcctactaataaaagtgttaaatttcttttacgacacatggaatttatatacttttagtagtccgttcatgacttaagcaaaataatagtatacagaaaaatacggaatgatgatcgtcactgacacagtcacaattatacggagtatataacttgttggtagatagagtgagccagacatgtgtatttatgaagcttttacgtatagtgtagtcattcaagttattttcgcatacgtgttatagtatttcatatgcattaatgagctttcatctacatttttttttgttaagcttttcatctacattaatagttaagagtaaaatatactgtcttgttctttctagacaagatataggagacattgagacaatattataaagaggcacatgtttttactttcatttgaggtttgggaacttaataaaaatgctcgagtaaatgacgatcgtcatgtctccatcttttttcttttcttacatcattacaacattttgtaacttggctaagaattaaaatgcttgatccaaatgcctccaccacttacattaggcacttaacctacgttgattttctttatatcagctaaattgaatcaatgaagtatatattttaaaatatgttttttaaacagctaagtacctaacctgcaagatttattagcagaataaatcagtgacatgtatattaatactatactccaataatcacaatcaaaaataaaatcgcaatcttacctgtctatttaggaaaacagaattaaaaaagaactttgtcaaaatgagaaaaagaaacaaaattagaaaataaagaagtaattcggatatataaagaaatgggccatttattttctatatataaaaaatacatacagagatgacacaacactgatagcagaacaaacacttttggatcttcttcttcttcttctctctcaatactcacaaatcctccattttctctgagtttagtttcttcttcagacactaagattcaagtcctctctttggtcggagaagatg

SEQ ID NO: 28675 - DNA, 3000 bp, Unknown; identical to SEQ ID NO: 28674
  misc_feature (1)..( 3000): 2750-1469P.txt file - cDNA_ID_2998156; gDNA_ID_2926242; Annot_ID_204116

SEQ ID NO: 28676 - DNA, 3000 bp, Unknown
  misc_feature (1)..( 3000): 2750-1469P.txt file - cDNA_ID_2998160; gDNA_ID_2926242; Annot_ID_142903
atcaataatatattatagaactttattaaatagtttctttttttttttttgggcaaaactaaattgaaaaaataatagggaaaaattgaggaaaaacccctttacaatcagaaatcccataagaaagattatcttgatgaaaagattagtttagtgtaatcaataaaaataaataattacagtatttcgatcgtcgtatgtcttaatttactgcgaacacatggtagtaggtaagattggtgagaagataaaaatagatgtgaatgcttttaaaatataacggtggagcaatattgtcagaataagacaggtagccaatgcgcagttcttttcaaaatgttttttcgacaacacttctttcgaagaaataacgtttttattttgtagattcatataatttagcaaacaaaaaaagaacactgtagattgatatgtattttgaatatatatttttaatcagtctttcaaattcataactatggaactatactagtaccattttacctcaaagttcagacatcagatcataagataaaagtattgaacatacaattaagaattaggcctgttactaacttaggaaacattaatgattaacgaacgatatgttcaaatttaagcagacgaaaatactacaaatcagtctaatgtataaaatatttctgatagaatgactatcagaaagataataaaaagtggaaggtgactgcatttttatagccaagccgagactttttcgtgggttacttaactagtttatagtatttatatttagttttagttttagtttggttttatcaattgtatgtgaagcggtaatagattaacatgatcataatcatttttaggtgtgttgactttgtgtatgatggtaggtcaatgggtcatatatagattactttggatctcgttgataaagcttatacacacgcaggcaaatcgatccttttcctcggtacaatatacaatgcgattgcaatttacaagaaattagaatacgtttttccacgtaaaacagtaaattatatgcatcattaattacaaatatctcaaataaaaactaaaaaccattattgcttcattagccacccaagacaaatgaattaaaaaaataagaaagaatgaactagaatctaatagaagatgcataggaaaaatcaaatagagtctaatggaaaatgcataggaaaaatcaaataatatacaaccgtaaccataagatcaagaaacataacttaatgatacatgatcgagattaataacaacaaagtacttttgaatctggcaaaaaagcctaaatcatacagttggaacgtggtgttaggaaataatagagacttgataggtctttgagaaccctttgagcctaggattcctctttctgcgcctttaatctcttccctcatgcttttaatccccattaaatatattgtaaacactaaactaacacaaaaattagatgtgttacgtccgcttctgatttcttatttaacttaaaccaaccatcaacatcaaaagattttattatacaaacatatgcatgcgcatatttaaatatatcaatggtcctgctaattattttattcgatttttaaaaatattttgcatcttttcaagaaaaacgattgatggaacccagattttttcgtttaagatcaatttgaaccatcattcaattttattttttaaaatgtgaattttcattaatagtgtacaaaatacaaaaagtacccatacttttatatatattaatttaaaaaataaattattttcgcggtgtaccgcggattaaactctattatatatatatatatatacttatttttgtatctcaaacatttataccaagttatgatgcaatgactgcactaatactatgagccactagattaaatgtctttgtcgcaatatttcatgatgtgtatatataaaatttaggtatggatgtttataattattgcgtggacggcgaacaagaaacaacggtgcacaacgacaaatgattcgagttatgtatattcttgataactactattaaacaaaacaatatcaataagaactaagatctgagaaatgagaatccgaggaagatgagatatatagggtaatcaaattagatttggtaaaagaaaaaaataaaaagaaagagaacaagctagagaataaggcaacaagtataggtttcacatgtttgtgtcgacaggccacacccccataaaaggcttgcttggcttttttgtcattgtatgcatctaatccactccaccaattttttctccttcacttattaattcgattttttagctatacacagtattttgaaatttgaacaattaaaaataaaaatgagcattcatccaaatgggttattgtgactgcctatagtcttggatgggaatgtgtaaattttagttccttcaaagattgatacttattacgtacagattgtagtaataaacctatttacaaatataattgctgataaatcaaaatttatggttgttttagtcgaattgttaatcatgtgatggtcaaatgggttatcatgtgggtcgaaggactaagcttcatgtttcttgaattttgttattttgggccttaagaggtcaggaaaagaagcccaataatctaaaacccatcatttgtggacttttccacaacttatccaataacgtggcacatttgtgacttttccaccaactatttttcgggttaattaaaaaagacttaagaatcaatcagtcctttatttccgtccttaattctttttactttccacatatagcatgaaccacgacggttggataaattcaacggtcacaatattgccacgtgtaagctttgtatctacatcctccaatcaacggccaagtcttggttaagttttagccaattagagtcactcagctcatattagcctttttgctctttctttgcttctctaacaaaccaacttcagcgacaagataacaaaacgctttcacacgatcggataaaatg

SEQ ID NO: 28677 - DNA, 3000 bp, Unknown; identical to SEQ ID NO: 28676
  misc_feature (1)..( 3000): 2750-1469P.txt file - cDNA_ID_2998160; gDNA_ID_2926242; Annot_ID_204117

SEQ ID NO: 28678 - DNA, 3003 bp, Unknown
  misc_feature (1)..( 3003): 2750-1469P.txt file - cDNA_ID_2998164; gDNA_ID_2926242; Annot_ID_142905
aaaacagtacggaaggtaacaagaatgattccacgtcccaaacaaccgaaaaagaaaattttgcttaagaagaagttaaaaatcggggttgtgtcagcaacttacccaacaaaagacgatgaagaaattgttccttccttggactctagtgccaatcaacttctctgccagagatgtcactgttcgttgaagagcaccagcatcgatgacaacccaccttcatatacttctagtcataatcctaagatttgcacagatagtttgagctctgtttcaaataaagaagctcatcaaggatctgacgagaactcctctggctcgtgtaatgtcagtcaaagctctgaagctgacattgtcataatgaaacaagatgtttcctctagcaataatagtggaatcggtgcaatggtagaaaaagaaaccgagaatccgacttccagtgagaaattcgagttctctctgagttcaaaagatagtcttggggattatagcaggagcacaagcattagtgaggagagtaatctgagccgatttagctgtgggaataagcctcacatgtcgatggatgtgagatgggaagcgattaagcatatcaaggttcaatacggctctttgggtttacgacacttcaaccttctgaagaaacttggttgtggagatataggaacagtctatctcgccgagctgattggtacaaactgtttgtttgccataaaggttatggacaacgagttcttggcgagaaggaaaaagtctccccgggcacaagcagaaagagaaatacttaaaatgttggaccatccttttcttcctacattatacgcgcaatttacttcggataatttatcttgtctagtcatggaatattgtcctggaggagatcttcatgtcctcagacagaagcagctaggccggtgtttccctgaacctgcagcaaggtaaagatttaccttttccatttcgtgtctagcttatttaatgtactgaaaattgattgtaaaaatttgtttctgtagattctatgtggccgaaattctccttgcactggagtacttacacatgcttggtatcatataccgagatctgaaaccggaaaacattcttgtccgtgaagatggacacattatgcttacggattttgacctctcactccgttgtgcagtgaacccgactcttgtcaggtcaaactctccacctggtaaagatcccgcaaggatttcaggtccatacaacacatccaactgcatacaaccattctgtatcaccgaaccatcttgccaggtttcgtgtttcagccctaggctctcctcaaaccaacaacaaggtagaaaaccaaaaaggggtgatcatctttcgaaaacccaacaacacttgagtagatcattgcctcagctcgtggctgaaccaaccgaagcaagatccaattcctttgtgggaacacacgagtacctagccccagagatcatcaaaggagaaggacatggcgctgcagttgactggtggactttcggggttctcctttacgagcttttatacgggaaaacaccattcaaaggttacaacaacgacgagactttggccaatgttgtgttacagaacctcaagtttcctgatagcccgcttgtaagcttccaggcaaaagacttgatcaggggacttcttgttaaggaaccagagaacaggctcgggtcagagaaaggttctgtagagatcaaaagacatcctttttttgaaggattgaattgggctctgatccggtgtgcaatcccgcctgagctaccggatttctatgagtatggtggtggaccagaggcagcggcggattcgcctggaggcagtaataataggtatcttgaatgtaaagccataggcgatcatcttgagttcgagttgttttaagcaagacatagatattctctggtataagcattcagagtaatcgttgttgtaagttattatatctaagttaaatctaaatgtcttatatgtaaatttagcgttctctgagacataatctgatatagtattctcaaaaatatatatgctccttcgtatctcaatttttaaatatatgatcaaacattacaatcttagtagacactaatctacaaaaccaaaagattacaaacacttttcttcaatgaaagacttgagttgagattcccatctgatgaagaacacttgacgtcgaagaagctgacctcaaagcctcagctaatggtccacccatattgtggtggttccctacattgctccaccaattcaattgctccctctcattgttgttgtttctcaggttctcttcttctttttcttcttcattgcttgttgaaagttttagagaaacatctgaggaagcgttactattaccgggcacggagattgagatatgacaagtggatgagctcattggactggaggtagagcccaatgatgattcgcctagcccgcctaaacccgcctaatgaccgtgtaatccacttaatgtctgcatagtccgccaaatcttcctcaccgcctaatagaatcgattttaagaaagtcgaagcggtacatgaacgcctagcacctaggggatgcctagacggctgcgtaacccgctttcttgaataccgcctagttgtaattgcacatttttgggtgtatatcaatttttttccagcaaaattaggcagttgcacctatcacctatgtctcaccctactgggccgggcctgaataatttatgttacaaagattgcaatttgcaaacattaaaagaagaaaagcccaaaaaggacatctttgatcatcagattggctccactttaattacgaaattgatttctttatttttccttttttacttttccttttggcgggactgcttgctttgattttggaatgatgtaaaagcaaagcaattatgtttgggaaggtttaagcaaaagcaaaagacaagtgaaagtaaataaatagatattgagagagacatagagactgttgtaacaagaaaaaaaaatg

SEQ ID NO: 28679 - DNA, 3003 bp, Unknown; identical to SEQ ID NO: 28678
  misc_feature (1)..( 3003): 2750-1469P.txt file - cDNA_ID_2998164; gDNA_ID_2926242; Annot_ID_204119

SEQ ID NO: 28680 - DNA, 3003 bp, Unknown
  misc_feature (1)..( 3003): 2750-1469P.txt file - cDNA_ID_2998172; gDNA_ID_2926242; Annot_ID_142907
aaataaaggaatttccatagttagaatagattgagatagtatattttagcggcctataatgatttcataagctttttgttctcttaaatgtcttttatttttgtttgcatctttgaagctgtctcgggagtaagtagaaagataataaatgctgctcatatatatgattgggcagctatggttggcattttgccttttgaaattcagtaaagtgaaaacaaactcgttaaccatctcacgtatatgcttttctaaatttgttatatatattcgatcagattttaaattgcatgcatatgatcgcattattgtattgatagtctatcatcatatgctttttgtaatctatatatacatttttgcaattattttctgaaataaatcttcaagttggaacttatttacaaggaatatcattaacattaattatcatcaattaattaatatttttaattattagcatttccttatctaatatatctccatcaattctaattacttttaaaaaaaaaattagaactttattaatattatattttattaaagataaatattatagttatttaaagtttagaaaatatttagaatattttaacgaaaaaacgtttagaatatatattatatatgaaatctataaaattaaataactattagggacaatgtcccacatcggaagttgagtaggatcttaagtggtatatataagatatgggcctctcctcctattgccaattggttttaggttggaagcccacagtctaatatggtagcagagcccggtccgcacatactcaacccgatccacatcgggccggcccaatacttggcccgccgatccatgcccaaacatatcgagatcaatggctagaagagccatcatctcgagggggcgtattagggacaatgtcccacatcggaagttgagtaggatcttaagtggtatatataagatatgggcctctccacctattgccaattggttttaggttggaagcccacagtctaataataactatttcaaaagaaaacttttaaattgatttgaattataaatcttttaataaaaatattattagaacaaaaaataataatgtttaattttaccgaactggattaaatggtgggacatgtttaaaatattataatgtatggattttgtaacaattaaataaccatttgaaataaaattttaaattaatttaaattatatatcttttaaattaaagtattatttaaacaaaaataacaaaaacaaaatgtttaatttcactagacggggttagatgataggacgggtttgggtcgacagtaatacgagacggtatagcacgggtgaaatccattagatatgtttagtttcacggaacgggattagatggtaggacgggtttgagtcgatagtaatatgaaacggtataccacgtgtgaagtcgtagatataacaatcaaaatataattatattatcttaaatactaaacaaaacaattataaaataaaaatataattaaattttaaattatttagttataatctagattttaacttaatgaactgtacgttattgttcttatattttaaacagtaaaagttaaacatagtaattgtatactaaataatatacagatataagagttgtacattcagaaaatacaaaatattaaatcatatatatttttaatcgactaaacaaattatatttttattcttaaaagaacaaaatagttctgcggtgtacggtgtaccgcgagttaaaacctagtgtgttatatgatgataattgaagaagcctgaacggtgaatccgatccttaaaactagaccagagttagattggcacattgtgacaacactaacataaatcattatacattatctcgttaactaattgtttatttatgattacattctgtcatcgcattattattgttatgatgaagctgtaaattagtcttgatagtatcattagtatactaaaaactataaagtatctacacatttggcttttactttacagccgtcatctttttttgaaagatggatattggattcatttaaaattcgagaaaaacgccaagtggcaagccaaaaacttccaaatgaaaatactttagaaaacaccaaaatttgcatctacaattgaatgattcacgttcaaaagaaccattaaatgagtcctgaaattgaccgttaccgtattaatgtcaaaagaccagacgacaaaaatcaatacttagaaattaattagaatctttcatattattaaaaagaaatcgacgagaaaaagttaaacctaaatattaaagaacctttttttcaatctcctttgtttaagtattaaaatatacaaagttaaacctaaatatttgtaactactactaagcaactaataaaacatcaaattaaatcataaaataccctttttcaaatatgttaaaaaatcaaaacctccttgaatattcgcatccaaaccaaggattcacattcaaaaattcctcgtatcaattatcattcgcatatatatccaaacaaacccccaaatatataggattagatcaaggctaataatttgaaccaaacatttttttttgtattttgttgtatataaaaagagaaaaacaatctctagacgacacgtaattaaaagtgtattgttttgagaaatattatacgaacttaacggatacgtaaaacaaaccattaaataataaacccaaaaacagaaaagagagtgagaaagcaaacaaaatataaaagagtgagaagaagaggacagagagaagaaaccattaccacacatacagagagaaacaaacccactccattaaaaaccaaagctttaagcttagattcaatcccaagtcagtaaaaatagggttaatcgaagaaccccaccggaattccactgaggaattgcatcagtcgcgttcttgttgcggcttgaggaagaaaaagaacacctacactaaccaaaacaagaacaaggacgaattgaaaccgaagatg

SEQ ID NO: 28681 - DNA, 3000 bp, Unknown
  misc_feature (1)..( 3000): 2750-1469P.txt file - cDNA_ID_2998176; gDNA_ID_2926242; Annot_ID_142909
agagatgggtaagaactgagcttccctatatctgaatgatgcatcattgccgacatttcactttgagtgtcagaatcatcaggtggctctaacgcaagagctgaatcccaaaatttctgcatcatcgtgtttgccatatcatttacagctccagaactgttctccaccattgaaatagctgcgtgagtaatctgaagaacgtctacacaagctgcagctgatccatctttatctataattggaagatgtagaaactttccatcatgcattgtatgcaacgcatccagaatcgttgtctctagcgatgcacattcaggattcggtgtcattaccttctcgacaagagtcaattcaggagataaattttgtgccaccactcgcatcagaatgtcctttgaagtcaagattccactgattttgttccccgtggaaatgattacagagttaacccgcaaatccctcatccttttcgcagcaactgaaacaggatctgatggtgctacaagtgcaaccttcgaattgtctgtaataatcgttgacaaggcgggtttaaacattctctccctcaaggtttcaatgaaagcatacggtgcagaatatccgcttccccattgcttctccacaccttccactgcagcagctaaagcactaccttgctctgcagctttctccatcctagaaatagcatcatacaaacactttgtaatatccaacaaagcaatgacttcaccattctccacaacaggcaagtgtctaaacttcccttgaaccatcttctgaagagcctcaagcgccaacgaatcagaagtaacaaaaataggattcctagtcataaccttagagaccaaagtttgatccggtctcaacccttcagcaatcactcttgtagctacatctttatcagtaacaatcccggaaagaagcgcacttgaatcagtcaacaaacaagcatcaacacgcctagcagccattcttcgacaagcatcgaaaacagtagttccttcaggaatagtaagagctttcgataacctaagcttcttcactgttctctctccattagaaggagcttgagattgaggttgaggaggaggtgaattgggttttgaggtgttcccattaacacttccattctctgattgtactggtttcttagaaggtggtggtcctcgccgtacagtagaattgcttctcctccctgatgttgaagaaggacccgtcgcttgagtactcatattcggtcaatctagggtttacttagatcctaaatccgtcaaaaatgattcctttagatatcaaactcgtctctgcaaatgaaaaattcaacctttaattcaaaaactattgaaatttcatctaaagcacgaatctgaataaaacccaattcacaataaagacgatttgctctgagaatacgatgcaacatacacgaaaaggattcgaatttaacggacgagggaaatgaaacaacttgaaaccctaaggatttgagcagaagttatgtgggaagattgggaatttagggtttaccttcttctttcttcttcaaggtctctctctcgagcacttttgttgccaaaaaacaaacggctcttaacaattgagttaagccatttatcgagttttcattggttgttcctgtttccgcgtgtgtggtggttcgccacctcctttcttataatcgacgactaaaaatgttaaatataatactaatatttctttctataaaattcgtaaaagcaaaaatgttttttttttttctgataaatgtctataaatcaccctttctttttaaacaatgaaatttgatgacatttctctcttgtatctagaagagttaatggctaacataaatacaaaatttttttaattcaaataaatatgatttgtgtgggttacatggaaaaattgtcaaataataaagcaaaaaaaaattgtatagatgcagtgcaagttgtttctggtcaacttgccgtcgagcctcacaactgtttgttacaagtggactcgcatgtaattccctcttttaataacttaccagttacaccatccaacatgtgatttgacagaaaaatattttagtgaaatgtgatcggtgcagatttttctatgtacgtttaagcctttaaggtagacgtttaatgcaaaaatatccgtggaaataacaacaccgattaatggaaccaagtagatacctcctccgtttggatggctcaaatgcaaccatgatgcaagcttttgcgatcgaccaaagtgagagaactagatcgagatggattattcggaaccattacggcacccttatgtaatggcagcatcttaatagtaaacaaaagctttagcctaaggttttagcttccttcactctttgcatacattgtgaatctgcggttttagatggaccatagtggaaaaaggctttcatcaataactcgtggacttgatcaatggtagaaaagagaacacatagatggaaaactagatatttgatatatccatctttggttcaaactcttatccagtgttgaggtgatatacacatgaagacataacaatcgcattgccgagaaactagtattcattaacctttttctctaaagacattgtcctatcaatctaaaatttagatgttaaaaaagaaacccaaaagatgtagctatcttaaaatgacagtcgtttgcgagactggccaggccatcccatgggccataggctcaagttgtgcttggcagaatttagtgattggttttttttgtataaacaatcattagtttaaggctttacttgcaacaaatgaagagtttaagggttctttttggtaattttcccgaatcacacaagtgagctagctcatcagagtccacgagcttcccactaaaaaattgaaaattgttgcttctgtcatctgaaattaaacaaagcgagaaaaggcgatacaaacgatttcgaatgcttcatcttctcctttgaaaatccttcttctgcttaatgctgctagatatg

SEQ ID NO: 28682 - DNA, 3003 bp, Unknown
  misc_feature (1)..( 3003): 2750-1469P.txt file - cDNA_ID_2998183; gDNA_ID_2926242; Annot_ID_142918
tagatgatcagtctacgtttttctatgaccttaacacttattgaggccggttggttctctatgcccacttaacaacaaacaagtttcatcaccgtagtaaagtgtctgttgggacacaagagttcacatgatatttcaagttctgatggaactggaatagggattgtcgtctttgtttgccacccacacgtagcctctcgtgatgattgttttcataatctccacaaaagattacttgtggatcgcgaaccgagacgacagtcccttgctttccaaaatcaaacgaaaaggaaaagaaagaaaaaggaaggtgtaagaatggtggtaatgtggtagagttatcattttcttcttcttacctccttccattatatagtgtttcacatgcccatttcgtaatataacctaagccaaagaaaatcgcttcggttttaaattatataattttattttataaagttaaaactcataaatcagtaaataaaaaataaacttaggaaacgtttttgtttcaacagattatatggatttcatacttatacacaaactataaacattcccaaagttttagtaaaaattagcacccattatccaaaattttaaaaacttagcttagttttattatacaatacaatagaatcgaacaaaagggacaacagttttctatcatatctcgaatgtatcgaaatgtacttaagcgagtatggctttttgggggacaaggatcatgcatgaacgaaatatttctccaaccacatatgttatgttttggccccgtgaaaattttccacaagtaaatttattgctaaagttattgaccaacaacataaatcttgttgaaatgaattaactgaacagtgtgaaaaaatcaaccaatattcatggtgttccttacaatgcaatttcagttctgatgcaatccgtaacaattgaagttgtcacatgttcacaacaatccttaaatcgattttagcaaaagagcataagatacataaccaaggttgctgttagctcagtagttgcaattagaatcggctattgaacacaaccgggtgatatgagattgcgtagcaagatagtaaacaatgttttaaaaagagttattataggaacacaaactcttctgattttaatgataggaggacaagagagagcagtgaaataaagttcataagcagcaaaattctcaagtctgatattataagagtagcaaaagtgagagacaaaaacgaaataacaaggtttatgttttgcaaatattcagaaatgaacatcaactactaaaagtagctactagcagaaaagacgcagagtgagaaaagatggctttaagctcttcagcgtttgccaccaccacctcccaccttaggacccttggatgcagcagcagctttggggaaattagccttgaccttctgttgcttagaagcaaattccaccttcttagccttcttttcatctttggtctttttgattctttccttgatctcactgtttgttgaatcatcatcacaatacatttattaagtcaaatataactattttaatcctagttggatgatttgacagagggagaaaactaaccgcagagcagcttccctggctgcatcacgaacttcaggcttctcagctctcttcttctgaattacttccaaggtagcaccaacaatggaccttgagtatggcttcttggtggcacgtctccttctcttcacagcctcttgtgctgcatcctataaaagaaacagagttttagaatgttaacaaatcaggatcaatgaaaaaaaacaaagtacaaacaacaaaacagatccaaattactgagttttttttttaccttcttgtgttgctttctgtacatggcagtccatgcaagcttggatggcttcaacttgttatggaagtacctcttacattttgagttaagaaacaagaaaacctgaaaacaatacaaaccattaaaagactaaaaccaaaacatttgcaaagtataaacaaatcaatttgattagctgaagattcataaaagaaccaacctgagaatcagatcggataaacctaattcctcttcctgggtaaatcttctgtccactgaaacgacaaagctccgtcctgtatttcatagataataaacaaatgagacattgcaactagaaatgacaaccaaatgatctttgacactgaaaaatctcagtctacatgatagaaatgaatcatccatataccaaatacagactaatcacagatattaacgaagtatcatacttttattacttagaaccagatccagctacacagagaccatgaaattacccagcttagctaacggtaaagcaaaacatatcataaattccgattgaaacaagagtcaatttcagtgaatcgatccttccgatagtgtgaaatcatgaatcattatcactaggcgatgttaatagattcaacacaggaacagatacagagagagagagagaggtgagatttgattacttgagaaccatggtagtagctgctcctcttcttcttcgtcttcttcctcctgctcaggctgctcccggaaacactagactagaaaaccctaattctctcgatacttatatataagagacttcacatttcacccaatgccattttcgtctatatatattattctggcccacactttaagcccactaaataggcccatcacaaataggcccataattttattagcccatatatttttgtagtgatgacgtcagctctcctccaataattttttgattttttcccatagccgacgacggtagaggaaacttgtcaatggacctaaaaaacggtgacgtttcgtaaaaggtagatgaaagtttgaacaagtagctaagctctctctctgcacaagcttccagaaaaaatcaaatcaaaagagagagagatccacaaaattggattgaatcgtcgccggatattccaagagtagagagcttagtttgtctcgcgttgcgtctagatttactgaatatg

SEQ ID NO: 28683 - DNA, 3000 bp, Unknown
  misc_feature (1)..( 3000): 2750-1469P.txt file - cDNA_ID_2998191; gDNA_ID_2926243; Annot_ID_142923
agtcaatctccttaaccactcggacatatcgacttatttgtatatttacgaaaaagattaatatatgtgttcatattcaaaatttcaggactggtaagagggcaatttatcacactcaactctattgagatattcacaaagcacgactggttcaagctcaaacatacggtctactttcaatgcaatggagagaacaaaactgttcttccagacgttaccaaaacaggtgtcttgtacactttccgcggtcaagaatcatggcaggctagtcccaaatctcttttacatccgttcattactacaatctattaataacatggataaatacatatatgttcttcactctattgcctgttacagcctatgactggaattggtggcgaaaagtgtaaacgatgcggaatctatgagcaaggcagcctcgtttcagacaaagagttcgatgtatgggaagtttgtcccactgatttctctgctagccaagtttatatgcattttaaagaaaaggagattaatgctacttttgtctgccacggttgcgccaagttccactccggtgagtaataactaatttccttatttctgtttcctgtcaaaagaaacgaaaagatatgatgatgagtaacatatatgaattgtatgcaacaaaatgtgtgtagtatcttctaaagcagtagctgcttcaagtccgcaagaggaaggatataacgggttaacattcatgatagcgatcatagcaggcgttttgtgtacaacgcttgttgtggttggaggcgtttttatgtttaagcacacgcaaaggatgaagaagcagcgagatcaagctcggtttatgcagctatttgaggaaagtgatgaacctgaagatgaacttggacttgaccctgtgatatgacatgttttaagaaggttcgtccacgatttgttttgcataaagacttttggtgtttcatgaattttgcagcttatattagggaagaggattgacagtaggatctcactttttgtcttttggtatttgcttctcttccacatactttagtaatctcagtcaaaaataatcccaaaattttccaatactataaggctatttattgtacacattctaatccacaaatgcattgaggggaactctaaggtatgtattacgaagaaaagaactgaatcagtaccttcctttgagtttatctgactaatcaactcgagctcggattacttctgatggcacggttgaagctatccaattctttggaatcagggccgtatatcgtcttaattgtgtcaatgcagcagctgcaacgtaaaaagatatttttcacatttatctcttccacatttgttatatcccctaattaagattcagatacacatttgatttaaacactctcagtgtgtaagagcttgtgaaatagagttatacaaccaaggagagttacctgacagcttccttgttgaatttcttttcttcaatcccgtagagtgacttgaaaacctctggctcaacccgacaaaaatatggacgatctgaactcaggaaaggaagaaaacgttcaaagtttcagtccataaacagagagaacaatctgatagctaataatgattgattgttaccagcataaatagagcatttgcgtgtagctttgtcgtagtttagacaccatccatcatctccgatcatgcttcgatacagctggattaagcataagattatatatatattaacgttttaacacctaacagagtaattaagtcgaacaagtggtgggtgagaaacaaacaaacctcaacatcatcagggttgtcgaagatttcgtcaggtgttgcaaaggaaaagtcctttgcaatcttacagcaagctccacaaccttctacgcacttccaagtcaactcctttgtcgttccgccggagaaaccgcttgtcgacatcgttggccgcttattcgccggcttgactttcttagctttaggttgtgaaacttgggaccgcctcgtggcagagataatcgtcctactcattggtgccgtcgataacgcaagcgacatatccatttttcttttggcgcaaattagagaagcaagaaatgttgtcaagataagattagaacccaaatggcgaaagccggttcaaccgcaaattgtgaatttgcatccggttcagtcgcaaaccattttttttatccggttcagtcgcaaaccattctttatacaacaacaagatccactttttattgttggtacatagcattggctctcatatattgattcttcaagaaacaaaagtttcaaaaacttacacgcgtttcctttctttgtttgtttgtgtacaaccaaacctcatcttactatgattttctattctcgtgaaacaaattgagcaacaatacacaaagagacaagaagacaataactatgggttgtcacagcttgggacagtttcttacaaactcactactcgcatcttttgggtcttatcagtgtgtcaataataacccaataataatggcggattgtttttgtttttctgtctccgattcgaattgtgctacaaggtcagtgtttagaaggggtttatactgttctctattgaatattcatgttatgttacttcgattagttggttgtgctctgttttgttttcagattggtgtcaatcttcaaaagcgcagtatttggacagtagactaatacgtacattatttaagggattacgttacagataattcgatacttgtaaaagtaacacaagtgattgaggatacattaattttgggcattttggggtactggtaatgttaaagttaaggttaaagtaaacttgtcttactaggcccggccataatcttataaatacattttgggccgttaaagggtaatgcttaaaagggtcattagtcgattcatagcttttgccgtcttttccatgggaggccgattgtatataaatattaaacgtaattcttctgtagacaaaagaaaacctaaagacatctgcgttagatg

SEQ ID NO: 28684 - DNA, 3003 bp, Unknown
  misc_feature (1)..( 3003): 2750-1469P.txt file - cDNA_ID_2998195; gDNA_ID_2926243; Annot_ID_142924
tcacatgttgatctccaacattgatccggatataaaccttttaaatgatgcattttctgtagaacataaaaaattatcctatagagaataagctcatctccaatatatttttcaattagagtaactcaaaaatatagtagagttttttttttttcttcaatgtaccactctatttttttatttttattttaaagtgcaaaaaatagagttactctaaatgtaaagcaaacatatattttactctattttagaatggagttgtaaagaattttgctatgtaataaagtttagggaaaaagtagagtagacttggagatatacccttggtaaaaatatcaatcctatatcccaacgaaagtgaaagacatgtggttcatggaatgttcctagtgcgttattagtatgcatggtcttatatataaatcgacaaggaaataaaagaggtaaaaataccattatgtcgtggcttagctgcaatgtgtgtaatgttagagcatctccattggtgcatcttagcccatatcttagcttagtatcttaggtgtaaacatttaaaattaaatcaaaaatgattagaatgctaagaagtgaatcttagttaagatgttttatgtgtgttaagaagtgtagacatgttgcaatatgagtggttgaaagtaaagacaaaaccaaacaaaagtaaaaattcacctctgtgtatttagctaagataccaaaaagacaaaacttatattcttaaccattggatgtaatacatgctaagatactttcttattttcttaactcacaaaaaaacaaaaatttattctaaaatattggtaagattcaagattaagaatcaattgtatcttaaccattgtagatggtcttagcttctttaatccaggtgaattctgtagtaaccttgatataccagggattacagatcgaacgaactccgttttaacagtcaaagtttggaccttgagcgttgggaaaggaacaccgcggagctcggcgagagatagaatctgacaaaacgagatgaaattaaaaggtcatgtttgctagaaacccacttagcaagttggcgttctaaaccatcaaagaaacattattaaccaaataatagttctacaggttttagactttagagtatacctgaagaagggtttccccaacagtaagcctcttaacgttgtgaaattttgatagcatctccagcgccatggtttgataaccatctgcagtcaagggagagagtaggctactgataatggtaaggttagcttcgctcaaagaggagacatccactatagtagatggtgtgctagagtatgtcagtctcaaataatagatgtgtggcgcaacaatcgcaactggtcctgtgcggcgatattgctgatttatatccaatctcctcagattcggtgatttactcagatcaagacgctcaagtaatctgcatgtatccagtgtcaagctttcgagaattggacagccagagagaatattatgaatggattcgtctggaatttgacaaaaacgcagtgttaagttccttagggatttccaagacactgtgcatgtgggaatcatatcaaaaaagtccaacgtcacgtcgagtagctttaaggaggaactgagatagaagatatctggaaatctgtaagtcttggagtatgtgaaatccctaacgaacacagacagattttgcacattgcgggagagagcaaactcgatccagctatcaacctggggtacagtgttgctgttaaggtccataacaagtttgaaactagtgattatgggagccgtgtaggaagttagggtttggttcatcgctccgtgcttgagtgtaatgtcgagacaaggtgtctcgcaccatacatgcctccatcgtcgggataagacggaagttctcatggccaaatcggtgggaataaaggagagaatatggtgaaggatatcatctggcatatagttgatgaaatctgcaccatcgattattcgttggattctgcggtggctacgatgttgtcgtcggccccgtctctctcgccttttcgccatctaacgcagatgtctttaggttttcttttgtctacagaagaattacgtttaatatttatatacaatcggcctcccatggaaaagacggcaaaagctatgaatcgactaatgacccttttaagcattaccctttaacggcccaaaatgtatttataagattatggccgggcctagtaagacaagtttactttaaccttaactttaacattaccagtaccccaaaatgcccaaaattaatgtatcctcaatcacttgtgttacttttacaagtatcgaattatctgtaacgtaatcccttaaataatgtacgtattagtctactgtccaaatactgcgcttttgaagattgacaccaatctgaaaacaaaacagagcacaaccaactaatcgaagtaacataacatgaatattcaatagagaacagtataaaccccttctaaacactgaccttgtagcacaattcgaatcggagacagaaaaacaaaaacaatccgccattattattgggttattattgacacactgataagacccaaaagatgcgagtagtgagtttgtaagaaactgtcccaagctgtgacaacccatagttattgtcttcttgtctctttgtgtattgttgctcaatttgtttcacgagaatagaaaatcatagtaagatgaggtttggttgtacacaaacaaacaaagaaaggaaacgcgtgtaagtttttgaaacttttgtttcttgaagaatcaatatatgagagccaatgctatgtaccaacaataaaaagtggatcttgttgttgtataaagaatggtttgcgactgaaccggataaaaaaaatggtttgcgactgaaccggatgcaaattcacaatttgcggttgaaccggctttcgccatttgggttctaatcttatcttgacaacatttcttgcttctctaatttgcgccaaaagaaaaatg

SEQ ID NO: 28685 - DNA, 3003 bp, Unknown; identical to SEQ ID NO: 28684
  misc_feature (1)..( 3003): 2750-1469P.txt file - cDNA_ID_2998195; gDNA_ID_2926243; Annot_ID_204159

SEQ ID NO: 28686 - DNA, 3003 bp, Unknown; identical to SEQ ID NO: 28684
  misc_feature (1)..( 3003): 2750-1469P.txt file - cDNA_ID_2998195; gDNA_ID_2926262; Annot_ID_204795

SEQ ID NO: 28687 - DNA, 3000 bp, Unknown
  misc_feature (1)..( 3000): 2750-1469P.txt file - cDNA_ID_2998199; gDNA_ID_2926243; Annot_ID_142925
ttcctttctttgcgatattccgcagtgctttatcatatgcggaaagggatgggaactgcacaaagctgatatataccaacattgtcgagaatgaaaaaggatagaaattcattagtttggattcgaattcctctcttccaaagtaacaatccagagaattaataaagcttaagacttacactgccgcaggagttaagtttccgccacgcggatagttgaatttgagatcatctgatgtcagactgcagccctcgagtacgttcattatgtctgtcttcagagcatgttttgaaaagcctgaaaacttcccataaaacctccctgcaaaaagaaataagaaaaacacatcaaggaacatccttcatagtgagctaaacaaagtctcaaaaccataacagtcaaagtaaacaaagtccgcatttttggatagcaaaattcgataatagcctctgcggttaaatttgaaaccaacattttcaatttcaatagcttcagatatacacactccaaacaaatcaaaactctgcaatctatgatctaggatctttgccctcacaaattggagaaatgctctcaaagaaacactagataaatggaatgaaataaaagagaaaaccttctcccggagaacctcccggaggcggtggtaacggagaggcaggaggaggctgctccgtggcggtagataggcatttcctccactcttgaagaaacggaagcgagctacgactgatttccggatccaatttccggagacacaaactcgatctgatcgcgctacgagtgatactcatttctcaccggaaaatgtctagggtttttctctacagagagtctcagtggtgacgatgacgaacacggtgaagaagattcgaaattacacccacattcgctacataaacgacagcgtttcacattctaaaataattcaaaagcccacataataattaaaaaaggccaaagcccataacgtcgaacatcaatacggtccatattacattagtcattagaaggagtaacggaaaaaacttgaccattaaaggaagaaaaaaatgtttcaagaattgaagtaacaatatttgattaaatcttgtctaatttcaatgttattttaggtatatcaaaaggactttcgccttcgtaattccccgaaggtgaatactcgcaaatcactaggaatccacggttgttatcgcatttagaacgagcgcatccaacggctgtggttgtacgccaaacgatctgcgtataatgaccgcacatggcaccagacttgcacgtattagccacccgatcgtagttcaaactttcatccatccatttatcaacaactctcctcggcgaccaattctcactcctttggtacctgaaaatattctctccgtaaggcccacctgaatgggtcattttacaatccgatttacgttgtttggcccatttagatgcgaaacgggccaacccttgatcccatcttagattcgacgcgcctgaagctacacgcgctgcgttgtgcgcgagtaagaactccgcggattgcttattcctccttcctctgttagtcgcacgtgcggctgcggctttggtgtccggtgatgaagttcctgcggtggagggaaattctccggagaagattaataggaggaggaggagaacggaggagatggagagacaaaacggatgatataacgaagacgacgacatatctcttagtcgtcgtcttcgtgtctctcattttcaatcttctctgtttctcaggttttgttgtttcacttttgaaaacattcattattcggttagtgttttgccattttctgacaagctttgacagattgtgtgtctcatctttttgttatctgtttttcgttgttttttttttttggtaaaaagatttcgtagtttgttgacataatgaatgtcaaaaaaaaaaaaaaagtccataccataacaaaagtaagcttactttgttcgttttaattttaaatatttaagaattagcttaacaaattcggtaaaatttgggatttttcaatgtaaaatatgatcattatttttgtttgtgaatattttatacgaacgttacaaatataatgtattatagaatgtggtattgaagagggagagtgtttagagggaaagcgtgagacgcacgtggatctctgtccctcttttttctcgaaagcttgctttcctgttctttccttttgtttcaatattcgttgaaaacataacagagagaactaaacggaaaaaaaccctgaaaattagataaaaatgccgattcgaaaaccgatgatctggagaaatcttcttttctgttacatcatccacatgtggattccaggtaataaattccacacgactaattttcccgggaaacaaaacatgatgtttgtttcgttaaccaacaaactttttatccattcactcgatcgaaaatgatcgatcttttcatgatgctttttattgtttccatagatcgatttgtggttattttgcatgatgaaaaaagaaaacgtcccaagaaaaaagagattcaaagaatttaagattaatggggaattttctgtaaaattaaaattaaaaatcgtcgacagcaggattcgaacctgcgcgggcaaagcccaattgatttcgagtcaatctccttaaccactcggacatatcgacttatttgtatatttacgaaaaagattaatatatgtgttcatattcaaaatttcaggactggtaagagggcaatttatcacactcaactctattgagatattcacaaagcacgactggttcaagctcaaacatacggtctactttcaatgcaatggagagaacaaaactgttcttccagacgttaccaaaacaggtgtcttgtacactttccgcggtcaagaatcatggcaggctagtcccaaatctcttttacatccgttcattactacaatctattaataacatggataaatacatatatgttcttcactctattgcctgttacagcctatg

SEQ ID NO: 28688 - DNA, 3003 bp, Unknown
  misc_feature (1)..( 3003): 2750-1469P.txt file - cDNA_ID_2998202; gDNA_ID_2926243; Annot_ID_142927
ttcttttcttcgtaatacataccttagagttcccctcaatgcatttgtggattagaatgtgtacaataaatagccttatagtattggaaaattttgggattatttttgactgagattactaaagtatgtggaagagaagcaaataccaaaagacaaaaagtgagatcctactgtcaatcctcttccctaatataagctgcaaaattcatgaaacaccaaaagtctttatgcaaaacaaatcgtggacgaaccttcttaaaacatgtcatatcacagggtcaagtccaagttcatcttcaggttcatcactttcctcaaatagctgcataaaccgagcttgatctcgctgcttcttcatcctttgcgtgtgcttaaacataaaaacgcctccaaccacaacaagcgttgtacacaaaacgcctgctatgatcgctatcatgaatgttaacccgttatatccttcctcttgcggacttgaagcagctactgctttagaagatactacacacattttgttgcatacaattcatatatgttactcatcatcatatcttttcgtttcttttgacaggaaacagaaataaggaaattagttattactcaccggagtggaacttggcgcaaccgtggcagacaaaagtagcattaatctccttttctttaaaatgcatataaacttggctagcagagaaatcagtgggacaaacttcccatacatcgaactctttgtctgaaacgaggctgccttgctcatagattccgcatcgtttacacttttcgccaccaattccagtcataggctgtaacaggcaatagagtgaagaacatatatgtatttatccatgttattaatagattgtagtaatgaacggatgtaaaagagatttgggactagcctgccatgattcttgaccgcggaaagtgtacaagacacctgttttggtaacgtctggaagaacagttttgttctctccattgcattgaaagtagaccgtatgtttgagcttgaaccagtcgtgctttgtgaatatctcaatagagttgagtgtgataaattgccctcttaccagtcctgaaattttgaatatgaacacatatattaatctttttcgtaaatatacaaataagtcgatatgtccgagtggttaaggagattgactcgaaatcaattgggctttgcccgcgcaggttcgaatcctgctgtcgacgatttttaattttaattttacagaaaattccccattaatcttaaattctttgaatctcttttttcttgggacgttttcttttttcatcatgcaaaataaccacaaatcgatctatggaaacaataaaaagcatcatgaaaagatcgatcattttcgatcgagtgaatggataaaaagtttgttggttaacgaaacaaacatcatgttttgtttcccgggaaaattagtcgtgtggaatttattacctggaatccacatgtggatgatgtaacagaaaagaagatttctccagatcatcggttttcgaatcggcatttttatctaattttcagggtttttttccgtttagttctctctgttatgttttcaacgaatattgaaacaaaaggaaagaacaggaaagcaagctttcgagaaaaaagagggacagagatccacgtgcgtctcacgctttccctctaaacactctccctcttcaataccacattctataatacattatatttgtaacgttcgtataaaatattcacaaacaaaaataatgatcatattttacattgaaaaatcccaaattttaccgaatttgttaagctaattcttaaatatttaaaattaaaacgaacaaagtaagcttacttttgttatggtatggactttttttttttttttgacattcattatgtcaacaaactacgaaatctttttaccaaaaaaaaaaaacaacgaaaaacagataacaaaaagatgagacacacaatctgtcaaagcttgtcagaaaatggcaaaacactaaccgaataatgaatgttttcaaaagtgaaacaacaaaacctgagaaacagagaagattgaaaatgagagacacgaagacgacgactaagagatatgtcgtcgtcttcgttatatcatccgttttgtctctccatctcctccgttctcctcctcctcctattaatcttctccggagaatttccctccaccgcaggaacttcatcaccggacaccaaagccgcagccgcacgtgcgactaacagaggaaggaggaataagcaatccgcggagttcttactcgcgcacaacgcagcgcgtgtagcttcaggcgcgtcgaatctaagatgggatcaagggttggcccgtttcgcatctaaatgggccaaacaacgtaaatcggattgtaaaatgacccattcaggtgggccttacggagagaatattttcaggtaccaaaggagtgagaattggtcgccgaggagagttgttgataaatggatggatgaaagtttgaactacgatcgggtggctaatacgtgcaagtctggtgccatgtgcggtcattatacgcagatcgtttggcgtacaaccacagccgttggatgcgctcgttctaaatgcgataacaaccgtggattcctagtgatttgcgagtattcaccttcggggaattacgaaggcgaaagtccttttgatatacctaaaataacattgaaattagacaagatttaatcaaatattgttacttcaattcttgaaacatttttttcttcctttaatggtcaagttttttccgttactccttctaatgactaatgtaatatggaccgtattgatgttcgacgttatgggctttggccttttttaattattatgtgggcttttgaattattttagaatgtgaaacgctgtcgtttatgtagcgaatgtgggtgtaatttcgaatcttcttcaccgtgttcgtcatcgtcaccactgagactctctgtagagaaaaaccctagacattttccggtgagaaatg

SEQ ID NO: 28689 - DNA, 3003 bp, Unknown
  misc_feature (1)..( 3003): 2750-1469P.txt file - cDNA_ID_2998206; gDNA_ID_2926243; Annot_ID_142929
ttactagatagatagtgttgtgataatatgtcaaggtttggatcgaccagacaatatgggaccttcacgatgtctgtctcatgtttcctgcatgccatgcattctatttactctcgtctactctacgtgcccacgtctccacttttattcattttcttatttgtgatcaatcaaacctaaagaaaatgttaggctaaattggatctgttttcttatatatcggtacgcttaaacacatataattagcgtttaaagattccttttcttaaaggtaggttcagtttacttgtaacctaggtttctcgaaagatgagatgtacttaaatgctcgtttatattttactccaaattaaatactgtagttgataacatcagttttcaaattagagacagtgtcgatgcgagtgcattcaattttcttattaattgataaaaccatattattcgatttgttttatttctttctgaggaggtttgtcttatacttgcatcgatgcatgcgatgtaaactttgtagaagcaattccaaccatggatatcgcagatactgaagtaactccataatcaatcatttacatatctatcatatacattaatattgaaagtgttttgatattggtatttctctatatgaaaaaacaagacaacccgagacattttaacttcagattatagtgtgatatcgaataccaaattgacctttctatcgaagataaaccttaatatagataaagacatatagttactaaagaagtaagttaatgaatgttgaataaaaacaccaatggtaagctaaatattaaacaatacaaaagagaaaacaaagctaataagtaagaagtaagaagctaaagagatagactgacatccatgctccctcaaccaaaagacaaaacacagtgcatcaatggcccagctgtcaccacaactctttttttttttgatataggaacttgttttgttttctattctataatatttatttattcttctttcttgttatctttttaaatcaaaacgatcgagactgaagttgttcaatttttttcgtaataaggataggaaattaattaaggatagagagcacatgaaaatacactgtatgtactgtaatggtgcattcaaggacccttcaatacgttccaaggccacatgtgattctcacaaaatggttcaatatttatgaaagttatttgtgaatatatgttaagataaaatgtacctggaccattctttctatttgtattagactatcttacacgtgattttcttactcttttgatttgacttcaattagatctatatattgcatcaaactttttaccaaattatgcgtcaagtcacaccaattgatgaggttggccttatcgaactagtggaaccgtcatatgcgaaaccaaatataagaaatgaatgaaagacctttcaacaaaattaataagcaagtagaagtaaatccaatatcaatataacaattggttaaacctaaattatatgcatccaatacgaaaattctttttttggtatcttttaatccgtttattatatttgtggagcctaagttgcggatccacttgtattccttatttgaatcattgttatcatttctcattgtttgtgactcgtgagctagaagaaacaaaaacaaaaggataacgtaattttgatatttaaagtaaaccactataaatcattgtgtgtgtgttttttcttgttttaaaagatcgaattagggagcctaacatgtttttgtctcaagagattattatcattaaaaaaaacaagtggaagtggaagttgtgtaacccacttgttgaattcttaacttcgaagcacaacaaaaagatagacgaaaaacgaaaactcgatctaacttcgacatatgcattagataacatatagaaatttaaacaatctcgttgatgaaattggtctatcaacacacgacagtggttctctctacagtagcatcaaatcggtggatccttatgaacagaaaaaacgaggagggacagaggaaggccaatgaggggtcatgcaaaatggaacttagcaaaagtaccaaaaagatccatcctctttgaaaattcatttcagccccataattatccatgacatgaatttcgatctgaatctcacaacaagtaagagatcagcttttgataacattaaagaaaaaggtaaaaaaaagaaagacgagagactgagaaaagggcaaagacctgtaggggttaagacagctaagagtgttcctcagtcgccccacaaatgtcttctctcctctctcttcagtctttctcagctctcaaatctttaaatggttccaagttcaatgctcccaaaacccacgcccacacatgcatcctatgacctttccttttctatccattttcttcccacaaattaccactttgcaaacaaaagccaaaaactcatttacaagatgagttaataaagacactaacacacaaccaatgtgaaaacagacgtttacatgagatattgttacctctaagaagtcattaatcatataatgagaacattcttgcttcctaagtttttacaagattattaacctctaagaaaggagagacacttttaacgcaataataactacatgatgttataaatataggagagagtagaaaagaatatgacagccctactaagacagagaatcatcatcgaacagtaaagaggagaatctctgaatatccactttaaactactgccctcttgtcttaactctcagaaccatttaatttttcagttattttgacccataccctttttggcctctttccctgctttccaacaccttcacacttactctagggcttccacggctatatatatatggtcccttccttaaacttgtatctcataattcacaaccagcactgctactactagtttatcattattccatcaatttattctatatagagttcttctctgtttatattacgatattgctcgaagattacatacctgagaaagatg

SEQ ID NO: 28690 - DNA, 3000 bp, Unknown
  misc_feature (1)..( 3000): 2750-1469P.txt file - cDNA_ID_2998210; gDNA_ID_2926243; Annot_ID_142930
acgtgtacctcaatccaagcagctagatttggccgtccgattataatttcatatttaaaaacttcgtcgaggaagacttgaaagcgttcgataaatgggatatatgcaatatcaacctagcaaacaaaatcgagtaattttgtaaccatagtgacacattcaaaaaaggttcattcgcacttaacattttgataagactaatataccaaactaagctcgccaaggaagaaaggaccatcatcaaactttttcagagcattttccacgtgatcgaaggctgatgctgcgtcaaaaacacacatgtttcagccttcagatgcccaaaacaattgacaagacacaaaagaaaatcaaccttacctgtttctttaaccgggtcacctttgaaagagccaaacacagtttttacaaatgtttcatcgacatatttcaacagttcttcaccaaactctctctttgcagaatcctagaccaaaaatttcaaaaaaacaacatctcatcgaaatattgttacttacatgacaagaacaagtctataacatgccaacaaggtcatacctcagggtaaagtgaaggtccatcaaaattgctatcgacatatttgattagatcaagactctccccagtgatttttccattgtgttcaagggcaggaacctacatacatcattatcacaatcttttagagtcttctattgtcacttttgaaagaacgttaattagtttataaggattaatcataaaaataaacggcaccttgtttgcaggattaactttctcctttaaccaagctggcctattaggaagatctataggaaccaatttgatctcatcttgcagaccctaaaactccccaatgtcaaacaaatcaacaaatcttgcttataaatttttcatctcgatctcaatttacatacatatataccataaatatataaaaaacaagtaccttgaggtttcttgtaatccaaacacgttgtgcaaatgggcaagtgtagcttatgtacaaccttgtggttccgtcgaacagagcaggtggatcagaggtagcatcgagcggaacctgacgatcttctacgaaaatttttcttgataaaggaaaaaaaatcaaggagatgaatatagatttaacaagaaaaaacgactttatactaatcaagaaacctcataaagtaaacaaaaaggatcttacggaggagatagagccatggagaggatttgataagagttgtttcttcaggggattattattgcagatatgatgttttaaaggaactatggatcaaacacataagactacgtatatatattatatatatactcaatggaaattggaattaggaattaggaagaggcttggttcatgcttacccaatggtgactaccaatagaaaaaggtaaacgtacgtcagcgtttgattaatctctgtcgttgaactttctaatttttgttgtgaaggtcaaagatattgatcaaaagcttctactagttttgtttgcgagaatactaataatcacatacgtgaagtctaatcagttgaatacgtgaatactaataatcatattaattttttttggttgctttgtgatgatttttctttatatcaaataaaaagagtttaaaagaagaaaaaatggtagatgactaaatatttcaattgaaagaactatttttgttaattactgtgatatctttttgtaatgcttgtaatgttataataatacgattggaatgacacacacacaacgaaaaaaactatttttgttttcgtcgaaatttcattatgacaagtggacaaaaacaaaatgctggtcaaaaagctcagtctgtgaaccacgccattggatgctacctcaccgaatcatctatgctcaattcgtatcgtataaataattattctttttgtatatgaaaatattataattctttcatgcctttcttttctttctttttctggtagaccttaagcttctggttagtggttactaatatttgtatcagaagatacaatcaaaattttatgttttctttgaacgtatctaaatttaaaaaattttacatgtcattgtctatacagatttcattttgaaatatgaggtgaaattaatgaaccaaagaaaccttttttcttttttttttcttcttttttttttaaaaaaccttttttcttctaaatgcttttatagtttgtattcatattttccgatcgtaagaagacttttgtagattttcacatagtcacagaatataccaaacggtcaaacaaagatgcaaaacacataacacatactgacataaaaatatattaagaaagtttgggagatctttaagttcttttgcagcatttaacgaccaaacaaaaactaaagaggtctgcaaaacattatctcatccacacttaaaacacatctactaaatgctttgagtaatacccactgattgctttggttgattattacactaaacttcgttctcagtaatccggcgctaagagaaagtgcaacgatgcttaaaaggaggaacaagtgttgaaacgagacatgcatacatcatacatattcaagaacggatgaaacaagacgggaatgttaacaaagttccaatcctacattcctacttcgccggccgataattcgtggacgtggtcacgtggtggagaagattaaatcataaaaaaatgaaattatgaaacgatgtcgttttattttttatttgggccgggctatttagatcagacccggattgtaagcaagtttaaatagacaatattgccccttatttcggatgcttaatgtatcggactataatttagatccgatccggcccataagaatcaagttttaatctgactatattacccttcgtgtcgaagggctttaaaagtccccgagactcgacggttcgactctaaccctacaatagtcttctgctaaaatcgcgaaagagatatcttacgaatctccacaagtgcgaatttcgaacggagctacgattccatg

SEQ ID NO: 28691 - DNA, 3003 bp, Unknown
  misc_feature (1)..( 3003): 2750-1469P.txt file - cDNA_ID_2998212; gDNA_ID_2926243; Annot_ID_142931
aacgctagcacactacctgcccatataacagattatggagtcaaatacgagaaaaaatcgtatcaacaagagtttgcaatgcaataagaattatctggaaaaactcacctaactacaaagacggaaaaactttattgaggaaccttaggcagcgcttcctgatacagctgcctcctgatgaaacaaagagttcaacaagagatatcattagcttttctatcaattctctcattctatcagatggacgacacaacagaagttaaaagactgtttaccttgccaataatttgcttctcaggtaaatctgaagatgcatctgctgaagcctcttttgaaaacctaatgatgggaaattcacaaaccacaaaaatcaataattagaaagcatggcacagtacttcagttctcagggactagaagaatttgaggttgcatagaaaaagtacctcaatgctctagctttgcgcttattttcttcagcagaatcaactttagtctcttttccaaaacgagcgagcctagctttcttctttgcctcttcctcagtcttatcagtagtagaggtcgcagaaggaaccccaaatctgttcaaaatacaaagcgagtatgaaactcctttttctctaaacccaaccaataaacaactatcaagtacaaagaaagtattgtgacatacctatcagctcttgcttttcgcttcaattcctctgctttcttcgttccctctgagccattcaccactgctgcagctacagtaccaaacctgcaccgaaggtgaaattccttacaacataggtttgacaataagtataaaaaattccgtaaccctaattttcgaaacccctaaattcgacggaatctaacgaataaatattaaagtctttacctctcagcacgagaattgcgcttctcctcttcggtcaatttcaccgaaacaccaaacctctcagcacgtcgaatcttcttctggatatcatcgaccggagagatatccccagaatcaacaccagccgtcgatccaataccattagagtcggtttcttccttcttttcaccagaatctgaaaatcccttgacttctccgtcgagaatgtcgtcagtacgatctaactccgtagtgttgaggtctacaattttcttagggttttcaccagtagatagccctccgccattcaccaccgtagccgtgaccttctctccgttggtcgccatggaatcgtagctccgttcgaaattcgcacttgtggagattcgtaagatatctctttcgcgattttagcagaagactattgtagggttagagtcgaaccgtcgagtctcggggacttttaaagcccttcgacacgaagggtaatatagtcagattaaaacttgattcttatgggccggatcggatctaaattatagtccgatacattaagcatccgaaataaggggcaatattgtctatttaaacttgcttacaatccgggtctgatctaaatagcccggcccaaataaaaaataaaacgacatcgtttcataatttcatttttttatgatttaatcttctccaccacgtgaccacgtccacgaattatcggccggcgaagtaggaatgtaggattggaactttgttaacattcccgtcttgtttcatccgttcttgaatatgtatgatgtatgcatgtctcgtttcaacacttgttcctccttttaagcatcgttgcactttctcttagcgccggattactgagaacgaagtttagtgtaataatcaaccaaagcaatcagtgggtattactcaaagcatttagtagatgtgttttaagtgtggatgagataatgttttgcagacctctttagtttttgtttggtcgttaaatgctgcaaaagaacttaaagatctcccaaactttcttaatatatttttatgtcagtatgtgttatgtgttttgcatctttgtttgaccgtttggtatattctgtgactatgtgaaaatctacaaaagtcttcttacgatcggaaaatatgaatacaaactataaaagcatttagaagaaaaaaggttttttaaaaaaaaaagaagaaaaaaaaaagaaaaaaggtttctttggttcattaatttcacctcatatttcaaaatgaaatctgtatagacaatgacatgtaaaattttttaaatttagatacgttcaaagaaaacataaaattttgattgtatcttctgatacaaatattagtaaccactaaccagaagcttaaggtctaccagaaaaagaaagaaaagaaaggcatgaaagaattataatattttcatatacaaaaagaataattatttatacgatacgaattgagcatagatgattcggtgaggtagcatccaatggcgtggttcacagactgagctttttgaccagcattttgtttttgtccacttgtcataatgaaatttcgacgaaaacaaaaatagtttttttcgttgtgtgtgtgtcattccaatcgtattattataacattacaagcattacaaaaagatatcacagtaattaacaaaaatagttctttcaattgaaatatttagtcatctaccattttttcttcttttaaactctttttatttgatataaagaaaaatcatcacaaagcaaccaaaaaaaattaatatgattattagtattcacgtattcaactgattagacttcacgtatgtgattattagtattctcgcaaacaaaactagtagaagcttttgatcaatatctttgaccttcacaacaaaaattagaaagttcaacgacagagattaatcaaacgctgacgtacgtttacctttttctattggtagtcaccattgggtaagcatgaaccaagcctcttcctaattcctaattccaatttccattgagtatatatataatatatatacgtagtcttatgtgtttgatccatagttcctttaaaacatcatatctgcaataataatcccctgaagaaacaactcttatcaaatcctctccatg

SEQ ID NO: 28692 - DNA, 3003 bp, Unknown
  misc_feature (1)..( 3003): 2750-1469P.txt file - cDNA_ID_2998214; gDNA_ID_2926243; Annot_ID_142932
atgtgttatgtgttttgcatctttgtttgaccgtttggtatattctgtgactatgtgaaaatctacaaaagtcttcttacgatcggaaaatatgaatacaaactataaaagcatttagaagaaaaaaggttttttaaaaaaaaaagaagaaaaaaaaaagaaaaaaggtttctttggttcattaatttcacctcatatttcaaaatgaaatctgtatagacaatgacatgtaaaattttttaaatttagatacgttcaaagaaaacataaaattttgattgtatcttctgatacaaatattagtaaccactaaccagaagcttaaggtctaccagaaaaagaaagaaaagaaaggcatgaaagaattataatattttcatatacaaaaagaataattatttatacgatacgaattgagcatagatgattcggtgaggtagcatccaatggcgtggttcacagactgagctttttgaccagcattttgtttttgtccacttgtcataatgaaatttcgacgaaaacaaaaatagtttttttcgttgtgtgtgtgtcattccaatcgtattattataacattacaagcattacaaaaagatatcacagtaattaacaaaaatagttctttcaattgaaatatttagtcatctaccattttttcttcttttaaactctttttatttgatataaagaaaaatcatcacaaagcaaccaaaaaaaattaatatgattattagtattcacgtattcaactgattagacttcacgtatgtgattattagtattctcgcaaacaaaactagtagaagcttttgatcaatatctttgaccttcacaacaaaaattagaaagttcaacgacagagattaatcaaacgctgacgtacgtttacctttttctattggtagtcaccattgggtaagcatgaaccaagcctcttcctaattcctaattccaatttccattgagtatatatataatatatatacgtagtcttatgtgtttgatccatagttcctttaaaacatcatatctgcaataataatcccctgaagaaacaactcttatcaaatcctctccatggctctatctcctccgtaagatcctttttgtttactttatgaggtttcttgattagtataaagtcgttttttcttgttaaatctatattcatctccttgattttttttcctttatcaagaaaaattttcgtagaagatcgtcaggttccgctcgatgctacctctgatccacctgctctgttcgacggaaccacaaggttgtacataagctacacttgcccatttgcacaacgtgtttggattacaagaaacctcaaggtacttgttttttatatatttatggtatatatgtatgtaaattgagatcgagatgaaaaatttataagcaagatttgttgatttgtttgacattggggagttttagggtctgcaagatgagatcaaattggttcctatagatcttcctaataggccagcttggttaaaggagaaagttaatcctgcaaacaaggtgccgtttatttttatgattaatccttataaactaattaacgttctttcaaaagtgacaatagaagactctaaaagattgtgataatgatgtatgtaggttcctgcccttgaacacaatggaaaaatcactggggagagtcttgatctaatcaaatatgtcgatagcaattttgatggaccttcactttaccctgaggtatgaccttgttggcatgttatagacttgttcttgtcatgtaagtaacaatatttcgatgagatgttgtttttttgaaatttttggtctaggattctgcaaagagagagtttggtgaagaactgttgaaatatgtcgatgaaacatttgtaaaaactgtgtttggctctttcaaaggtgacccggttaaagaaacaggtaaggttgattttcttttgtgtcttgtcaattgttttgggcatctgaaggctgaaacatgtgtgtttttgacgcagcatcagccttcgatcacgtggaaaatgctctgaaaaagtttgatgatggtcctttcttccttggcgagcttagtttggtatattagtcttatcaaaatgttaagtgcgaatgaaccttttttgaatgtgtcactatggttacaaaattactcgattttgtttgctaggttgatattgcatatatcccatttatcgaacgctttcaagtcttcctcgacgaagtttttaaatatgaaattataatcggacggccaaatctagctgcttggattgaggtacacgtgtgatatatgcatgtcaacatggtaaaacttttgtatgatttagctgcatacttgattgctttacctcaatgtgtgtggtgcagcaaatgaacaagatggttgcatatacgcagaccaaaaccgactccgaatatgttgtcaattacttcaagagattcatggtaatttcgctttttataaacgtttaaacttttgtttatttggactcaaatgccctttttactttaatgttaggctttgcaattttgtcttaactcaatttccggttaacgttctaaaacaaaactaaccgattccggtttttctttatttgcagtaaaagtaacaaatctgttggactttggtaacgatgccatgatggcttatgaagaagaaatattactacttgagagtgttataaatttctggatttggtattgtacattttgtgataaataagagatatttggtattgtttactttcattcatcaaagagagagacatggtttattccggataatacaaatgtcaataataaaatgggcttaataccttattgaataccttattgaattgtatcaattacggcccattatgagttatggagttcccgacaaagatcacaaaactgccacgtgtacgatgatgactgtaatttcgagaaacgtaaacgcttccacacaaaaaaaatccgtagtttcttctacagaatcagatctttgtatcgtcaatg

SEQ ID NO: 28693 - DNA, 3000 bp, Unknown
  misc_feature (1)..( 3000): 2750-1469P.txt file - cDNA_ID_2998216; gDNA_ID_2926243; Annot_ID_142934
gctgcctccgactgttacattactaatcagtcatcattgtattttatgctaattcaaaccatatgcagaaaagaatggggaaagattgcatatcatctcaatgcccatcatattgtatacaatcttctaaataaacaaaagagttgtcttctaaataatcatctgacagctatctttccagttctgtgtagattcaaccataaatttaaaaccaaatttcgatctttgcaataataattcacatgctaagaaacaggcaattgcattatcaaaaattcgaaatttgtagagtacacttgttggtctatctaattgatcaggaagaaacctgattatcagagccaatcctgctgctgcagtttcaggggcaagtaaacttccgataaatactggaaaccaaaagagctcaacgcctgaatctcagccttttgcttcgttttcaccatcaggttaagttcctcgacccacccgggatttttcttcacgaaatcctcctctagcatatccttcccggtcttaatatcctgctcagtcatcggcaacctacactgttcaggtatcttatacttgtccaaatcactcggcctaattccaagccacttaatatcaggcgtagtcaagtttgcactatcatatgacatgttcttcgacccacatccatacaccgacaagatcttcaatccgtaaggatcactatccaccaaggcaagtaccggaagcttaagctccattttcattttcctcaagaagagccttgtagctacatcaggctggccttttgcagtcacgatgatacaagggaaccggttatagaatctgtcttcagctaacctcatataagctgcatctttttcaactaagagtatgaacatagcatcactctgcatatctccaacccggtcaatgtttggtggaatggctttcccacccattcccatctttgtgcaatctatcatgtctccattgtcactgaatataagccttcccaccaccacacctttctctgctgcaatgacattgagacttgaccttgtgcaaccgagcatacatgagacatcatccaacacagcatcactctgtgtctggtcctgaaaattcagtaaggttgcgaattggttcaaaaaccttccaaaatcgaaactacaaagaatcaatgctagaactttcgattcaggtttacaagagctggatctaaaacagtgactatcattctctatttaatgggaagaaagtatcatctcaagtaaaattgaaagcaagaagaacctacctggaaaagcttaacgtcggtgtagaagagatcacgcttagtaacgtgaatgttcctgaggcagagttggtggataagggcgaggatacgagtggtgatggtggttttcctgacagaagaaacggaggcaaatggacggagggtagatttgtcttttagcactatacggtcgagctcaggaacatacagctgattcgaggcggcgcgtgaaggaacactgaaggagaagccatcaccggcgagaatagaacgggcgatctggacgatgactgtctctatctctgtctgcacggaggagagtgagagatctgcgacttcacgacaggaagatgatagagagaggtcagctagggttagaggtttcgatgaagaggaggaggcaccgccggctccggcggcggctttgatagaagaggaaatatacgatttgagaagctccgtgataacgtcgtctgattccagaatgcttttgaaaggaagttcctccgcctcgtcatcttttgatcgctttcgcttcttcttatccgccatctgtagatagccacgacgacggagacgcggcggcccagagagttctggtactaacaatggcgggaaaatttaccctttaggtcaacgtatctcgtgaatgttatttctagggtaaactaaaggggtagacttagaaacgcatttattaagttaattaattgtgcttttaacgagatgtcgatatgtccgagtggttaaggagatagacttgaaatctattgggcttcgcccgcgcaggttcgaaccctgctgtcgacgatagttttttgaatattttttattgggttaaaatctttttgaatggcccatatggtaagcccaatattaactacatctataaaatctttaaacgctagtctcttccgccaaaatctattcaacggtccagatgagtttaccacttgacgttttccttacccaccattacacgtgtcagttcaaaaagatcttaataatctgccactagcctcctgaacgactgtttttgatataccatccacgtcactaatcctcgccaatatatgatgtggaaatatccgctctgacgtggaacttctcgaacgttcgggacctctagttttgtccatgtcagatattacgattttttaatttcctttttttttttgttggcccgagacaaatctttctaatatctatctatctccggaaaaataaaaatcggtggcttatggtcgtctccgatttccactctctgggagacagaaaaacctcataatctcaaaaattgttcactgtgtttatcttccttctaaagttctaagaagcttcgattcttaattctgtttatcgatttgaattccttgtttctatttcccaaccgttagctgattgtgctagatccatttttctggtgattgatgcaacttctggagctcgattcttcgttctagtatttgattattgtaagatcagtactctcttggaatttagatgcttttgtatggttggatttttatttgatgtaatttgtctagattcgattttttgatgattcttcaaaaagttacttgattagttggttttttgagaattcgtcgttcttcaactcttttttctgttaatctgagatattgtacgattctaactcctctagctattgcaataatcgaaattagggtttatggctgtgttttgatattttgatcatttgaattcagcgaagcagagttggtgtgatg

SEQ ID NO: 28694 - DNA, 3003 bp, Unknown
  misc_feature (1)..( 3003): 2750-1469P.txt file - cDNA_ID_2998224; gDNA_ID_2926243; Annot_ID_142937
aaaatgccaacttcaaacatttattttccgcacaaatctgcaagataataaggtctggatcttcacacctttgagttgcacaataattaacaacaaagcagaaatgttggcaccactaagagagagattaataccttgattgctgttgtgtatgcaacaacatcaggtctggttccagccgaatgcatagttctcaaaatctgtgctggaaaagaatttctatcagggaacttatcatattactgcaaatcccatcattgatattatgaatgtatctggaagcttataaacaaaagctggagaagtatgatcaccttaatgctatatctctgttttaggaaagagatttgaatgattaattttaaaaaaaaaatcaagagaaaagttaactcacccgtacagcaccttctacatcgcctgaacctccacacatatcaatcaaagtcgaccatgttatttgattaggtgaaagacctaggctcttcatctcatccatcaattcttttcctcgatagtaatcagtaccacaggctttcaagagtatattatatgtagcagttgttggcttgaagcaaaatctctttgaagcttggatataaggtgaattagaattgcgattcaccaaagacccaggaccattatttttcaatatatttgggctggaagtgcgacctttactaactatgtcatctgcatataaggattcattaacggagcttcctttccaagattgaaaaagacgaaaagctctgtcatactggcaagcttcaacgcaagcatgcagtaggatgttgaaacattgagaattaggctcgcagccagatgcaagcatttcttcaaataggtgatttgcctgctctactaaacctgcattggcacatgcactgattaatgatgaccatgtatgagtatttggggttacaccaacagatttcatatcatctttgactttgagtgcccatttccacatctttgcatctgcaaaaacctgatcttaagacattattcagagacttagggatataaaagcaaaaactaatgataaacttagttttccaaaaatactgatattgtacctttataatagtacaatatgtaaaggcgtccaacttcaacaatccggaagattccattcgttttgcttctttgtatatatcctgggcaagatcaacccgtccagccaggcaacatgttttcagtagtatgttgtaggatgtcatgtcagctgtaacatcaagtatctgcccatgacatgtagagtttcaaggtcagtccacacccactcctaaatctaaaatactctctagacaattcaaatacttgtattcaagagacagaagaaagaacatacctgcatattcttgtatacttttagtgtgtacccaagatcatgggaattaacattcattagactgttaataacataaatatttggcttaatgttttctttgagaagatcctgccacaaaattatgaattaactacaaatctcaaatgcaggatggcagacaaaatcgagcgtaaaggatacttacgcaaaaatacagtataattagggaattacctcatatatgtacctcgatttaacgtaatcaccacacaggccacaaacatctatcatcgttcggcatatatacatgttaggagtatccaaaatctgtttgcaggcttcatatgctgtcataacagagaccatatctcctttctttccgaaaccatgaataattctacaaagcaataactctgtatgcggcaaaagacatgcgtatctgcattcaataatcatcaaatcgttagcagaacacactacatccagcattcttgtaataactttctgaatttgaaaaccattaacctgaatcgttatgtgggaaacaaggcttacctaatagctaattgaggattggaaatttcaacacaactctttacaacatcaaaaggatccaccaactctttgattttgaatccgagacctgaaataagaagcaggtaatcaattcaagagttcatagtcacagtgtaacagcaagaattgatatagtatttaccggcaagtatctccattagatcaatagctttctccacttgcacagagttagccattgctcgaaactgtttcctcattaatttcacagacgaatcatcgacaaggtccaatggagcaattcctaccttctcaattctcttcaaagtgtaaacgacgctctcaatcttaccttgtcgaagattcgacgaaatccctttcgataagagatcataatcaaccatggaagcgaaacgagccacattagctccggactctgcagccaaagtctcggcgatgagagcgacgtcctcaattcgaccatcctcagctagcttcgaggcaaaatcagcgtaatactcaagcgagccatctggaatccatcttacgacattggagaagtggctagagagagaatgagtcgcggagactgaagcaggagaaggtgaatgttgctgcggtagtgacggaagtagcttggtgaaagaagaattggatttagttttccggttggactctggtgctgtggcgtaacagcgacggtggtgatggtgaggattggttatggcggaggaggagccaaagacaataacaaagtctctcattcctcgccaacggttaggatcatcatcgtatcatcattgtggctcagtttttctggttttctaatttcatgtaaatcaaatggattggatttgaaaggctatttttacaacttccacaccggaccggatttgtagtgttaaaatacaccggtatatataaaccgatttggtactttgattttaaattttaagaaataaaataagaaaaaggagaaaaatggatggcctgaaattgcaagcgaagcgtctccacatattatacaccaacttcttgcccgccatgtggatatcgtcgtcatttctctctctaaccccttctctcttcagtctctctctctctagacgatctctatcttgaataaaataccgataatg

SEQ ID NO: 28695 - DNA, 3003 bp, Unknown
  misc_feature (1)..( 3003): 2750-1469P.txt file - cDNA_ID_2998236; gDNA_ID_2926243; Annot_ID_142941
cgatttttaagaactatgatggtgtttttcaaactcttttcaatctgtttcccttagtgctctttactcgctattcaaattcctccatttgaatatttgatgatgatcatcttatcaaacaagcgccatgagttgataagaataactggaacttcaactttattagttattgcacacaactctacactcaatcgaataatgtagatagtccatcttgactccaaccaatcgaaaatacgtgcctcaggccctttagtcccgaactatgtgttgtcttacttccactggaaaattaaaaaaaaaaaagacttgagcctcaagttttcttatacagtgggataaaattataagcagcctttgcttgtatgttgggaaaggttgctctttgacttcgatcgatgacttgaacagatttgtccaacttacaggaatccctgtaactagtgcattgtttggacttggctcttacctttacgacgacgatttttccttgcaaatgtttagaattcagcagcaggggacgatggtgtatgcagatcacgcttgacgctttggaaaactgcgatcttttgctcgcttttggggttgaaggtaaggccttccgcccttcccattccctagcaaagcgaaagcgaaagctaaaattgttcatatcgacattgactcatcagcaatgtctatggatgttaagcttgctttgcaagagatgaacaaatacctgagctgaagaatcttgaatctggactctggaggaagcagttgaacgagtgtaagcagcaatactcccctttgagcatcgagaagcgtgcaggggagcatataactaccactggtccatccattagtttacttggccttgtatggttctttattaacttggcacttatgtggttgctctttaatttgcttttaataaattaattgggtttcgtagatttttttacaaattcataagtttcgtcacttttccttgtaaattacaaggaggttcttagatttttttaaaggtaagtaaatatggggattatcagtaaacggcataaaactgagtctttaaagtctaaacaatccggataagtcggtcaaaagaaagttgtgtcgacctgatgaagctttgtggctctccgcttggggctgaaccagtcctattagattatgcacaagcccacaaaagactttcttgtacgtcaagtttttcttataatcgtagaaaatataaaagaaaacaaaatactaaagtaagatctttttttgtcaataaagtaaagatttcccctaaattagttgaaattatgaatatcttaactccaaaaaagttagtcacacctttccgtataatatggtcagataacaactttcgtctctttctttgtaacattgcaaggaaattagtaattagaacttagggtccgaatggtgattgcgttttgcggtgcgggagaagtgcggtgcagttcaaataataacaaaaatacgtaaatacatatgtatatgtaaagattttaatactgttacagcactattgcggtgcagttttgggtgcggtgtatatcaccattcatgatcttagaatttatgtaaatatgagaatattattgtcaataatattttaatcaattgaatatcaaatactcattcataatctggtcgatagacgttttctcttgaacaacttccgaaccaattattataattttgtgaccagataattttatgtgatcgcccttttaagttatcacgaaagaatcgggttcaacttcattatgtattttttagaagatattgccttgattttctcttaagcttaacaagatatactcttgatttcccattttcccttattagttggcgaaagagtattattttaattgacctgacgtatagttattagaacttcctatacgaaaccctaaagtaaacgattaataaagccttaactttgttgctttaatatgataaaaatttaatttccaaagactaatcaaaaagccaaaaaaggtttctatttaagctccattaataatcaatggatttaccataaaaatgaactaattgtaagcaaaggaaataaataaaagctagcttttggattaattgtatggtttaaaactgttaataacgacacgtgtcacaattaaccccacatgaggcggtgctaaatactctgatcctaaaatccaaaacttcacgtccgttggatcttctctcaccaagttttgaaaccgtccgatctaatcaacctttcggatattcgatgtacacagtacttaccgtgtgcacatcccgcagatgataaacattttagaagtctggtctaattaacaaaccagcgtcttagcaaataagctaaagaaaaaaaaaagtatatacatacacacacatagtatatatatatatattatgtgtggatttcttctttctggagattaaaattttccagagataaaaccctagagagattctcatcttcttttcttcaatctctctgagaatttctaggttttcgttaccgattgggtcaatctggtgaaactcaaggtgtgtgtgattatgagttattttttttgtttcccttgatttttaatgcgatcatgatcgtttttttttcttctgttttgtgttgttctaagttgatcgtaatttctatttcgaatctgttatcgattgttatataatttgtttcctctgttttattgttcgttctcgatagtgaagtctctgtgtgtgtgtttgttttgattttatttttgaaattgatcgtctttgtctgtgtctgtgtagattctggtgagtaataatggtgtttctaagaattgccaaaaaaaaaacctaatttttgtttttgtttatttccactgattttgtggttagtgattgactcttagttgtactttcttatattttttttttttttgtatgttgatgtataaagacttgaactttgatcatttgcttggttacaggttgagatcagataatttaattggaagattttaggttatg

SEQ ID NO: 28696 - DNA, 3000 bp, Unknown
  misc_feature (1)..( 3000): 2750-1469P.txt file - cDNA_ID_2998240; gDNA_ID_2926243; Annot_ID_142942
aacccttgatggttgagcatcactagagaagctttcttcagattcttccataactctgaatcgtctgttgtgagtatcccatctccaaaaacatcaaacacttgtttgaaatcgggacctttggtgtaattggagaagtttgagctcattatatgatgaatattagttggatcaacagtgaacaacatatccataccagtgaaccatgggcctttaaatggaaatgtcaagtcagagttctcgagaacctccacgctgaagtcatagatccgatggaactccaagagcagacccggaagcatcccgagaaccggccagttcccaaggaagaagtgaaggatgataaagcaaaagatggctatggaagcttcgaataagcttattgaagccattagaagagtttgatttatacacacacacacttgtgatggtttctttgagtgcgcaaacaacttgatttatttatatacatgtagctattttttttaacttatcattattatgtgtagatttttctttcaatatccttaactgaccatttcttatctcgaagactttatatgtgaacacatgcacattatcacatacagagagacaagggggcaatggttggaccgtaaacgattatgtatactttgactattagttaagagtaattcacgaaaaccaaaggaaacacatgaccaattcatatacaaaagcatctcaagaaatgacaaattgaccaattccttacaaaaactgaatctagctagacaactttcccaagaggttatctcagtgattcaatgtaaacacattccacgtgatccaagatttattaaaccccctatgaagcatacaatgaacttaatctaatatcacaatggagacattattgctgcgaggaagtgttgaatccacctgatgcagttctttaaaccttgtttcattaaggtcacttcccacgcgtacaattattgtctccagatgcagttctgagcacaaattccacaaacaaagacatgagctcaggcattagcttcgttaatccaagtgttgaagagattggaagatcattgatctaagagtcaatgatttgaccttgaatgtcggaaaatgaacaccattgagctcggcaaggcataaaatctaacaaaagatatacagagaaagatagtgaatactgaagcagcacctaaatgatgaaaacttatccatcaaccataatctcgagtgactctgcaacatagtagtgagttctctataggctttagagaatgcaagaatggctaaacatatctgaagaaagacttccccaatagtaaggttctgtacgttctgcaacttttctagcatctttagcaccatgtcttgaagacaatctggcttcaaggttcagctccaccaaactatatgtcgagtttagcttcggttaaagaagagaaatcaactaaactacatggtatttgagagtttctcaaactcaaacaatgaagatgtggcgccacaatctgcaatggtcccttaaaccaaacacagcgatctatcaccaaagatcttcagattcagtgatgtcttctttttcgatctgttattttttttctttttttttttgttatcagaaacaatttcgtgaatttttgaatagtgtaccaactaattatattgttgttactcaaataaatacatagaccgacgaattgctaaaagttctgagatagacatttacaaatctatgtgaaaatatatattcgatttagatagatagatatcccttcatgcacaaaatcatgcatgggtttcaattcatgagatataaatttaggcggcacagtcccacgataatgtaaatagtatataggtggaagttgaacatctcttttctgataaaaatgaatgtatattaaccattttgattgatacgatagagactatgatttgttcttaaaaacatctaatcaacctactaattatagacattacctaaaatataattaaggttcaaattatatagttgttagctagatataattaatgtttgtttactaatacataaattactaagatgtttacctgtctttatcgtatcagatttatatatatgctttttgtatgcatcaatcatttatttcacggtttttgatttatgaaaaaattaaattgatacattgtttgcggtcaaaaacgaagaaaccaattcaaccacttttacaattgtccaagtaaagagtgtgactaccactagctagtatgtgcaccatgaatgcgtcaggtctgcaacaagtttgaagctatcaatggccttacaggtttgagctttagttcttgatggatttgagccaagtcattcgccataattcaaggactactagacaagaaaggtaagttatttcttcattacccggaggcctcatcaaacatttatatttctgattctactacaaaatggtttaatttatcttgttttgtgcaatattgataggatatgtttggtccttttcaaaactatgaagcacatgccatctgagggatggccagtaattaattcgaccccttttttgtatcggctaaactagtaaactgtagatgcaaacaaaacaagagtgaatacccacaactacgtacactgctactaagtagtaacataggtcaaatcattaattgcaggttatgttttgataaaattcataaatcaaatcattaattaccccaaccgcaaatcttgactcttgcttgtctcaatagtcaatgatcattaagactccatattaaccttttacgcaaattgagaacaagcattgataaaataaagtatcaattaattcaaggtttattcacatctgtattcgctgttgggtttcatttataacattaaagcacatttcttatactactagctagatatttgcaccacttttttttattacaaagttatgttttgcaagttgtgtaataacttgagttcctataaatagcagaggacggtctaaagccaatttcacaattcgaaccaaaatg

SEQ ID NO: 28697 - DNA, 3000 bp, Unknown; identical to SEQ ID NO: 28696
  misc_feature (1)..( 3000): 2750-1469P.txt file - cDNA_ID_2998240; gDNA_ID_2926243; Annot_ID_204176

SEQ ID NO: 28698 - DNA, 3003 bp, Unknown
  misc_feature (1)..( 3003): 2750-1469P.txt file - cDNA_ID_2998244; gDNA_ID_2926243; Annot_ID_142944
ttcttccttgggaactggccggttctcgggatgcttccgggtctgctcttggagttccatcggatctatgacttcagcgtggaggttctcgagaactctgacttgacatttccatttaaaggcccatggttcactggtatggatatgttgttcactgttgatccaactaatattcatcatataatgagctcaaacttctccaattacaccaaaggtcccgatttcaaacaagtgtttgatgtttttggagatgggatactcacaacagacgattcagagttatggaagaatctgaagaaagcttctctagtgatgctcaaccatcaagggtttcaaagtttgtcaatgagtaccacgagaagtgctcaaggatgggcttgttcctcttttcaatcattttgcagagaatggaacggtggtggacttgcaagatgtgttcaaaaggtttatgtttgatacgactctagtgacagtaaccggttctgctgatcctagatctctctccattgaaatgccagaggttgagttcgctaaagctctcgatcatgtaggagaagggattatgcatagacatgttagaccgagactcttgtggaagttgcaaaaatgtgttggatttggacaagagaagaagttttcaaaagctgacgccactttaaatcaagcgtgtgcaaagtacatattagaaaagagagaagagacaagatcacaaggttttgattatcattccaacggatcagaaagtgaggatatattgacataccacataaagatagatacaaccaagtacgagctgttgaatccgagtgatgataagttcctcagagacaccatcttagctttcgttctagcaggaagagataccactgcttctgccctcacttggtttttctggcttttgttggaaaaccctcaagttgtcactaaaattcgccaagagatcaacacaagtaatggtggccaagagaagccatcttgtgaacctatggagtacttgaataacttggtatatttacatggcgcgttgtatgaagcaatgagactctatccaccggttccattcgagcgaatgtctcctataaaaccagatgtgcttccaagtgggcacaaagttgactcaagtatgaagattttgatctttatttacgcgttggggaggatgagagccgtatggggagaagatgcatcagagtttaagccagagagatggctttcagagacaactagcttgagacatgagccttctttcaagttcttagcatttaatgcaggtccaagaagttgcataggtaagcaactagctatgactctaatgaagatagtggtcgtggagatattacaaaactatgatattaaggttgtcaaagggcagaagaagattgaaccagctcctggtcctattcttcgcatgaaacatggtcttagagttacacttactaagaagtgttgatcgttaaattaagaataaaaatcatttgaaatcatatgtagcctaattaagaatgattctctctaccttggttacaagattatactgcttatatttgattgatgatgtgatttcctcatcacagctcttttaatgtacggaagattccatacttatcaactgagacttttatttttatgattggtgtgtgtataatttatctggttattagaaaaaaaaaatccataaaggatgacatcaaaaaggagaagatatgtttgttggactaagtttgtgcactttttctctgtagacataccaaaaacagagccactcactcagtcacatctcacatgtcgctttctgcatgtaatatgtctcgtcagattttcagggtcaaacggtgtttttgtctcgtttttagtttcacagagaccaaaagatcaaagagatatatgtgcttgtacagttgggatgtttataccataatgcaacagcttcacattaatttgacactttcccacacaacaataatgttagtttcttgaacccatgtgagttttgcagtaggtaggctatactaggaatagcagactgaacaataaaggaactaagcaagatatagaatctaactaaagaatgcaaaaaaacagagtgaatatttactgaaacacataagccaaagcaacaaaaacaagatcaaggtaccaaagttcctcaggcatatacatataaaaaaagataaatatgtaatgaagaaaaaaaacagtaattcctttgtcttttgtggatctgtgaatttgtttttcgttgtatggtcgagccaaatggttatgttgggccttagccttttttttttttttgggggcaaacaagaccttggactttataatagttattacttctttgtttactatagttctttttttcgtaaatggaaatttattagtaatatatttcacctattaaaaaattgtttacttgattaataggaattttttttacaaaaatatataacacaaacatcgagaagcctaaacatatacatatcttgataatttaatctgcaataatttctaaaatctaatgatatactatatataatattattagtatgttttacatcagaattttttgtcttacttagtagaacaaaatttagataaaagaacacttacgtaaaaaaaacataatactagtccttttgcatcaatatcatcaaatatattatataaatgatcgaaatattatataaacaatcaataaaaacaaacctagtcatatgaaaatattacattataaaaaaaaagttattttttatgtcaaaaaaatcattcacttcgtaatagtcaaacaaaaatgacatctgttaaaaagataaaaaaaatgacacctgtaacatgttttaaaagttactttcattcgttagaaattattttatcttttacttcatttttttttggtctttattcccagaaaaaaaaaatatttatacagaaagacagcgtctccgcgacggttgaaatccctagccaccactctctgtctgattctcccctccccgccaaaacatg

SEQ ID NO: 28699 - DNA, 3003 bp, Unknown; identical to SEQ ID NO: 28698
  misc_feature (1)..( 3003): 2750-1469P.txt file - cDNA_ID_2998244; gDNA_ID_2926243; Annot_ID_204179

SEQ ID NO: 28700 - DNA, 3000 bp, Unknown
  misc_feature (1)..( 3000): 2750-1469P.txt file - cDNA_ID_2998252; gDNA_ID_2926243; Annot_ID_142947
gaatagtctttccattgttgaaaagccaatacctgagctcggttaatcacaaattgcagcttctcagtcgcatcatagcaaggaaagcaagctaaatgcttcatataatccacaagtttagcaggttcaaaagagattccatccgataacttgtctccaccgtatctaacacttgagtcctcacgaattccagcattgattatgttctgagtcttgagtttgttataggcttcctctgaaacacaagagcaagataaaccaaactctactctccttgaaacctcatccaaagcacaatcaatagcatcacgaaactcagcggagttactctgctcctgcatttgagagaaattctgatgaaaaggctttatctgagatgcattattccaagcaaatgtacaatccccaaaatacgcaaccaagacatttcctttcttgaagtgcctcatcgcagctttagaggcaacagatttatcaaagaccagtccaggccaccatggataacttcttagtttagcccaaaccaaatctgagtcaaaaagcttcagattctctttagaaaatcctttcttatccttgttcttaagcagatctgaatcagcatcaaaatcaaccccgttacagagactatccttatcatcacgagcagagacaaatacttttcgctcaactccagtgaggttcactaccaagtcctgagcttgaaagctcatgggatcagctagggtttcagatgtgtgagccataccgtagtcaaaactcgacgcatttatggcaaaatcagcgttggagtcagattcgactccttctggttccgtagacataacgagcaccaacaaaaatccctagacaacgaagaaacaaaaaaaagcagaaattgcttcagtatatgcttccattaaagcaaaaacagtacatcatacgagagacgaagaaaataatcggagagcaaaaaaggtggacagaacctccggtggcggttacggtttcgccggcgacgaaagcttagattttgggtaatgaagaaataacagagtttctttcgttttgagggggtttatgagagagctacgtgtacgtcacgaattattccacgtggcagtacttgattttgtctcgactcatcacaaccatacattattacattgagtgaggttcaaaattttcaaacttttgcttttccctctttatttgaacttgaatttgacttgtttttactgatattaaatagaatagaattttactacaagtagattagaattttactacaactagtttatttctaaagaattaaatttgttaattttatgtttaatgagaaccaaatgttttcctacaacattaagacacttttttataagttttctaaacttgtttaatagtatgttttactaaaaagtgatattttgaaaaacctcttttggggatatttttaaatactcctcatagactaacaaaataatatatcaattcatatataaacacaataacaccgtttattgtgtaaagtgcttagctctctcaatggtcaaaaaatgcaaaatccattttcttgttatgtctttgtcatttttattgttatgtcatgtggcgtctcaacattgagaggatattttgggagccagtaacgttcgagattcaaaattgtggatgagattttaacgattgaaacaaaagtactaaaaaatagtcgtttattagcacatgtactcttttttttgtttggacagctattagcacatgtactcttatatgtatgtatgtatataaaaacgtgaatagtgagtggaataagagaaagtagttaaaattcaaagcgataagagtaccattttgtttttattatattctattctatggacgcgattcctctgcgttgtttacctattcaaatgaagttctaagccaaaaaaaaaattagtcgatttgtttttatgttcataacaccccacgggctaactaatatggtccaaaacaatataacaacaacaaaataatcacgcaaaaatctaaaaaaccagccttgtgtccatactccacccacatatataaggagagaaacaaaaagagcgtaagataaatcaaggagaagattaagaaagatggtggctgttcagttgtttacctggaagccattgattctaccttctcaagctttgacaagagatcgattagcttcttttcacaggttttgtttttgtaatttctttcttatacttgatatttctgaaaacaattgcatggtggtgactttatccataagtgataagatgatgattgtgaagtttgtgatcctcagaagattttgagtgtttttgttagaaacaagctctttatttccaaacaactgatacagatacttaaagaacacggtatttatcatttaagcgatcaatactaagtaactcctctcaacaaattctatattctaaaagaaatgccaatgcctctgtttatttctgtgtcttctcttcttttctttataatccgaaccctctagttccgtcagcgtcttcttcgtccttatcttcaaaacttgcttgggcatatatcacagtttatttttgttgtttcttcttccggtgaattttacttcatgttttgcttacagtaaatgtagccaagttcaatggtttcgattagaaaatgtgacggttttagttaggagctctgaatttgggtttagagtttagtttcaaatggaatttgggtttgtaagataaaggtatatcgtaaattgattcaaaatctggaaattgtcattcaatcaaagctcattgggttgtgatgtttacaagttgtgtatctctgattctttttttgcaggagcttgagtttacactctctgcctttaggtgggattaagtcttctagtttcagaggtcaggttctgtatatttttccaactttgatgcaattctttacggtctcattgttgctgttcttccacaattagactcattcttgattagctaattgtattttttttctctctatatg

SEQ ID NO: 28701 - DNA, 3000 bp, Unknown
  misc_feature (1)..( 3000): 2750-1469P.txt file - cDNA_ID_2998256; gDNA_ID_2926243; Annot_ID_142949
tctgtttccactacagtgtcctctgtttcttttactctttcaagctggcctttgggttctccaaacaaagcatagaagatctgtctatggcactcatcgcagaaatagaagaacgagaagtgaccttcgtttcgaatcttatgtacagttgcttcaggaatcattctgctaatgtagtcactcattgatggtggagccactcgatcctccattccctttaaagaaacagaaatcaaggtttgattaactttactaaacaaactaactgatgcattgtatggtgcagaactcacctgccatatgtgaatgggttttcgaaatccgattagttcacattcggcttcactgtacattgacatgagccaagaaaggacaccgttggttgcacatttcttctgtgtgcggaattccgaaagagtaaagccccaattcgatacttgaagcacggcttcttctacaaatggttttgtgattccttgacggactgattcctccacgttcctttgataaacttcttgaaacgttggatctttgattaaaagtttatcctgaaagatgaaaacagagttagcagatatgatgactccttctcctagagaactcctctctttgtgtttgtgatctacaatggaggagatttagtaccttttctcctaatgacaatgccatccactgatcgagctgatcgaggttaccagagagaaaagatctacggtagaagaaaggcagaagaattggaaaccgccgagctaaaaagtacatgaatttcctctttgttagccattgctcccatgtttttaccacctcttctttaaccatgcttggctcatatggattgatcacgggagccaccattgcagctcctgcagtttcacaaaaccaaacccactgagcaacagtcttgcatgactggtatgctaatgataggaacagtgttaataatacctgcaattttctcaggaaaatatttcattccagcccatgtatgaatactaccagtagagtagccaagtaaccaaaatttctcatcaattccaatagcagctgctaggttaatcatatctgaggctgatgagctaagatttcgacctcgatgaggatcactctctccaaaccctggaagatcatatgacactaaacggacaccatactccaccaacaatgacttcttcactccaggtatgccttgattaagtacacattccaaacattagaggcaaactaaacgtaatgtgtagtaactaaaaccgatggaacactgatttgaatacctgcaagtcgagaggaaagaaaagaatgaggcataactaaagagtatcttgctctttctgctgaaacacctagctcttggtaagctatatatctaccatctggaagctgtacacgtgtagcaccggtaggatgtaaacgcagtttcgttataaccgtcactggtctatcgttctctggactaaagcttaatgctgcacttcaaagttcaatatgtcaatgcaaggaatcaaacctacaatactaagctatttaaactacatataaacaatactgaatcaacctcagatactaagctaataataacacattgtgttgatttgattacctgcgagtgctaagaggaagacgaagaaaatcacaggccaagcgtgaatgggatcacgatcctcaggcaagaactcgtttagaaagctaagcttcttcgacactttagccgccggtttccggagcttccgtactaggaatgagtcatcagtgaccaccgtctgctgcacaatgtccttgcatcctttcgcgagctcaagaagcatctctccccacgatttcatgaatcccgtcacttgatctttcaatgtctccttcggttcggatccggatccatccgccgacacaaaacccgatctctttgtagccgccgttaaatcgatcggtgctccgtcgtatcgtaatccggcgtcaactaggctcgctaactcttcctgccacgtaggcactcctctaatctcctccatcttcccaatccgaacctaaacccgaaccaactcttcacagcaaaacctgtacattcatttatatagaagaatcagagagagaaatgagctacgagtgacacttttacatagcgtgaaattcaagctccctatttttctttttaaaatctcggaaacaaaaattggaataacgaatcatctcttttttttttcccttaagaaagcgaaaggagacaaaagtttatcttaccaaatgacgtagaaacagcttcgacacaagactaatggtttgattcgaatcttcaatttattcttcagctaaacttttttttgtcacgttcgtctttttcaatattctccatcgcctcctggatttgactggctttatgaaaaatcccagtccgccattgacgaggttctggagcttttctttgactctctctcttcctctttcggatttagctggcgcattaataaacatggaccactggatcaaaattgcctttttgaagtaaacggttgtgatttgtccacgttggtctgtcgtggtatcgacggttaagtggtggggacgggctgaaccagtgactgtcgtgcgggcagtgcactctttgtgtgtcccttttacctgttacagccggttccgtaaggattacgggttatgctgatgtggcggaagtatttattcccagtattaattagcatcagagtatacgtgtatgtcatctaatgcgtccattagatccaacggtttagagttcagcttttaaaagcccaaaagaatgatgagaagttgagacaattatagtcaattttttaaaagcccatgacttaatgggcctactaattgatgggccaagtattagaaatccgcggaggtagaaccagcttcgcatatattaagagtcactgccttcactaggtttagggttttctcagccgcttaagagcttatcatctttgtgcttcctgcaaatagctctttgctgttgatctttctcctccatcaacaaacatg

SEQ ID NO: 28702 - DNA, 3000 bp, Unknown; identical to SEQ ID NO: 28701
  misc_feature (1)..( 3000): 2750-1469P.txt file - cDNA_ID_2998256; gDNA_ID_2926243; Annot_ID_204184

SEQ ID NO: 28703 - DNA, 3003 bp, Unknown
  misc_feature (1)..( 3003): 2750-1469P.txt file - cDNA_ID_2998259; gDNA_ID_2926243; Annot_ID_142950
ttgaaaagttcattaatgaactgttttgcagtaaactcaatggtgactcaaagaaggcaagtatcactgagacatcagaaccttgtgataagaaagactctgcagaagaagagatattacctgcaaataaagaaatcactggctcaggctcgaaagagcaaattggtctcaaggactgttctgcagattcattaccaccctatgctttagtcctcaactttgcggattcaggttcggttccatctgaagaaaagctgaacgagatatttaaacgttacggtcctctccatgagtctaagactaaggtcacgatgaagggtaagagagccaaagttgtgttcaaaagaggggaagacgcaaagactgcctttagcagcgcagggaaatacagcatctttggaccttctcttctaagttacagactcgagtatgtttgccccaaacggaaaaaaacaacatgactgattgagtcacggcatctcttaactttcagagattagggtctgatcagatatcatcagctaggtcttatgatgagagtagattttcgataaataaacgtaacctaggatttatgatgagagtaggttttcgataaataaaagtaacattcgtgtgatgagactaattcttaactttatgacatacaaaaccaaaactggaaataccaatgataacagtaaagttagtcgcaactgaagatgaggcttataagttaaaagagtaaattgattaaacaccaataacattaaacgatcatgtcttaattcaaaaactcataaaatgtaacacaaaatcaagttcttgaaacataaagtagaacagaacaagacttaaactgaactatcaaaaaccatatcaaaagcttgaagctttttgtacgggttgcttaagatcttggcttctccttcttttccttgaagagggccaagagtgaaacaccagaaaccttcacgaccttgaacctaactccgggaatatctcccacagcgtgacccttacgaccaaatccagcaatcaagacctcatcctgcaacaccataaacaagaaatgtatcagcatatgaatgaaactaatccatagtgtgatgattgaatagtcatttcatgtgacttacgttttcctcgatgtagttcaaacaaccatcattggggacaaaggcagcaatcttctttccattcttgataagctgaactctagcacacttacggatagcagagttaggctgcttagcctcaataccactgcatcatcaaacacaagagtctcatcaacgaccaatgtctctactcaacaaatcaattataagaaaaagtaaacttgaatgttatatcagacttacattttctcaagaacaattcctttagcgtgagaagaaccagcaaaaggcttcttccactcatttcccaagtgagacttcttgtactgcttgtcagcccacctctggttaattcggagtctcttcagcttacgcccagctcccataccacgtgtcttactgttaacaaatcatcacaaaataacatttgagaacaacttcactcgataaaccatagttaaaactcagaaaatcaataagaaattcatctaaataataacaagacgatagaagatttatctctaatacatcagcaaaagtgagcttcaaaacccaagagaccatagatactcatacagcgaattttaaatctccagttatcaaccatactagaactccagagtagctcaaaatttacacaatctattgtggatctatacataaaaaacatttagcaaacatatccagaaatgaagacgcatttgctatagaatcagttccaatcaaaaaccacaatcaaaagtcgaaaacatgtaacaatttcaaacaaaaaaaaaacacagcagactctatagaatccttcataattcatggaaacagcaagtgaatcagataaataaaacgctaaacagagaaatgagataggaacacgaaggatagatctaatagaggagaaacgtaccccatgtttgttgatggaggagaaagatcaacagcaaagagctatttgcaggaagcacaaagatgataagctcttaagcggctgagaaaaccctaaacctagtgaaggcagtgactcttaatatatgcgaagctggttctacctccgcggatttctaatacttggcccatcaattagtaggcccattaagtcatgggcttttaaaaaattgactataattgtctcaacttctcatcattcttttgggcttttaaaagctgaactctaaaccgttggatctaatggacgcattagatgacatacacgtatactctgatgctaattaatactgggaataaatacttccgccacatcagcataacccgtaatccttacggaaccggctgtaacaggtaaaagggacacacaaagagtgcactgcccgcacgacagtcactggttcagcccgtccccaccacttaaccgtcgataccacgacagaccaacgtggacaaatcacaaccgtttacttcaaaaaggcaattttgatccagtggtccatgtttattaatgcgccagctaaatccgaaagaggaagagagagagtcaaagaaaagctccagaacctcgtcaatggcggactgggatttttcataaagccagtcaaatccaggaggcgatggagaatattgaaaaagacgaacgtgacaaaaaaaagtttagctgaagaataaattgaagattcgaatcaaaccattagtcttgtgtcgaagctgtttctacgtcatttggtaagataaacttttgtctcctttcgctttcttaagggaaaaaaaaaagagatgattcgttattccaatttttgtttccgagattttaaaaagaaaaatagggagcttgaatttcacgctatgtaaaagtgtcactcgtagctcatttctctctctgattcttctatataaatgaatgtacaggttttgctgtgaagagttggttcgggtttaggttcggattgggaagatg

SEQ ID NO: 28704 - DNA, 3000 bp, Unknown
  misc_feature (1)..( 3000): 2750-1469P.txt file - cDNA_ID_2998267; gDNA_ID_2926246; Annot_ID_142956
tggaacggaagatgaggagatatggaccccgctgttgaccgacatcgacgtggcagtttcaaagttgggaatgccatcataaagtaatgaccaccgttgatacgctctctttctatctattcccaaggcagctctctccctcttctctcttctctctctgcctctgctttccgttacggttgcacttatcggccagttcaagattctaattaagttattgcgttttgcattgtttatttcattcgtttcccatatgaaaacgtgaatgtgaagaagatacgttaccacattctactagtgttttagggacatgggactttcgtttttatgagtttcataaaaacggaccacttcacttactcgagatttacaactttaacggctaacttacttatcctagtcattctctttatttaatcacccaaccaatgtattgtattctattgccacgaaaaaaaaaagcaaggcgggaacagagaaaaagggtttggcattatgtgagcatgtgagtgaggctataatgcatgtttcaatgttcaggtttcatcacgaggtgaattgtttgaatccccaatatttctgtactctctctgaccagatatgctgcagatgttgtaacgtgcttcttccggctgctcaatcatttttcttttggaccaactcacatctctgtgttaatttctcttctgtttatataacaaattcatactacaaactttgatcaatttttttttatttatgggagaagaaggagctctaatgaggtcatcaactttgatcttgaccaatgaggcaatgaaaacagatgacatactactgtatatccaaaggttgtcagaaaacccaccttaccagtatttgtttactcatcacaaatttgaggaatattttggaatgcataaactatctttttagctgtcgaataaacttaccgtaaatcacttctactaataccctctacatttctcaattttttttttaaacctcataacttgttttaatttttgagacatagaaagaaaaaaacaaaagggggttctactttaacagactgtaataatacagaagtggaggagaagagtaataagtaataataaaaagacaacagatgaggcatgtgctctgtgttccattatcgttctatctatataataaacataggtatgtatgtattctgatcctcgaaactagcgtgtgtgtatcatggagggtggatgtggccaaaagttatctaaaaagaaaaaagagagacacacttaacggtcttcaagattgtacccacttcctcattagctattactctattagcccccaaatatcactatgcacatttcagcttctttcaacaagatctagaataagaagatgagaagctgtaagcctgaaactccattactcgtatgtcagatccggatcccatacattacatatacatataatactgtttacgtaggtgcaactaagccgttctatgcaattccaatgctcattaatctgtacgctttttctctgctacagccccattttggatcccatgtaaaatgatatcctagcaagaaactagtatatgtaacacattactctgtctagcgaatcaaagtattaagcatctgcagccttctcctccatttggtccttcaaaccaccggtcccatcctaagttcaaaggtccattggttctgccagcaccacaacatccatcagttattcagtccaaaccaacactagagtttcaaggtttaaaaagcactcacagtggcaacagaggatcgggtcctttctcgatgacagatagcagcctgcgaaccaagggaatatcaatttgatcaccaatcaacgtacaagtttcagtcaaatccagataatatacctacaggagctagcacacagttgcttgcaagcgttaaaaaaaaacataggttgagtatcccatacttactcctcacacacggttgatacaatatctgtgttctcgacctccttcaactctttctggatatagtacatgaaacagaaagagagagtaaagctatttttagtaagtgttagagctcactagtaggaacaataggcaaacacattatctgtgcaacagagaaacttgggagaaggttaacttttaacatgcctcgatagatgataaccaagagagaatgatactaattggactatgatcaaaagtattcttgcacatccctaagaataagatcaacagagaaccattccaatagtggatccaaagagaacccagcagatttagattttgggaatacaattcatagagtcataaacaagactgactgaaatggtgccacttattgtcaagagaactaccatgctcttctgattggaacagatctgccatactggtttttgctttcacaggaaacaatcttagcgacctttacctaattgttgtaacaattgatctaaaaaggataattgagctatccacgagagacctacgtcggaatttgaaagagatacgagttagtttagctacctccaagaaagcgacttcctgttcaacgcgggcaagctctgcaaggatcctgtgcttgcccccgccgtgagaaacagactcctcctgctcgtaaaccacagtttcctctcgcatcctctcgctagcaggtcgcagatctgacaacgtcagagagagtctggtcttagtccgtacaagtttgaattgtcgtcgaagtctctctctctctgactcaaatcgacttttcccttccatttgcagaaaaatgccaaaacgcccaatactattatttgggccaattcttgcaaatgagcccatgggctcaacaaagggatatgtgttgtcgcaacaaacaacgtgaccgtacataaacatgtggttggagtcagtactgactctgttagagttagagggtttagtcacactctcattctcgtttgtgtttttgattggcggagaattggtgatagataagcttcttcttccctcttctcaacttggtggatctgtcatcgatg

SEQ ID NO: 28705 - DNA, 3000 bp, Unknown; identical to SEQ ID NO: 28704
  misc_feature (1)..( 3000): 2750-1469P.txt file - cDNA_ID_2998267; gDNA_ID_2926246; Annot_ID_204228

SEQ ID NO: 28706 - DNA, 3003 bp, Unknown
  misc_feature (1)..( 3003): 2750-1469P.txt file - cDNA_ID_2998271; gDNA_ID_2926246; Annot_ID_142957
ggccacaaagccataaagtcagtgaaagttgataacgctgatcaacacgccaacttggatgactcagtgaaatcaaggtttatctccctggctttatgtatttcagctttgcttctgcaatttggtggtctgattttgtggtcactgacaaactttgccattttctattgctatacaggagcaggagcccaattcgtaggagaaaccaaaacagcaggagcaaaagtcctagtaggagccctgtgagagttcttggaaatggaaacagaagtcctagtaggagccctgtgagagatcttggaaatggaagcagaagtcctcgtgagaagccaacagaggaaactgtggggaaatctttcagaagcccatctccaagtggtgtgcccaagcgcatccgaaaggggcgtgggttcaccgaacgctattcctttgctcggaagtaccatactccttctcctgagcgttctcctcctagacattggcctgacagaagaaactttcaggataggaacagggataggtaacttaatctatacatacatacaacaaaggacgatagctctgcggatagtactaaagcctcattttgtttaattatgtaggtatccgagcaacagaagttactctgagcgctcaccgaggggacgctttagaagcccacccagaagaaggagccctccaaggttcgctttcttatctctgtacagattctggctttggcttgggacgatatagcttgtaaaccagcacctagagccacttgcattagatttatatcctagaacgaccctttttgtgatattattttggttaagcaaaacattctaattgaatgctgaaagttgaaaagagcaactttatagcaatgttggatgtcctctgaaattgagtgttgtcttgcataggtacaaccggaggagaaggagcacttctcggagtccagatgggtaccgtagacgattgagagacggaagcaggagccagagtccgaggcatcgtagccgtagccagagccctagaaagaggcagccaattagccaagacctgaaatcccgtctcgggccacagagatcccccatcagaggaggacgcacctctcctgcagaatcactcagcccttctcactcaccttctccaccaggaaagagaggtctggttagctatgcggattgatggtcactctcatccattggtttctctgctgacttgcgagtttttgttttaatttccgtgttttagtgcaagcaataataggtaatgatattttttatgttggtcggatatataatactctaccttagttgcattattacagatcgtggaacattgatcaaattgagactgatatatgttggcagaattgagtttgggaatcgaagtttgtagaaaatttatcgaacaagtagcatagatatctcaacatgaaaatctagtaatacatgtaaagaaagaaggttaatgatattccgcatgttcatagataggactcgaatctttctttaccacaagaggggtttacaatgatacaatgatcatgtcctagaagagaaggatcagatgggttggtctttgggaacgatctgatccttgatccacatgtagatagggattaacacaaaccaggcagctgctagagttcccaggaggaagcgtcccaagaaggagaaggggttgttgacaggcttctctacgtcctcttcctttggaccaagctgcagcatttgagtgataagtttagtgtatcaaagagagaagaaagtaaaaaaggtgaagtgggaggtaaaagacctggagaggagagtcaccggaggcaggtttaacaccagtgacagaacatcccatgataaggccgtgcctgcgaacaccacggtaccacttggggccaatcctcttgagctgaacgtccttgaaaccggcattcttgaaccactcaatgtactcttcctccttggggaagagcatccagacatcagaaaagaagcgagagagccagaaggttgggtagacagggccgatgagacacgctttgccaccgatcttgagaaccctgtacgcttcccttattcccctctgcgggtccggccagtactcaatgctgtgtgatgatgagacacacaatcaaacccaccggaaagaagacgattataagaagaagaagaagaagaagaagaagaagaagaaaaggataccttccagcagaaacgtatctgtcagcataatcggttggaaaaggaagatcctcagcatctccctcgacgatcttgcattctttcaacggctccttttgctttgctttggccagctgatgtggcgactggtccagaatggtcacattcttggccttcactgtcttgactatgcccagagtagtgaaaccagttccgccgccgacatcgaccactcgcatgtccggatggctgagatccgctggctcaagagcgtcgtctctcatatcctcggtccaatgcccaggattgatgacatggtcgtatacgatggataagaacctgtagaaccagtaagcctccttcttgtgctgaatgaacctaggttgcgccgatggccgggaagacgacacgctgctgctgctgcatctagtagccaccgagagtctaggtgtggaggttcgggtaactgagagtaaggtcggccgaggaatcgatctggcatgcaaattggaaccaggggaacctaaacctttggggaaggtaatggccccgttgagcatcaaagaggccatcgatgacagatccaccaagttgagaagagggaagaagaagcttatctatcaccaattctccgccaatcaaaaacacaaacgagaatgagagtgtgactaaaccctctaactctaacagagtcagtactgactccaaccacatgtttatgtacggtcacgttgtttgttgcgacaacacatatccctttgttgagcccatgggctcatttgcaagaattggcccaaataatagtattgggcgttttggcatttttctgcaaatg

SEQ ID NO: 28707 - DNA, 3003 bp, Unknown; identical to SEQ ID NO: 28706
  misc_feature (1)..( 3003): 2750-1469P.txt file - cDNA_ID_2998271; gDNA_ID_2926246; Annot_ID_204229

SEQ ID NO: 28708 - DNA, 3000 bp, Unknown
  misc_feature (1)..( 3000): 2750-1469P.txt file - cDNA_ID_2998274; gDNA_ID_2926246; Annot_ID_142960
gcctccagtgtgtttgatgttacccgcagttttagtttaatgaagctaacttctaaattttcatcagggaccatctaacaatgcataccctgttcccccgggtcctggtcaatatgcaccttctggcccttcacaacttgggcaatatcctaaccctaagatgccccaagttgttgctccagcagctggacccataggatttacgcccatggcaactccaggagttgctccaagatctgtgcaaccagcaagtcctccaacacagcaggcagctgcacaggcagcccctgcgcctgcaactccgccaccaactgttcagactgcagatacttccaacgttccaggtatcgtacgacgtttcattagcaccttatctctgttttgtttctgagtaaagtcatataatgatcacctcttgtaaactgatccagcccaccagaaacctgtgatagcaacgttgacaaggcttttcaatgagacatcggaagcactgggaggcgcacgtgcgaatactactaagaagcgtgagatagaagacaactcgagaaaattaggtgctctgtttgtgaaactcaacagcggagacatctccaagaatgctgcggacaaactcgcacagctatgccaagctctggacaacaatgacttcagcacagcccttcaaatacaggtaagctagtaaattgatctcttctgggttccttgtagatgatttcgtgtttaataatcagttttattgacctcaaaaacaaacaaacaggtacttctgactaccagcgaatgggacgaatgcaacttctggctggcaacactaaagcggatgatggtcaaggccaggcaaaatgtgcggtgattatttattttctgggttcatggatttttttttttataaatcttaaggagggacgtgtgtatcaaactccttttgctttcttaattttggtctttttaaaacgccgttgctgctctaatcttcttttttttttttttttgtcatttatgaacctcatctgctacttccagttactcttttgtttagatagtatagagatcatcagattgctgaaacattctcatgtttttggatgttactttaccggacaagtttgttcgtctttctttctacgaattttgttagatttttacgctctttgtttttcttgtcatatttgaaacatggattaagcaaaaagtagcatttataaaatattgttgagcaacaactaaatattccgccagaatctcttactaataaaagggagacacgggtagcgggagtatcctagaacgcgttgagcaaacttttaaaagaaacgtgccagtcaccatcatggcctttttgaggtcgatctcggccatggtgcagattccatgtaggaggaagaaagacatcatcccccacgactacgagggcctcatccttcgaatgtacattaggacaataaggaaaggagtattgaagaaactggatgtaaaagatgatggtacgaaagcgacatgacaaatcaatgtggttgcagcaggccttgtcgatgaaaatataaaacctttgggttgtataaaacaggcccatatagcgagagaatgtaggcccatataatagagaatgtatgtttatggacccaaaaacgttaccaccaaattacttgacgtagagagatccgttgcttaaaaaagtatgacttatgtgcgagagtctgagagagacagagacataaaggcattgattggaacgtcgttgactgagaacacacattgtgttgtgatgactgatgacttgaaattcgaaaaagttagttaagtggggagagagagaaagagagctcaacctcaattgtgggttttgaaacccaatgtaactaacctactaataagagttgctgcagtgcaatccaatgcatgtgtgagatcactggcgcgtgagaatcacactgacccaatcgctacgtgtggattttgtgtgtaaatggagatgtcagagagggttgaaaggaagagaacgtgcaaatgcaataatacgatttcttctgactactacttttgatttacaaaagaaaaaggagtatttacatatattgagggtgcgggccgtataactaactcttatcgacgtcattatttttaacattcatcatttgcagctttatgtttttatcaatttaaccaagtgttttgaaaataataaaaattgatccttgagtgtatatatatgataataaaagaaaactttactgcgataagacttgactattggacccatatacatgtatctttataacttttgagtaattcttttattttttaaaaaggagaagcatttttaacaccaaagctttattacctctgggagtatattatgaaacgacaggtcaaatcaaataatcaaactctacttgcaaataaaagtttgaaaatcagaaacacacattctgtaatctggttgaatacttgaatgctgaaaaaaaaagaaaaagaataacacattatacttgataagagatgatgataaaatatatactagaatcatatgggtacaaaaatacatgagagagagagagtgtgtgtgtgtgttttgttgtgaatttgattgcaaaaatccaaagtttgacgctttgacccactcacttgggagttggagcccagaagacacaacagtcactccactcttctttaactcttttttttatttaatttccccacaccacacgactcacgagggaagtggcaactttgatttttgcaagcagaggaggaagaagaagaagtagaaagaagcttaggtatggagtggagtggtacactggtactagagtgatgatggtggtaaggtagttgagaaagaaagcctttttagctttgctaaagtccaagacaagaaaccaaacatctttttgtacacaagacaagacaacaatagcagtgtttctttttcctgccaaagaaagattaagcgagagagagagagacaaggtctcatcgagcaaagagtgtgtttccatg

SEQ ID NO: 28709 - DNA, 3000 bp, Unknown
  misc_feature (1)..( 3000): 2750-1469P.txt file - cDNA_ID_2998278; gDNA_ID_2926246; Annot_ID_142961
gagatcgcagttgctcttgagtctagccaaagaatcttcggagatcaaagcatgactctcgaaaaagtcgtacatacccatcaagtcggtctcgtcgttgatcaccgcatttcctatcagaatgcccttgagattgaagaagctccggtgatggagaaggatagtatgggcaagttgcggaacatagtggccggcatagctctcaccggcgatgtacaagtccctgcctttgtactccgggaacctctccagccagttaaccaggaagatgtagttatcagctgcggtattcctgtccccgtgcttctccaggtccgacgtcgtgttggtgtacgagaaccccactcccgccggcgattctaagaacaagacattcgcagctgcaccaccaccacccgtttgataattttttaatcacaagaatcgtttaccattaatttatttttgttatttaataaaaaagaaaaacgataggtaccattgttccatgcatatcggtttctaaaaagcgttttgccgtcgctgtgtactctgaacggcccaagctcttgtaatgctccatacgccagtgacgagcatcccggtcctgttaattatttccaacacactttatgcatatgtatgtattattagtcacccatatttctgtaatcaaattctcgattttgtgacagctaattcactgatgagcttactattaacgtctctggtgaatttgaatatatgttgtacattgcattttatttttatgtacatacataatatagaaatcagtatataatatatagatagatacgtagtggctggctaaataattgaccagtagagctgtgcaacaaacaaagcacgccgagaaatcctcagcatgtgccatttttgaaaaaaggcaaatcatttttctttttcttttctcagttgagttttcgattggggttgtggatcttttccctattattcactactattgttgcgcaaataataattagttccgataatttgatttaaaaattataaaagaaaaagaaaattagcagacctataaggcataaatatggtatggtcctcacaattattaaattctgaaaatcatatagcatatgatagattaataagcactgagaaaaagacagcctcgatcgatcaaactaacattcttgttcatctttgtactcagatataagatgtacagatataaacccataatgcagtgcccctaactaaagatgcaaaccaaaataaaagaaatatatatacgtatgcgtgtggacagtggaaacgtaccgccgttgagccagagaagcagaggagaagaatctttagacttagaggcttccacgaaatagtagaaaaaggaacgcccggcggattcgttgacggtaacatagccgccgtactgatcgaaactaacgggaggctgtccgggcaatctccgtatcagatctctctttcttagcccctcctgattagcagcactccgcagcgaagacggtttcaaatccttaaccgccttgaaatggcttgtgtccatggtggacgaaccaccaacccctcgcttagacaggtaaagacggctcagggcgtgcacttggctgctgcattcgattcgagacaccaccacacacagtaacaccaacaccgatgcgattacagagtaggagtagccctgtcctttcctcattctcttatgtctatgaattatagcgtgggagggaaacaatagaaggttttggttttggttttggttttgaagaagagacagttaaatgaagaaacgagtgtgtgggtttgcatctttaaacaacttcttcttttttgtgggtcaaaacctccaaccatacgaatgattgttccttttttttttttttttttttttgacaactattgtttttgtttttcatttttaaagtagtacaattattttgataacagattcagattaaagattaatttatttattttatttttcgggcctcaatcaatatatatatatatatatatatgtttcatgtaagaaaaggttgtgtgtctatgggtgtgaagtgaacttactaaattaaattagtaatcttcgaatgtatatggccttcgattattattagtcgtttgggagagaaaaacgaaacaccttgatagcaacttataacttataagtagaatgatgcaatgattattggtttttaataattatttctcttttttttcccaaaacaaaagttaaagaagcataaaatgcattaccctgataaaaatgtacaagtggaattctaagaatctgaagaaaaaaaagagcgaggagagaagatgtcaacgtctctgagtgatcatgttatgccatgtggtgtgtgagtcgatgctgcaatcctgattttcacacttgatatcattccatcttttgtttcttcgtaatacatttaactgcaaacaaatattagcttattttctaccattgtttaatacgaattctataaatctggaacagaaaaaatgtaagacaatgatatgagccgaacatgggactttcgtgtactagtagccccactggccagatccgatgtttcagcacattccttcccagtttattattcataacaatctcattgaccacttaaataaataatttcaaatttgatgataaaaatttcacgtgtttttgaaaacacattattgggcccaattgttgcgattcaaagttgggtaatgagatttatccagcatattgttccaaggcccaaataagatgggtcataggcctcagagattagttgacgtgtcatgtttagaatggctctcagaaccttaggggagtgtccgagattacccttactcttttgagttgaaagtacagtttcgcccctgtcgaaataagaaaataaaaaacattctaatcaaatctataatggtgaagtaactcctctcctcctttgttctccagatcccaatttacaagaattcaacttcacacaccctaaaaattaaatcccaatctccgattccaatatg

SEQ ID NO: 28710 - DNA, 3000 bp, Unknown
  misc_feature (1)..( 3000): 2750-1469P.txt file - cDNA_ID_2998285; gDNA_ID_2926246; Annot_ID_142963
acacggcgtggctgagatcggtgtgctcagataacccgcataatcagctgaaaaggtcagcgagcgtagctgatgcattccacagagagaggcaagttgaaatatgtgcagtggagatggagttggaaaggggttcaccaaaggaacctcgtttcgaagagctagagagcattgtgagaatgaagcaagcagaggcagaaatgttccaagggcgggccgatgatgcacgaagagaagcagagggactgaaacgaatagcaatagcgaagaaggagaagatagaagaagagtacaatcggagaatggggaagttgagtatggaggatgcacaggagagaaggaggaggaggtacgaggagttagaggcaatgcagagagggcagagagagttttatgaaatgaagatgagaatggaggaagagatgagagggcttctcaccaaaatggaaatgacgaagcagagtctggccttgtaatatttgtagtagtaaatcacatgtaatgtacacagaaacctcctcctcgtatgtaacctaaagatcaatgtaaggtcttttcttttagagagtactaaagagttctgcgtcctgacatgtacagccccttgccaaattttaataggcaatagtaaataaataacgacaagaagcaaatggccatcaaagtgatacaaagcagtgaggcgtgaaaagattactaacagactagacttggtgtttctcttctctgtctacactggcattgcccgtctcccaaaaggaccccatttacaaatggcgttgtcgattagttcgcagtgggaggcttgaagtctatcatctctcttatgttcaacttgatggaaggccccattgacgagcatatgtgagcgcttttccagtacactcctttagctccctttggcttgtttgtctccaccgatttctgcatttcatcatttacttttccctcttcatttttttttgtattttaaaccacagaaatacgtaataagaatggagaattagcctaccactgctgcaaggaagtttatgagaaggtcttcctctgtaaaattaactttcccaaatggaatgtgaacaatcccagttttgtctgctctgaattcaactttccccttcttgaactcttcaatagcctgagagatttatgcatctttaagccatgactaccagaatcaggaaaagatgttgcagagtaggcttacctggggaatgttcgctgtgactgtaccagccttgggatttggcatgagcccccgtggtccaagaatctttcccaggccagcaacctaagcgccaagttcaagaatgttagaaaatagatcacgagttacaagtatctcatgccaccttatttgccaagcatgacggtttcatatgctgtaacaagtagaacattatatcatcaacacataccttgaccatcatatccggggatgcaatcagcttgtcaaactccatgaagcctcctttaatctgttcgattaaatcatcactgcccacaatatctgcccctgcacttttggcttcatcaaccttctcacctggaagttcagcatggaaatggtgcaagccaaagatttagaaagaataagccacatgatacacaagaactccatccaatcaatatataaataaaaagtcaatcgcaccaaacaatgttgcatctagagaagtactgactgactgactgataccgtaaacattatctctgtcctaagtcctaacagtgaatttggtgactgaaatggtaaagcataatctctgtcctaagtcctagcagtgaatttggtggggcaatataccttgtgcaagaacagcgactataacagtctggccagttcccttaggcaggctcacctatacaaaaagacaatgcattgagattaaaaaatgttgtggaatgaagcagcacaagatagagtgtatatccagcaaaaggcaaagcagaccgttgcacgcagctgctggtcattgtacttaggatcgatgttgagacggaaatgggcttcaacagactcaacaaaccttgtgttggcagtttgtttaagcaaagagatagcagtgttgacatcatactcctttttggtttcccttagcttttggatttccaaaaacctcttagaccttgtctgtcaatgggtaagcaaacaaagtgatgattcacgagtaaaggaagcgaaattgaagtaggtaaagcacatactctatctctcttgagaaccaaagcggcttttcctttcttaggcttgggcggatcaaggacggcggtggcggtctgctccaggtcctcctccgtgtcgaggtcagcctcagcggccacggcggagacaataaacttgtggttggaagctctgtcaatagcagcacatctccggtccctggaacccccaaggagaagaagcgggaagctcaagtggttgggtctggagctggcaaaagagaaaagagatggagtaggggtaaggtcctgggaacgagtggatgcggcggcgtatgctagcatgagagaggagtgagtagcgcaagcagccattgttggagctctctttctttctgggtacaaagaagaagaagaagagtgcgagtctccctaatccactccacgcccaaggggataacaacaccccctattctttctaagctattattctctgcgtggcgggcaccttagctaccgtgttcctagtgacacgtgtcttcttatggaccattagatcttttaacaacccacacgcgtatcctcgtgacctcttctccttctccttcttcttcttccttctcttttctcaaaaatcagatttcgagtttcttctttcccgcccgtaagagaaaccctactctgactctccactccatttgagaggtaagttccgattccttttctctcagcttcaaatttcctgtgctactatttccccaatttcattcatcttctgctgactcattttgggtgtttcactgtagactgagctcgttccgataaggagaggagatg

SEQ ID NO: 28711 - DNA, 3000 bp, Unknown
  misc_feature (1)..( 3000): 2750-1469P.txt file - cDNA_ID_2998289; gDNA_ID_2926246; Annot_ID_142965
taggatggactgagatgatgctgctgccatcactgagtttctccgccatgattgtttgttttgctgcaaggaggaggtgatttgagaccagataatatggcccgcgtcttggcggaaacgctgccacgtcgcaacggaatcttttttcttgagatgatggacccagttatatttccggcccaaacaaaaaaaataacaaaaaagcccatacacgagcccaagactaacaaccacttgaagtaagccccgttcaatttacaattttaatcgacagagacaatcacaaacacagattacaaacgacaactaagcgcataagatgatttcttctccagcttcgtatggtgggggcaatacattgtgcacatctgcgaacacatcttcgtctccgctctctggactcccagatatgggtgaatctaagacacagtccgggatcgccctcaagctttcttccagcaacgatccaacactctgcaatacataattcaaccactcaacaccagttacaaactttctaacgtgttaccaccaatatatcacacaccctgcactccttgaaagctgcgtctgctctccgcttccacaagctatttccattttctgaatggaaaaggtttagcagaggctgcaatcaattgaaaccatcttcagttcacacacaagacttgtattacttttctcaacacctacagctttcttgtttaaaccacacctaccttcaccaaatccctcacattaggcctcccgtttccatgtgttcctaacacagaatctccatatacttgatattgctcaagaacctgcccaacaacacgcagattttagttagcttattgataagtttgacagacaaagcatctcaaaagctgaatatttccacggaacctgtcggcgtgtaaggccactgcttggtacaccataaactgcagtgtcaacttgtcctagcgtctgccatgggctgtcaaggatagacagcgagtcaagaaaaggggtctgataagagctcagatcaatcgagctaaatttcacatacttgttgtatgcagcacgtcctaccatgactccatgagctccttccttcagtgcagcgtttaccttacaatcacagaaatttttcagtcttaccctggtagtgcagaaagaaagctagtctctgatatccaagattggtgacctttgaaacagaagtaatgcctccattaatagtgaatctcaagtccgggaagtcacgcacgagggcatagtaatactcatacctgaactacgcccataaacaggtgaccttaaagaaacaaatagatcatacacaattgcaggtaagcaagaggcaagttacggtaaacaaactttagaggtgggattctccggttatcagcagggcttatcccaccgagcagtgccttgcgtgaatgtacaatgaaatgtctggtaggtgatagagtagaaaccttgtagataaagtcacctaagagtaaaggaaaagcagtattagagcgtagtggcaaatccatacgagactttagaaaaacagaaagcaaaaacaactcacagagctcatcatacgaatcatgattgtctacaccaattcgacatttcacagtaacagggacgttggtattggcagcaatggcagacattgcctctccaacaagcttaaaagaaagtgtgaaattaagaaagagaagatatctcttgaaatcatgaggaggagtaaagtaacggaccttaggtttgagcatgaggctaacaccaaagcatccatgaccggctaccttaggactggggcacccgcagctaagccaacaaaacaaacccagttaaagtatagaagtccacccaaggcggtgttggcgaaagaaactgaacaaacttgagattaatttcgtcgtatccgtaagcatcagaaagcttagcagcctttgcaaggttttccacattgctaccaccaagttggagaacaataggatgttgttggggagaaaacgctaagaacctgtcctgaggcaaagtgcagaagaacggacatgtctagcgagattcttcaatgcgacacaaatttaagaaaacaaaattagtctaccaaattggtctgctggtgaacaagggtttcagctgcaatcatttcagtgtaaagccaagcgtgctttgttatgagacgagcaagcgtccggtaatgattatctgtccaatccatcatcggggcgacgctggagagcaaaaatctagtaagaaccgaattagtgggagttaaagccctgagtctgagagagagcaaaaaacctgaaggaaggaggaagatagggagacgaagtggaggagaatctagcagtgggtttgagcattggggacttgaagaacatctcagagacatttggtcgaacagatggtagacaccacatttggaattggagaagataatgaaaccgtttgtttggaactagcataacagtaagggaacattaataatgtttaaagtatataagtagttgtgatgggccttactttacgcattttatatctatgatggagtaggaaagggccactgatagagcccagcaacaagtgtctttagtttaatactaattatttaatgctagtggtggaggatacgacgacacgcgataagagtcaaagattggactagcaacgaaaatgacgtaaacacccacgttctctggtctttgggagatggcagatgatgtaaataagcgagtaaagggagggcaaagggaaatggtgcttttcccactcagtttgacttgtaatattccttttcgtcttcctcctccttgcttgctccttcctcgttgcgtgattccttggtatataaaaaaggcagctgaatctgcaagttagggttcttccgacatgaatcttgccccaatcttcaggtactctcttctattttgtttcccttctcctcttgtgcgttttgctgcaatttccgatcctcataaaccctagctttctgacgcatattcagcaactaaaacgatg

SEQ ID NO: 28712 - DNA, 3003 bp, Unknown
  misc_feature (1)..( 3003): 2750-1469P.txt file - cDNA_ID_2998293; gDNA_ID_2926246; Annot_ID_142966
aaaatctcagctaaatgggaagacgagatgctgttgtccaaaagaaggaaatcagaacgcccagatttcagtgcgaccaagatctccaactgagcgcgatgagattttgtaagcaattccagtgttatatcagtcctgttctgcaaagcatcttgaaaagcaccaagttgtacattcttatccatgttcagcatcatctgccgaatgttttccttcaggctagtgatgtttcgagtgggcatttcatgaaatctcttggtcattacaggcatcgaatcggagagaatgtatctgatgacggtctcaacaaaatcatgcccaccggcttccagcccagttatccacgaattactaccactgtaaaagtccttggccgttttcttctcaacagtaaactttgaaccattttcaagagagcccgttcttggacatgctgatctaacatcaacacttttctggaaactcaattgtttctcaagtatatttgctgccttagagctcccatcgggcaatctaagatgctcttcatcagcttgacccgaaattaaattgcctttcattgctcgaggttgaactgaaccatttccattttccatcagtctttgatagactgtattctcattgtactttgaatcattatgagacagtgcctgccaatctataccctgaaatataggtcggctatgaactgactgctcattgtctccaatattgtgactcagcgaacagcttggattatgattgaacgaacgggaacctgaaaaggacatagacattgtaaagccatcagaattggtacaaaacgtgtctgtcaaagaccgaacacttccagaacggactggtgaccccagctgattagtatcctggccaccaatcggcaacaatacatctggtaggctaagtgacagatccagtggctccaacaacaacttctcatccttgtgcttattgacacctgactgctcagttttttttgctctcctaaccggagaactagagaacagttcaaaccctctgatactcggtcctccgaagttgtcatctttttcatctttatccttgtcatgaagatcctcagtcttgctttcagaaaagagagcatttccaactaaatgtgtaagagggacatcagaatttttgcctttatccttgcatttgtggacggagctatccgatacactgctaatgtattctgcaggcgttctattagctagagcattttcctcaacacattccgggccttcaacttccgctttgttggcatcaccatcattacccttcacttccttaagctcttccaaccgttcaggaacatctggataaagagtttcttccaacttcactccatgaaggttctccttataatcctcatctttgtcacctttctcgtcaaccgtatctgtaatcttattggcactagcagtgattgtgccatctctatgatcgtgttcaatagccaaagctgtagaagtatcattcacgttgttttgagaaacatgcatggactcagtcgcatgctcaggcacattttccgcgtcttcaacacttttcttatcggtcatgctatctgtcgtttccatttccctattaccacccacatgactgagttccctgttactctcagtgttggcatcaagttgagcgctttttccaatttcctggaagcttctatcaatccttgcgttcttatgatcatcagcagagcaggaaggcagtttacagtcatgtttggtttgatgagcaaggcctgaggcagtctctggttggggctctggctccagctctccttcctccatctcgctactggttgtactgctcttaccctgcacttcctcctcgcttttcttgacaacatttccaacacttttggattgctcactcccggaatctttggaccatgtcggagaagctagagatttggatctggagcgagaatttctggaatcgagtggtttgaatttggaaagctcgttaggcgagtctctggaccaagaaggggatttgagactcctatccctctcagcgtcccttaatctcctatctcggtcatcaacgccaaagtcattaccaggaccaccaaacctcctccaggaagagacactagcatccctattgggcctctccctctcagaacgaaatccctttggaaaagccctccttgagaaacaggcgctctcagatcgatggtaccgggcatctggccgatgattatccaagtcacgattggatcgcctacgggaaaaagccctggagaagccggcagcatcttccccgcggtcacggttgttgcccgagaagaagccccggtgggaggaagaggccggacggtccgagttgggaggttctccgtcaacattcttatcattacagaaatcaaggtcgtcgctggatcttagtctcttcatcgttttagttgctgaatatgcgtcagaaagctagggtttatgaggatcggaaattgcagcaaaacgcacaagaggagaagggaaacaaaatagaagagagtacctgaagattggggcaagattcatgtcggaagaaccctaacttgcagattcagctgccttttttatataccaaggaatcacgcaacgaggaaggagcaagcaaggaggaggaagacgaaaaggaatattacaagtcaaactgagtgggaaaagcaccatttccctttgccctccctttactcgcttatttacatcatctgccatctcccaaagaccagagaacgtgggtgtttacgtcattttcgttgctagtccaatctttgactcttatcgcgtgtcgtcgtatcctccaccactagcattaaataattagtattaaactaaagacacttgttgctgggctctatcagtggccctttcctactccatcatagatataaaatgcgtaaagtaaggcccatcacaactacttatatactttaaacattattaatgttcccttactgttatgctagttccaaacaaacggtttcattatcttctccaattccaaatg

SEQ ID NO: 28713 - DNA, 3003 bp, Unknown
  misc_feature (1)..( 3003): 2750-1469P.txt file - cDNA_ID_2998297; gDNA_ID_2926246; Annot_ID_142967
cattcttatcattacagaaatcaaggtcgtcgctggatcttagtctcttcatcgttttagttgctgaatatgcgtcagaaagctagggtttatgaggatcggaaattgcagcaaaacgcacaagaggagaagggaaacaaaatagaagagagtacctgaagattggggcaagattcatgtcggaagaaccctaacttgcagattcagctgccttttttatataccaaggaatcacgcaacgaggaaggagcaagcaaggaggaggaagacgaaaaggaatattacaagtcaaactgagtgggaaaagcaccatttccctttgccctccctttactcgcttatttacatcatctgccatctcccaaagaccagagaacgtgggtgtttacgtcattttcgttgctagtccaatctttgactcttatcgcgtgtcgtcgtatcctccaccactagcattaaataattagtattaaactaaagacacttgttgctgggctctatcagtggccctttcctactccatcatagatataaaatgcgtaaagtaaggcccatcacaactacttatatactttaaacattattaatgttcccttactgttatgctagttccaaacaaacggtttcattatcttctccaattccaaatgtggtgtctaccatctgttcgaccaaatgtctctgagatgttcttcaagtccccaatgctcaaacccactgctagattctcctccacttcgtctccctatcttcctccttccttcaggttttttgctctctctcagactcagggctttaactcccactaattcggttcttactagatttttgctctccagcgtcgccccgatgatggattggacagataatcattaccggacgcttgctcgtctcataacaaagcacgcttggctttacactgaaatgattgcagctgaaacccttgttcaccagcagaccaatttggtagactaattttgttttcttaaatttgtgtcgcattgaagaatctcgctagacatgtccgttcttctgcactttgcctcaggacaggttcttagcgttttctccccaacaacatcctattgttctccaacttggtggtagcaatgtggaaaaccttgcaaaggctgctaagctttctgatgcttacggatacgacgaaattaatctcaagtttgttcagtttctttcgccaacaccgccttgggtggacttctatactttaactgggtttgttttgttggcttagctgcgggtgccccagtcctaaggtagccggtcatggatgctttggtgttagcctcatgctcaaacctaaggtccgttactttactcctcctcatgatttcaagagatatcttctctttcttaatttcacactttcttttaagcttgttggagaggcaatgtctgccattgctgccaataccaacgtccctgttactgtgaaatgtcgaattggtgtagacaatcatgattcgtatgatgagctctgtgagttgtttttgctttctgtttttctaaagtctcgtatggatttgccactacgctctaatactgcttttcctttactcttaggtgactttatctacaaggtttctactctatcacctaccagacatttcattgtacattcacgcaaggcactgctcggtgggataagccctgctgataaccggagaatcccacctctaaagtttgtttaccgtaacttgcctcttgcttacctgcaattgtgtatgatctatttgtttctttaaggtcacctgtttatgggcgtagttcaggtatgagtattactatgccctcgtgcgtgacttcccggacttgagattcactattaatggaggcattacttctgtttcaaaggtcaccaatcttggatatcagagactagctttctttctgcactaccagggtaagactgaaaaatttctgtgattgtaaggtaaacgctgcactgaaggaaggagctcatggagtcatggtaggacgtgctgcatacaacaagtatgtgaaatttagctcgattgatctgagctcttatcagaccccttttcttgactcgctgtctatccttgacagcccatggcagacgctaggacaagttgacactgcagtttatggtgtaccaagcagtggccttacacgccgacaggttccgtggaaatattcagcttttgagatgctttgtctgtcaaacttatcaataagctaactaaaatctgcgtgttgttgggcaggttcttgagcaatatcaagtatatggagattctgtgttaggaacacatggaaacgggaggcctaatgtgagggatttggtgaaggtaggtgtggtttaaacaagaaagctgtaggtgttgagaaaagtaatacaagtcttgtgtgtgaactgaagatggtttcaattgattgcagcctctgctaaaccttttccattcagaaaatggaaatagcttgtggaagcggagagcagacgcagctttcaaggagtgcagggtgtgtgatatattggtggtaacacgttagaaagtttgtaactggtgttgagtggttgaattatgtattgcagagtgttggatcgttgctggaagaaagcttgagggcgatcccggactgtgtcttagattcacccatatctgggagtccagagagcggagacgaagatgtgttcgcagatgtgcacaatgtattgcccccaccatacgaagctggagaagaaatcatcttatgcgcttagttgtcgtttgtaatctgtgtttgtgattgtctctgtcgattaaaattgtaaattgaacggggcttacttcaagtggttgttagtcttgggctcgtgtatgggcttttttgttattttttttgtttgggccggaaatataactgggtccatcatctcaagaaaaaagattccgttgcgacgtggcagcgtttccgccaagacgcgggccatattatctggtctcaaatcacctcctccttgcagcaaaacaaacaatcatg

SEQ ID NO: 28714 - DNA, 3003 bp, Unknown; identical to SEQ ID NO: 28713
  misc_feature (1)..( 3003): 2750-1469P.txt file - cDNA_ID_2998297; gDNA_ID_2926246; Annot_ID_204239

SEQ ID NO: 28715 - DNA, 798 bp, Unknown
  misc_feature (1)..( 798): 2750-1469P.txt file - cDNA_ID_2998301; gDNA_ID_2926247; Annot_ID_142968
gtcgacagtaatacgagacggtataccaaaggtgaaatccattagatatgtttagttttacttaacgggattagatggtagaacgagtttgggtcgatagtaatatgagatggtataccacggatgaaatcctaataataacaatcaaaatacaatcatattatcttaaatattaaaaaaacaaataatattaataaaataaatataatttaaatttaaattatttagttataatttagatttatcttaatgaactatatattattgtttctatatttttaaacagtaaacatcaaaatagtaattgtatactaaataatatataaatataagagttgtacattaagaaaatacaaaacattaaatcatatatatttttaatcgaataaacaaaataaatttttattcttaaaaaaacaaaataatctcacggtttaccgcagattaaaatctcacggtgtatcgcagattaaaatctagtacgatcgaaaaacaaaagtaggaaaaaagaagaaagaagaaaaaaaagattacaccatacgaaaatagaaaaaatgcatggaataatggagtaataatatattttgtttaattgtcagtctatatttgggtgaatatttttccaaattaactgtagcaaataagaaggcaaatataatttgataacaactattagagaatctcataatcttatcttcttacttagtaaccattggtcataatgttatatatattgcgagtcaagtctctcggtaatatcgaagtaagactaaagctcaagttaaaacagaaaaaatg

SEQ ID NO: 28716 - DNA, 798 bp, Unknown; identical to SEQ ID NO: 28715
  misc_feature (1)..( 798): 2750-1469P.txt file - cDNA_ID_2998301; gDNA_ID_2926247; Annot_ID_204254

SEQ ID NO: 28717 - DNA, 3003 bp, Unknown
  misc_feature (1)..( 3003): 2750-1469P.txt file - cDNA_ID_2998305; gDNA_ID_2926248; Annot_ID_142972
ataaataaagagcgatcgatcggtaccattcaagaggaggagagatgtctttcttaacaccttgacctgccatcgtatactttctcggcaacttcccatcgttgtctatcgtcggcgaaaccagcctcaactcctcactcgacattcccttttacttttatgctatttcttacttagttttatcacaaagagtctcttcttttctactttcgtacatatgaatgctcttttcgtgtttgttactgatttgtatggatcgcctatgtgtagaaacaacgccacgtgacggtcttgaatgacacttggcgtcatgattgacacacggcgtcataggaaatctggcgaagacctgtgtttgagcacaactctatattgggctttattgggcctaaattgtattttttcctctctactatattagcctgtctcgttcttttttaaatcacgttatcttattattaaaggaccacttaacagtatactaattattgttttaacaattcccaccaaaaaaataattattgccttaacaataaaacaaagataattttaatataaattaaatttgtttaattttaaaattacaataaaagatatttcttattttataaacaaaaactcttctcatctttttttcttctattttttaatttattaaataagaatatctaaattaactaccttctaactaaaattaaagtgatttccatgtaatatttatcaattttgaagtcatagtaggatgctctaacgtgagccgttttaaccaatcgttaacaaagaattcgtctattaagacataaccatgatcaagtccgatgaatctaatagacatgttatccggtttgcgttccatgacagaatatagccaattgtctatatcattgtttctatttaagtatacgttcatgacatctggtgtgttgcataggtcaaacacgcgcgatagttcaaggaaagtgcgttagtgatgaccacgacacaatactgcactttgttttcatatcgggatgctccaagctgagtcactatagccatttactgtcaaagaattcgtccataaaacaatatttgtgatcaagacggatcaacataacatgcatcaacttactattaaaatttaagagtaagttaaagaaaatgttaaaaatttcttaggttggcccattaaattatattcaaattaattctttatttttcacattatatattaaatctaatagaaatttattctagattcgccattgccgtgtaatacatgaacaaatcttttaaagatggacatcgcatatgatctaccgagatcatatcatgatagtctagctgcacaataatcccttatacgaaatcattttcagctggatgctttataacacaacattatattaggttagtgagcctatagctaacttgttttcttttttcattaatcattgtttagatactcatagtaatgattttgagataagtatctatttttcaaatgatatatcaattttaaaaactcattacatcatgtcacaacgttaaaagtataattatacatatatacaaaaaattgtatgtatgttacaaagaaaacattgctaattttactatgtctgagtcactatatgcggctggaaagtaccaaaataaatgaagacagtaacatgagtccatcaccatcaccaatatccaaaacttggctttcacatttattttacttatgtaactactatacctttatttatttattcatttttaatccttagctttgttgatctagtttggcaaggtaagtctataacgtccatcggcccgaatccttctttttcatttatttcaaaattaacattttcttcttcggaaactatgacaaagctttttatgtaacccaaaaataacttaattacactgtatatccttctacaaatttacctatatcaaattatgttattatatattgtaatggcttttaagagacaatggagacattttctagaacatagcatttagttagatttgtacaagccatttcaaaacttttcaaaaacaaaatcagcaaataaccagttttgtctttaaagaatcgttctttcgtaggaactagcaactgggaaggtgtaaataggcgatttaaggaaaatatataattgaagaaaaataaatcaaatggtcgggactttttatctcacgtgaaagtaacgtcgcatttactcaacagtcgagacgacagttacatatttcacagttttaaacttgtaagttaaatttaacaaaaaaagaaatacaacttcaaacataatcgttgttaagaaatttcatatatatcattcgtttctatattaatacaaaaagaatggtatgggaaataaaatagaaagaatagaatgactaaatcatggaacatgacatgaatacggtcactgtttcaagctcatgcgtcttttccagcatagtagtagtagtagttgttgttgttgttgttatccggtcttttcaaagcaacgtacttcctatttttcttacttgtataaatccacaattgttttactcaaaaggaaaaaaaaactatcaattttgcaatttggctagttaattcaatttatatctatttgttttaaaactatatttgatctgtatgtgcaatttatttactgatttgaggcttttgagcatatatatttagtgaatcgattatagaatttgtattgaacaatgagagaagaacgaagacatggattgggacaagtactatacataaacgtgggtaatgtgctatgaaggtagttgtttgagaagacagtacgtagagtttgagctgtaagaaatgattagggtttgtttttcgtctgcacttcagtccaatgttttcaccgaaccccactactacgtgaaacccggagcctcacgtgctcttgagatctttttaccactaaattaaccagttcgtatgtaactatgtctatatatatgtataaccatatcatgtaacagttataaaccacgacaatcacaatg

SEQ ID NO: 28718 - DNA, 3000 bp, Unknown
  misc_feature (1)..( 3000): 2750-1469P.txt file - cDNA_ID_2998309; gDNA_ID_2926248; Annot_ID_142976
gtcattgcaactttgtaagttgctctatatatggtctagtcttctaggtatatacgaatataataactagaatttaatcaagtaaatttattcaacagttaaatacttaaatttgatatgttatacatttagttgaataaataagatcttttcagttgaagagattcatgtgtgtaaacaactcattagttgaataaataaatatactaagtaagtagattgtatatatggtgtgatcaacaacaccagttatttttggtccaatattcaacatgaaattctaaattattgattgaaataatacaactacaaggaagccttctaaaaacaatgacctaatgaataacaatgtgcatttcacgtttagaggttctaatcaatagacaaaacccaatcataagtcataacctccctaaccacatctttattaaattgggcaaaaagatggaagcaacacatccaaacatgcctttagcttcactcctactcaattcctaatttcccaaataaaaaccataacactcacttgacatctttccctataattcctaatttcgacacgttctttacataaattaccagatttgccactatgagcttcttgattcctaatagaggagtaggaggaaccaagattcctctctccatcatcgttctcgttctttgtggtttcatgttcttcattctcttatacactgaaagaatcagcttgttgtcttcttcttcctcttcgtcttcatctttcttcaagctaaagtcttgtccgaggaaagatgttagctcgaaacctagtaagcacatacgcgatactcgaatctgaaaactctgttttgtccaatttcagtgttcctttcttgttgtgcaagtagtctcatgaaattcccctgcttttccttgttgccagaggagaaaattcgaaaggaaagatcagagatattggaagtgcttgacgacaggttcgaattcgatcccgaagagtgtaacgttgcagcagggaaatgggtttacaatagctcaattgaaccactctacaccgatagatcatgtccatacatcgatcgtcaattctcttgtatgaaaaacggacagccagaaactgattatcttcggtgggaatggcagcctgatgactgtacaattccacggtaaaatacaacttagtaacacaaactaacactagtttggttcaaggtttgagacagaacctttatgagcttcatttcaattccaaacagatttagtccgaagttagcaatgaacaaactcagaggaaaaagactactttttgtgggagattcgttgcaacgaagccaatgggaatcgttcgtgtgtttggtggaatcaataatacccgaaggagaaaaatcaatgaagcgtagccaaaaatactttgtatttaaagcaaaggtacgttaagtgatggtagcttgcgttacaacgcaaaccttgttaggtcagatatcacagtaccttgtattacaagcaaagcttagatttttattttatgtttctctgtttttcttgattcataggaatacaatgcgactatagagttctattgggcaccgtatatcgtcgaatcaaacacagatatacctgtgatttcggatccaaagaaacggatagtgaaagtggactcagtgaaagatcgagctaagttttgggaaggagctgatattttggttttcaacacttatgtttggtggatgagtggtctccgcatgaaagctctgtggggttctttcggaaatggagagagtggtgcagaggcactagacacacaagtggcttacaggctaggactcaagacatgggctaattgggtagactccaccgttgaccctaataagaccagagtcttcttcaccaccatgtctcctactcatactaggtaaacatttagttttattatatgttttgatgtgtttggtttgtgattaacgtaaagtgttatgtaaaacgttcagaagtgcggattggggaaagccaaacggcacgaagtgtttcaacgagacgaaaccgataaaagataagaagttttggggaacaggctctaacaagcagatgatgaaagtagtgtcaagcgtgataaagcacatgactacgcatgtgacagtcatcaacatcacgcagctctctgagtatcgcatcgacgctcacacatcagtttacaccgagacaggtggcaagatcctaaccgctgagcagagggctgatccaatgcatcacgctgattgtatacattggtgtttacctggactacccgatacatggaatcggatcctattggctcatttgtaaatcaagctaggaggaagctgagggttaaacgggaaaaacccaaatcctctgtttttctcctcttgtgttgtcggagatttgtttgtttcagtgtattgtgattgtcgtcaattttcataagatcaaacagactcggcccgtttattatatgaccttgaagtgactaaaacaaaagtaataatattacaaggcctagatgggcctggcccgtctctggcctatttgtaaatagagggagaaacaagggtaaaataggaattccagaactaagagtttttaggttaatgttgactagtgggtaatatgaaccgttcgattttgttacagaacatcgtgaccgtccgatgagagacctaagacaaattacgcaaaaactcattcgccgtcacgaggaagatgcgaggtctatataatggacaaatctggtataatgtaaaatagggacttgacgcagatcttgttgggtctcgaaccttcctcttcgtttgcatcaggtaaggccgattctcttgcttatacgatctcttgattcatctgaggttttatcaattgttgtttgattttgtttgtaaagctgtgatttttcgagtttctgtctcttattttcctgttggatttagttttctctagaaattgttgcgatttggtggataattattgacattagggtttcgtttttgataggaaagagcgagaatg

SEQ ID NO: 28719 - DNA, 3000 bp, Unknown
  misc_feature (1)..( 3000): 2750-1469P.txt file - cDNA_ID_2998312; gDNA_ID_2926248; Annot_ID_142977
aattaatcatattaagtcacttcagatattttaagatcttaccaaaattactatgttatgttattttatttgtttgcagtgaataaaatatgttttcagttaatgatgtaaccattatatttcacttatttcttatcggtatgtatcttatgacataatatataatagattaattattggtaacatagaaaggaaaaagtacccaggatcaatttaaaagctatatccaaagtgatatgctctgatgattctgttttttgaaactcaacggacgaaaagaaactttgatacttttgaaagaaactttgatactattgatatgctcatcaattatttcaaaataaaggtcatgtaacaactttttttccttcacgtaagttttatatttaaaatggtcaaactttgttctgattgctttaaagctttgaacaaaatgttactatatgtgatttacttttcaaacatactgaatataacttcaggttgaaacttgaattttgaagtagatgtatatagttagcaaaccaatatgtcacatgcaattctaaaataaaatgagaatttagctaaagtcagattagtaatgttaaacaaacttgaaatgtgaaaattttccgttactataattttttgaaagaactataattttagccagaatgacagttcaacaaaagaaacttctagcttatttctcaatgtgcactgcacggtaaaacaattcattttaagatatagaggactaaatctttatcagatactaaataagttggcgggatcaatcttttgaatagtgattagaatctttacaagatgaatattataaagttgcaaaaggcctcttcgaaacctatctacttcgctttactattataaacatatatagagagtctttagagcaactaacttaaaggtattcattgattttcttgtcgtcgagtttaagagattaataatgtatgattaatctgatcattacatttactcacgattagtctgtttcataatatagaacttcttgttttttctgtttgattatatttggccatttagttagcgttagtttttataatttcattcgttgatacaatacatgcgcaacgggtaacacaatgtagctagtacttcttttagttcattaagatatgatgctattgttatgttaaataatatctttctataaaaagttgatggcttcactagctaaatatttgcaaggcatgatcgtcaagatcaaagattccaaattcaaaattcgaagtgtacaaagaaaaagaagagaatggtagtataaaatatttacagattcttttttacttttcctttttcaactttttcaactttttttcaaaataagaaacacgagaaaatctgatatgcgtggcgtcattttcaaaggtgaaggagaaagtacttgggtcgcttagttcacaccggaaaaagaggcaacgaaagcagagagacaaatctaaataatgtctgacgcgcgtgaataatattgccacaaagagacttgccttattccctatcaactctcgaccaattattatgcatttctgtttctttcttctatctaagcatatctctccaaattatttcacttctattttttgtatataaaaataagaaatataaaccctttaaaatttgtttttaaaaccaaaactcattataatttacgtaataatatagatcgaattgttttgtccaaaacctcaagaatataggcaagtttctatgttgttggcattaacttattggtttgtacggagatgctaatacatcaatctcgaaacgtattcgaaagcccattactagcccagacacaaacaggaataacttttgattgtaagccgatattttaagtatttgaacggttgaacaacgatggggatgtagctcagatggtagagcgctcgcttagcatgcgagaggtacggggatcgataccccgcatctccatttttttcctcagttaacccctttttcttcatactaaaacataatatctgatttaatgacggaaagtatgttgcaacactccccactatatatgcattattaattagttgcattattaatcacttaatgatttgtgtttgcctttaataattgctttaccaatttatctactaaaaataactaacatgaactattgttgattttacaagcaacaccaactattgtatttagttggtgcctgtttatttcgttttcatgtgcccattgataaattcgatatttttgttttctgttgtttaatctgatgtcgatggcgaagataacaacgattccttaaccatatgttcctcacactaaacgacttttgaggaatgatgattgattagcgatttgaatcagttgattaaccctcctcatcaaattaacagtttcttttgaacttccatgtcattgcaactttgtaagttgctctatatatggtctagtcttctaggtatatacgaatataataactagaatttaatcaagtaaatttattcaacagttaaatacttaaatttgatatgttatacatttagttgaataaataagatcttttcagttgaagagattcatgtgtgtaaacaactcattagttgaataaataaatatactaagtaagtagattgtatatatggtgtgatcaacaacaccagttatttttggtccaatattcaacatgaaattctaaattattgattgaaataatacaactacaaggaagccttctaaaaacaatgacctaatgaataacaatgtgcatttcacgtttagaggttctaatcaatagacaaaacccaatcataagtcataacctccctaaccacatctttattaaattgggcaaaaagatggaagcaacacatccaaacatgcctttagcttcactcctactcaattcctaatttcccaaataaaaaccataacactcacttgacatctttccctataattcctaatttcgacacgttctttacataaattaccagatttgccactatg

SEQ ID NO: 28720 - DNA, 3000 bp, Unknown
  misc_feature (1)..( 3000): 2750-1469P.txt file - cDNA_ID_2998320; gDNA_ID_2926248; Annot_ID_142980
ccaagtgggagtgacaaccttcttatacaggtttttatcatccttcacagtttcttctatactgtaaatagtggtatgtgcttttactatttctttattgttcctctttgatgacaggttcttcaaaccctcaccgaggggcccactccttcttcagaattgatacttactatacggaagttgtttgatacaagaataaaggtgaagacgatggaatgtttattgaaaactcgttaagagcaaaactataagctaattcttctctaatgttttcttgggttttgaacattttatgggactacaggatgtagagattcttttcccaattttgccattcctgccaagagatgatgtaaatctctttccctaccttttccccttttattgactcattgggttatagttttcttattttcctaaacttgtctctcgatcaggttctccgcatttttccccatatggtgaatcttcctatggagaaattccaagttgcactttctcgtgtgctgcaggtatcgtattcatttcttatgtctggcttttgagttaagtttgatctgctcactgtggaattttgttcttagggatcatctcaatctggcccagtgctttctccatctgaagctttaattgctatccatagcattgacccagcaagagatggaataccacttaaacaggtatatatcgacaatttccttgttaacatacagcaaacaaagaatacagctttgatgaattattaggagatctccgccacctgttttacaatcaacactgaggttgcttccctaaatcttatgttttaatgcttttatcaggtcacagatgcatgcaatacctgttttgcgcagaggcagacattcactcaacaggttttagccggtgttctgaatcaactggtatataacaatctccatcgtactgagtatttcttctattcatgttttgatttcttttcttcttctggacattttttctcattggcgagtttttggctgcaggtccagcaaattccactgccaatgttattcatgcgtacagttttacaagctattggtgcttttccagctctggtaacaaacttatcacatctcttttttcaatcccaatttaatattctctgaataatctctttaacttgatattctaatagtcggacttcatcctggagattctttctcgtctcgttagcaaacaggtcagtattggtcttgaaacgttatattctctctattgtccattcttataattgactgtgtgttggaaataaaacggtggctctctctatgtgtatgcctcagatatggaaatatccgaaactgtgggttgggtttttgaaatgcacacagacaacacagcctcaatcatataaggtcttactacaggtgcgattatttaatctcttccacaattgttaaattacctgttctcatctatcggaaagcggttttatcactgacattcctttcatttagcttcctccacttcaactgggaaacgcattgactaaaatcccggccttaagagctccgctaaccgcacatgccagccagccagagattcaatcttcacttccaaggtaacctttcctctttcaaatttccatgaattccagttctaaacaaacaacttcagctatttgaaatccatttgctgatcacggagatatgaaacatgtttgttggtaggtctacattggctgttcttggacttgtccctgattctcaaggaacacaaacaagccaagtgcaagcgaatgagacacaaacgagtcaggaacagcagcaacagcaagcaagcgagccacagcaaacgagccagtctcagcaagtttctgtaccattgagccactcccaagtagatcaccaggaacccagtcaggtagttgccagtcagtctcaaagcagtcccatagggaccgtccagtcagcaatgagtcagtctcagaacagtcccatagatacgggccggtctgaaatgagtcagtctcagaacagtcccatagatacgggccggtctgaaatgagtcagtctcagaacagtcccatagatacgggccggtctgaaatgagtcagtctcagaacagtcccatagatacgggaagatctgaaatgagtgaatctcagagcagtcctattggtcagtcacaaagcagtcctattggtactggccagtctgatatgagtcaaacccctcaagtgtcggactcgagtgctccagaaccaacaagccatactcggacatcagatcctcaagcgtcaagccagacactacgagatgatgatgagaagatagacgacacagcaacctcagaaaacgaggtgacagaaatcgagaaatcaaaagaatcttccgaagaagaagaagaagaagaagaagaagaagagtgagtgtaacattatgtaacttgagagagaagaagagatactttgaaattaaattcaggttgccttctacctcttatgtcggagaagaagagtgaatgaagcgtcgattagagcaggaaatcttcattccatgtattgtagcaatttttttcaaaatgaattttgtagaatttagttagagatttcttttaatgagtcattagcggttgtattgtcattgttttctttgagttaagactttaataaaagttttttttataaaaaatatatgtcatgaatgtttgcatacccttgcgaaaaaaaaaaaaaaaaaagaatgtttgcatacccaaagccttaaccaatcagcccattaaggtttctttttgggtagaaagcagcccattaagttaaaaactgatcataataaaacgggaatactattaaagaaaagaaaaaaaggagtttaccggttaaaatcacgaacggttggatcggttaagttggattaaaatgagaatcccggaagaaaatgaaataaacaagtcgaagagagtagtcatcgacccctaataaaatccagtgaagaagaagattgagtgagtgagagagagagagagagagaagatg

SEQ ID NO: 28721 - DNA, 3000 bp, Unknown; identical to SEQ ID NO: 28720
  misc_feature (1)..( 3000): 2750-1469P.txt file - cDNA_ID_2998320; gDNA_ID_2926248; Annot_ID_204276

SEQ ID NO: 28722 - DNA, 3000 bp, Unknown
  misc_feature (1)..( 3000): 2750-1469P.txt file - cDNA_ID_2998323; gDNA_ID_2926248; Annot_ID_142981
ttctccttgtcttttatgcaacaattaatgcggactagagcgacagtcgtggattctatgaggtccagttacatttctttgtgtcagaagatttttttccaaaattttttccctaaaatctatttaaaataagaaaaaataaattgtgaaaacgttttaaaacatcattaacaatgcatttaacacttttataatccaattccggacgactcattttttcttgtcaaaacctctagtttagttggctaaaatcttaaaatgcagtccactaaacatgtgttaatcgaaaaatcgaaattgtgttttaatcttgaccgtccgatcacaacaaaatcccacactttcccaaataaaaattaaaaattcaataattaaggagtttctatttaattaataaaaatagagaaaaacatctattttattattttagcttttattcacaccgccacaaactctcactataaagccgatccatagataaacgaggaccggccagaaatcgcttcaccattcccaaatctctcttccattttctccacacaaatttctcttcaatctccgataatggaaggaaccggcgttgtggcggtgtacggtaacggtgcgataacggaggcgaagaaatctcccttctccgtgaaggtcggtttggctcagatgctccgtggtggtgttatcatggatgtcgtcaacgccgagcaagctcgtatcgccgaggaggctggtgcttgcgccgtcatggctttggagcgtgttcctgctgatatccgcgctcaaggaggcgtcgctcgtatgagcgatccacaaatgattaaagaaatcaaacaagccgttacgattccggtgatggctaaggctaggattggtcatttcgttgaagctcagatccttgaagcaattggaatcgattacatcgatgagagcgaggttttgactcttgctgatgaagatcatcacatcaacaagcataatttccggatcccgttcgtttgcggttgccggaatctcggcgaggctctgaggaggatccgtgaaggtgcggcgatgattaggaccaaaggtgaagctggaaccggtaacattattgaagctgtgaggcatgtgaggtctgttaatggtgacattagggttttgcgaaacatggatgatgatgaggttttcactttcgctaagaaattagccgctccgtacgatctcgtgatgcagactaagcagcttggtcgtcttcctgtagtccaattcgccgccggtggagtggctactccggctgatgcagctctcatgatgcagcttggatgtgatggtgtctttgttggttctggtatcttcaagagcggtgacccagctcgtcgtgcacgtgccattgttcaggctgtgactcattacagtgaccctgagatgcttgtggaggtgagctgtgggcttggagaagccatggttgggatcaatctcaacgatgagaaggttgagaggttcgctaatcgctccgagtgatcaaagaaataaaaggtaaaatatctcagacgaaatggtttcagaattttctcagaccattttgcagtaatctctttgaaaagaagaagatgatgatattgttggtagtttgtatcctttgtgttttccttataatctttgatagtcttttgttattgtaactcgtaatccctttgcaagaacaagtttgtcagttataataatgtactactctcttgatcgatcagttggttttgaatctgatatattcttcgatccattggtattgaccattgagcttgttgttcaattacatttcagacaggcctattagtacttagtagtatcaggttgataaacaaaggatgaacttgtttaatttgggaattcgtacactggtactgagctctgtagatgtttgagactttgagtattggatttggttttgaagaactgtcctggattagattcacatagcctctagttcttattttaaatttgtgatttcaggcatagctgtcaacctaacaaaggaagataatatgagttgagttttctttgttgttaacgagtactaatcatcgatttcatgatgtgtggattatggtttatggggggttctttgcagctatgtttgcattgtaaattggtttttatgaaatgctatgttaatgtgtgattagtaaaggagaagagttcatgggactcttctagcttttaaaatccataagagtcctctagctttgaaaatccatgggactcactcttctagctttgaaaatccatggggctcttctagctatgggatttcagatctcatgcgcggtagtagcatacgatcatcggaatccatagagctcttttgttcaaaatcgagttcttgaaggtcttacacgacaccatgacttagggatacgagtatatatcccttgacttcagcctctaagctcttggctctgccggatccaatttctccaaagagcattacttcaaagttcaaaaggttctcactactaacaggttaattttgttaaccgagatcaaccaaaatcaaacaaaacttaaccaaattgtaaatgtgatttgattgcacatcactcgcattttgtccaaaaagactccggtaagaccagaaacacggatacaatttaaatatcaatcgaaataggcccacatcggcccattattactgcacattggcctatttaatcaattcactaactatatgagacttatataatatactatcaaatatgagggaccataacacaatttctttctttatccaaacgacgtagtgtaactattgatcagtctcctttaggaaagacctcaaaaatggaaatcagttcattagtgttcatatcagaaataaaacgaatctccatcgtcgtccttgtctctaaaccctatatgccatagtcgaagaagaagaagaagatagatgcatatccatcaaagctctgggcactagtgtatatattattatcgattgtttgaaacctatttgttatggttggaatcatg

SEQ ID NO: 28723 - DNA, 3000 bp, Unknown
  misc_feature (1)..( 3000): 2750-1469P.txt file - cDNA_ID_2998346; gDNA_ID_2926249; Annot_ID_142992
tggcaaaatttgaaaatttgttgtcatactcaataaataaataaataaataaaatgtcatactatttccgtccttgcctcgctccaccgatgaaaaacatcatcgcatctttcaattgtcaattccatcatgagatcattaaggagaaaatcggtttcacgatatggatgattggtgaatatttcattatcgatttcagagatcgaaaatggattatctgttatcaaacgaagcattggagaactgcctttccctaatgcttctaatgatgatcaccatattcacacatgccattggtatgaagagtgtcgtcgaaggctactcatcgatggagatgcgaaactccgaactcaaatagctatcgccctaaccaaactaatcgataaacaaaaaatctttcttcatgatatttcttcaggaaaactcagacaagaacgagcagaaactgttaggttaatagcgtcgttgtagttgctgcctaaacatgaaactttgggacgtgcgactattactttttatagcggagaaatcaggagatgcatgaaatctatatgccatcaagatatagagcttaaccagttatgtgtaaaagcaagtggtgaaaattaggttagcttgctttctaagaaattgcaagaacaaagagatatgtgtgaccaagcgttgtatcagttggtaaagcaccctcaactcaatcatctaacttttttgttactgaaatatatataaaaagcggtttagattcttaaattttcgtgactatatatatttatacatagaaagcaatctttttcgggaccgcgaagaacgatggtccagcataggaggcaggcaatatatgaatgtgtttttgtaagtccatactagggacgacgccaatgtgttattttaaaattgtttatcttatattgaattttgaacctttgcgatattattcgatttcattttctttatggtcacataagcgattaatactttatttacgcatcatggggtaaatcgataaagtttacatattattcatttgggttattaatgtaatttcacatgctgttgattagtaagagaaagaaatattgaaaaatttgtaataacaattgaataaagctaaaaggaaacctaagcccttattgcaaatctggaggtggcaaaaaggggaagaaaccctaaaacgattgccgtcctacccgaggatttagtaaaagagagatcatccaacaccttccagtgagatctctaattcaattcaagtcggtatcgaaacaatggagatcgatgatcaaatccacctatttcgttagaaaacatctggtttgtcctttcccatcaaacccaaaaattgttgttggatcaaggactcatgatgacgagaactcgctaactattcttctagagactttttcaagagaccatccaggtgaaatcgacacacaaatcagttgttctccttgctcttacatttttcatgatccaagaacagtgtgcccaactttaaccttatgtcgagttatagggccttgtggtttggtctgcatccaagagttaaggtactaattatcatgtacataatttggttgactagctatcatgagtctttgcatatgcaaggattacaaaaattggttacgttttcgatatcgtcagtgaattttagttttgtcttcctttttttttttgtacctgtgatataatcatttcaacaaatctaatttcctcaatttttgtttgaaagtattgtaatgacaatgttttcgttaatcatcactaatattataacctaaactttagctgtcgggaaaaaattgaatcaagtgtaaatcaagagaggaccggaaagtttatccaacgcagttgcatgcaacatggtccaggttatatgtcgtacgtttaattcgtctcaaacttgcaaattttatgaaagcaaatttatatatacttaaaaaaaaaataaaaaaattgataatataatttgaatattaacatatgtttgttgtttctctgtagattttatgcctctattgctatttgcattggatttgggaaagacatatatagttacaggaacatacaaaacgataaatataaaatttcccgaacgtcttcatgactatgctgtgcatctcaagacctcggttttgacttttgaccctcaacaatggcagcgaacaaagatacattggtgttttcccgattttcaacagaaacatttctagtgagcaaacatcagtctttgcaaatctagatttaatctagtgagcaaacatcatttctaatggcagatttaatacgatataatgttgttgttttttttcttaactactctagattaatgataaatggcttttacttacaattttaaagttttgttttcactcctcttcttcaatgtataataataagaactcgtttgagatttcagagcatgcataaaagatttctaataatatgttttttttttgtagatcaactcattctgattaccataagtaaaacgacgccggttattaataaagaacgtgacaacttacaaaacgacgacggtttttagttgagggtatatgtgttatttacagaatacgaaggttcaaaagaagaaattaaaaattgaattttgggagctgtaaaatttcagttcacacacacaggtaccgaaccctaatagctaatttgtctcgttcagcaatcttcttcttctcgtttcccagaatttgggtcgccattgattcgcacctcgcaaggtaggataaaccctaattttaaatttcgtttatctctatgaaagatggcaacttttttgatttaatcgtattgactaatgaagaattttctcataattatgttatttgtcttttgtggaaaaatctggtgtctttcttctaaattcacaatttttctaattcttagtgatagagtcttctacggatgaatgaactctggattgaatcattgtctttgtggaaaattgaaattgaaagtttgtgtttttttttttatcagatg

SEQ ID NO: 28724 - DNA, 3000 bp, Unknown
  misc_feature (1)..( 3000): 2750-1469P.txt file - cDNA_ID_2998350; gDNA_ID_2926249; Annot_ID_142993
aaacgaagatctaaactcgaatctgctagtggagatcaaatcagccattgataaatctaagatagagaatgtctttccactaccactctccaacttcttccaagtaaaaggcttacccaaaggtaagcaccttgtgcagcttaaatccagtcgtcctttgatctcccacaaagtagaatcagagattattgaagttgatttcgagaccaatgcccaaatccatattggtccacttcgatacagcattgtggcagatcatcagagtcaggtaaatagataacttacataatcttcgacattttttccattattcttgtttgctcattgtggtttgatttgtatcgacttcaggaagtgacacctgcagctatattgccactggttattggagtttcggcaattgctctattcctcagcatccccaggtaataatttattaccaaactgtaacatttgtaatttggaacatttccacaactagtaatccacatgcttataaaaaaaaggttgaaagacatctaccaagccacggttggaatttcgtctcccgggttcactacatctgccaagagagaacctcgaaaagctgttgctagaaagaagacgttctgaagaatttattcatcttcggtcttcttttttttgttttttgttatatagtatcgttagagggaatttattcaaaacattgcagaactcagaaactcctctaatccattttaaagtttagagaaacactcttaacggtcaatttagtcttcttttttaaatgtgaattgtgttagaatctttttctccatgactatttccaaaaacgctgttatcagtttttaccattactttttagatttaatttttaatgatacagttggtacaaaattcaaatacatctgagagaattcctatttatttttttctattaactaaattatcaacaaatctccacttacactactatatatatatatatatgttgtatcttatttagttacaacaaatatcataacagaaacaattgttagatatcaaaaggtttctcttagatttttttatagatgaaaatttaaaacattaatttcaattaaaaactgttaacaaataaatcaaagtattagtacttaaaaaaaaattatgtgagagcaaaatatttaatccttatctttaacattttcttttttattttgtatttggtatttattaaagataaagattatatatagctgatttatttatatatttcataattttacataaattaattttatacttttttcaaagtcattaattttcaatctccagtagttgaaaactgatgattagatcattagatacatattttttttttcttaagtatataatattgatgatatagaactctcaactgggaactatctcgttgcaaaagaatggagaaagacaaaaataatcgtgagactatcattacatcaaatgatattttagaagagatctttcaatatcttccaagctaagttcaaggccgtgtcgaaacaatggagattgatgatcgaatcaacctatttatcccacaaacgtctcgttcgatggggattacaaaccccgaacacgaaacttcttgttgttcatcaactgtcatcaaattctgactcaacaactttgcttttgaaaacttttaaaagagatcatgacaataacggacaaatatgtctttcttcttctagttcttatacttttcctgataatccaatcaaccaatctcgacacgaaactatccaagtcttggggtcttgcgacggattggtcttggttgggacctacgattttaagtacctttacttaatcaatccaacgacgggagagtggatatttgacaatttttctaatatatgtatttttgttcatttgaaggagaatttgtgaccataaggccattttgcgttggatttggaaaagacattattacaaaatcatacaaggtgattttgatgtactcagaaaaaaatcatcctcatggatattttgatggtttcaatatcaaagctatatctcttgataatggaaagcaacgagacgccggttggtacgttttagatgagcacgaaatttgcaatgaacaaacaccggtttacgcaaacggatcactcttttggtggacaacatttacttcttggaaatatcgaatattttcagaattaccttcacagatattagcttgtgatctacacacacaaaattttcgatgggtatcaataccggaatgttacacccgttacactcgtggagtgcaaatgtggagcctaaatgagcgtttgtgcttatcagatgtgctacacagacaatgttcagaattagacgtttggagtttacaagattctactcaaaaatgggagcatttgttttcttttaatattcttaatatcgatcgattagatgcaaaatgttggatgcttggtctaagggctgctcactttcgaaggattggagaggaccaaaatcaagtttcgtttgatagtataagaacggtgatttggtattcgccgactatgatttctccatcaaatttgttggtttgatgttgtttcaaccttctatgattaaataaatctcaaaagcttttgagtttttaacttcacaagtacaagtagaaagaaaagctcttgacttaaagaggaagagaaaaaaaaatgttttgtatttaaagaaggtacagtatagtggaatgacttgaagtattgggctgcacatgatccaacgctgaggattttacaattataattcaaaagcatatatcttggtcataccggttaactactgaagcggtcaaaaataaaacacacgaaaacgtatcttgtccaaacgacacgcagattaattactgtttaaacacattaagccacgtacaatagccggtcaccaattcaaggcatttatttagcaggcatccatgtttcattcctcactctctctctttttctctaaccataaaatctctttgatctctttctctgtgttttgataatg

SEQ ID NO: 28725 - DNA, 3000 bp, Unknown
  misc_feature (1)..( 3000): 2750-1469P.txt file - cDNA_ID_2998354; gDNA_ID_2926249; Annot_ID_142995
tttccttatcatgctgcactgaacgtttttttatgaccaactttcaattttctatgcgatctagaattaatctctgtaagtcgatcgatacggttgcaacagccacataaagcaacaacaaatcaacccattttacctataagccaaaaaagaagaacctctctcaacgtggaaccaaatcagcaatgagaccaaagggactaataaccatatttctcctacagattgttttccatgggtgtgaatggaacgttcctgggactaaatagcctatatgcaataaaacccgaaaacacaagagatatcatggacaacaaaatggctgtaatgctggccccatcgctagagcccttgacagttgaagccgtgagacccgaagaagaccccgaggagatatctagcggtgtccaatcgcagttgatcgtgtagtgtcctgatccatgccatggtttgctgtccactgggtaccagaatgcgacggacattttggccggcgagccaagcgtgaactgaacatcctgtagatatcaccaatctaggactcttagtttcttaaacagatgttctttatacataactcatattgaccaggtttcagttctaccggatagatttgttgtttctacaactacaagtgtctgacacatgtggatttggtttaagagtaactactatttcatagagggaaaaaatgcctggagattatactaaattttagggaagggccaatggtaactaaacgtcatcgatcgagtagaagatttactgacctgttggagacggtccattgtcctcaagggccttgaaaactcaaaatagtaagttcctttcttgccatctggcgtgtaagggctgtcttcctctacataacctgttaaaaacttcaaaaccaagtaactagaggagatgcctatggctacgatatggttataaacactgcgactaaattacacctcttattttttccagttaaaagcacgattattatatatctctgtattgggaactcatggaactgattatgaaggtatgtaaggctgacctgatagagtggtgaagctgctgtgccaccacgctccatgccaatcgttctgtgcactggaatcatttcctgtaaaaagaatatccatgtgatcacatatttgtaatttgcacacgagaaagagatcactctagagtagctagcatccaattagaatacacacaatttataatttaaggacgacttatacttggggaaacacattagagggttaagaacctaacaaacttggtaaataattgaagaccatagtcaattactaagcttccatgaaccaaagcagataaaaaggtaatttctgttcttagttgaaattggttattctttaacatcgtcatagggaatttttcagtcattaaaagctttttgagttatgatatagccctctgatataagaaggtacctgagggtccaagaccatcaaggtaccgacaatgtggattccatgcataaatgtcaaccagatgaccaaatctgttcatatgaaaaacacacagagacattcaataaaacaaaataaacagaggttcagataaggagctaaactagattcactatattggtacaagacaagaacaaagtaggagagagacagaacaaacgacattttactacaaatcacctgtcacctccatttccttccccgttgtctattggattaccaccgtaaagccgtcctggaatagcatttccaatggagaaatgcataatatcaacctcgaagcctctgcaagccttgctggtacatgagtctgtcccttctttacaaccacccatcttgtggaccagaaggttgacatcagttgtttagttgaacaaaatactcaagccaaatgagaaacttacattgtgataagtagcttgatcaccaatttggaacatgagagccactgaaggacacttgttgttttcactggatttaaagaagcaagcggttcactacaaataatgatagacttgcaatttgaagttatgtacgcagttactatctacttcaggtaatgaatggtcaccggttcttggatcatgcagaggtctagaaagggtataatcaaataataaaagacacacttaccctttatcataagcgtaatttccatcaatctccagaagaaagtagatatctcgaccatcatgtagtgcctacaaagatctaccaatcaaatgttaagaaggaaatcgaactcaaagtccataaaatccagatttatcaatcgaatccaaatgtcggaatgaggtcagcatcactagtcctatggtcaaactcaccaaatagatcttggcaaatctgaaatttcatcaatattatacatctacaagtaatgccaataagataatgcaaaatccgattcgaatcaacacattaccttgactgtcatcttcccggcgtcatactcgtgatcggagtccggatcaagtgcaggtcggagcgggaactcggagccgtcaatgtccttccagtcatcgttgtgaccatcgagggtgataatccccggtctgaaatcggctaagacctgaatctccgagtccgattcacaactccattcgccggattcctggtgaggtacaaccgtctccgccgtgaaaatcaagagccacgctacaaccacgagctgaagcattttgatttttctaccggaaatttggtttctacagttgactgacgattacttgactcttcttcaaacggtaagcaaatcacgacagctgtaattaaaaaacaattatttttaattaaatattatttttaattaaatattatttttagtgggctttataaagcccattaagccctaaagagtcaagagaaccttgataaaaccaacggagatctacagatcggagtcatcggtccgatatcttggatccgtgctccattgacgaacaataatcattcttctttttcttaagttcaaccattttagctccttcactggagcttcacgtcgggtacaatg

SEQ ID NO: 28726 - DNA, 3000 bp, Unknown
  misc_feature (1)..( 3000): 2750-1469P.txt file - cDNA_ID_2998382; gDNA_ID_2926249; Annot_ID_143008
cacagagattctccgcgagaattgctgtcgtccaggcgaccgtttaatttttctgataaattataagccaattttcataataaccaaaatacccctgttgaatagtcaaatcttgtagcaaaataatatgatcagcccatgcatatttatagacgattaaccctcttttggaccaaaattcgtacaacaatcttcctaaaacaacactaaacaattcagtccaggcgacgatctctcctagagcagaagaccgaggaggccacgccggcgacaaccaagagaccaaaaaaacaaacacaccgccttaacaatcaagtgacatcaccgttgtctcctcttttctattatttgataaataataaataaattcattttgttttacttgactttgactttgaacattatgagtactgataccgctttacgtatcttggtccaatatttcgattgcccatacttaagctgtgaatggtaaccaaaaccgcatccaaaaccgcactacaacagtgttgtaacagtatcaaaatctctacatatacatatgtatctatgtattttcgttattatttgaatcgcatcgcactttttccacaccacaaaacgcaatcaccattcggaaccttaatttaatttttcaatagagcgaacttgttaattgtaattcgccacaactatatatttcactttaactagacacaccctttcgttgatttttttttttttttttgcacacaccctttagttgattagtattaccaaatttctagacagatagaaccatataagtaacggatagtaataaaaaaaaagagactatcttttagatgcatggggataaggaactgtcagtttttagtttttatttcgtgtttttaaaacataaatgaaacacatgcttttttagggggtattatagaattgggtacttattgggccaaaaactagagaaaaagaacattttaatgggcttataaaaataagtacttgttgaaataaaaaatgacgattttacccctttctctaattgattgtgttctcatctttcatcgtcttcttcatcatcaccacaattttttccgaccacaacagtccttgcttctcagttctccccaccgcaattacttcattaacgccgtattcttctactctatcattgttatatccgtcaacaccaatcttttctaaaatcccatggatccaatcaaacgaattgtcattgaaggaatctaaactctaagggatactgtccagggaacccaaaaactctaatcttaaacacaaatcagatcaattattttccaattcatcaaaattctaaaccaaaagagaaatcaatttttatcgaagctttgaaaaacttggatgttggaaggagaaagagaaaaacaatcgacaatgaattattagggcaaaaacgtctttacaaccatatataagtacctagatttgtgaggtatatgagatatgccttattcaacaaaggaatagacttaattgtggtttattcataatcgatcctgcttttttaccaggtacagaagggagagagataaaggttacattatgattaatttgaaaaatagattgaacattatgcaggagaaaagctgaggaaaagaaagcagaagaagacaggttgtcataagaaaagagagtaatgacattagaagattccaaaagataaaaaaattactgaagtggacattggagatggtgttggcagagagatttgtcctctcttttctctctatataaaataaaatatctcatatttcttccgttatatattctcctcgtatatagtatatattcaatgactgatgggaatataatctaaaatatattaactcgagtactaaaattctcagttctacgtcttgtcttgtttaatacaaggaaaaactgatacgactataatctagtattgtactatttcatttttccttataataaaatttgaatttttggtttgtctagtgtgacatgacatctctgcgcgtgtacgttcccggctaaaactttgggaagtgtgtttctctgttgcagtaaagattacagtgtatatcattctatattattatagtatataaattatagttctcttctcaaaccagaaatttacttttaagtataaataattgttgattctgtaattaaacaatgaatttgtactaaggtatttagacaaattcactcctctctcagttaataaataatcaaaggggaagaacagagttgcatgaatagaaagctagggtttgctctataattgtagtctttttgtattaggttaaagatggatccctggagagtttgaccctcccctatttatacaatgggtcgaacataccaaaatatgataaacttctaattatcttaagtctaaatctccattacttccattcttcatgagattaccctcttttaaatggaagttttcccttcacacgacctcagaagccgcttatggcgatctcgattgtcgacctaaatcttctggcgagctcatgacttaaggcccattcacaggctatccgggattccccggttcaatcgaattctcgattttattcacgttattccttggtttaaattggtattgtcggaggtgctaattcctgcaccaacaattagtccccccagttcggagagtccgagttgcttaattcgaaatttccgaacttagaaattgaatattcgatttaaatcttggaaagcgtgaattaatcattagatttccgaatcgattcgtatttcgaacgtatctgacatgtgtccaatcgctgcgtcagtacgcgcgcgtgaagctcaggaaccgaagcgtctcgtaggtttaatgatgacctcgtaggtttgccgcccattcgcctctatttatattagattaaaccctcgggaaatcattttccgccgcttgcaagaagaatcaaaggtagctctcgctctctcctctgcgaattattttgtactctcgattctttatcgatttttccggcaatg

SEQ ID NO: 28727 - DNA, 3003 bp, Unknown
  misc_feature (1)..( 3003): 2750-1469P.txt file - cDNA_ID_2998390; gDNA_ID_2926249; Annot_ID_143010
tacgcgataatagctgagataggacatgattttgaaacggattttgacgacattcgataatctgaatctgaagcggtgcaaaattgatttagaaattgagtatggtagccaaaagggtgagattatggtgtataagaagagacaacgagcaagcgttgatcaaccatgtagcagagaacccggagttctaacaagtagctcaagctccttgaccagtagagaagaatctcaacaagtgtgctctgaccagtccaagtcttcgcgtggcagagttcgagcggttccttcaaggttcagggactccattgttggtacatggaaatccttgaagagtcgcaaggaagagtcgacggagacatgtatctggggaagctcgaaattgcatcgaagcaaagacccgaagctgtttccacgtaaggataacgaagacagcagcgaagtagattgcgattactgggatgctaactttggtatgccgaaaaagtccgacgcctcgcgtaagggcgtgtacaaaccagaggaatttacagtcggcgatcttgtctgggccggctgtggtacaagcgcctgatggggtcttgaaacattgcgtccctggcgcaatacgtgtcatgttttttgggtactctaaatggaaaaaaattgtcaattgtcaaaaagtcgtgttaaatatagatgtattgtacagatctttgactttgaagtacttcatttgctgatcacagcctcatctttatctgttttttttacactgtaattatagattggatgccgattggtgcctttgtgcttgattctcgaacttcactcctgactgagagtttgagtggtcgcctgaaagtcccaaaggaaggaaccatagaacggatgttacaaaaatgtcttattcatgatcttcagaaactttgtcaactgcaggaaaaactgtaacatatggcttatctcattttccagatttacagcttgtgcgacctgtttgtgacctcagtacctgtgaggtaaaagacactaatcaactctaatctgttgctgaaacttttgtattgatctcttgcaataactaaattgcaactaagagtgtttctgttttactatgtaggaacaatgcaaactcttgatgctaggcacattgaactcttccttagtgaaggctacaaagatggaagctgggactacaatctgattggatctcataagttgcagaaaaacgcaagtgcagcttgtggagccatatttgacctcaaacaccataaagaatcttcatcctcaggtaacttcaaatcttcattactgttatgttcctttacttctcctctttgaatcattctcctttgtctcatacaaatttcacatgaaacctctataataggtattctcaacctcaagtcttggaccggacagccagatatttcccaacctaaagcagttatcgcaccccatgcagttgctgttcacacaagattgcgagaaaacgaaggtatataactttgcatcatcaaccatctttatctagaaaacacaattacaaataattctcttgccaaaaggaattgaatccaaatttgttgtttcagttgcggaaatccaatcagtattgtggcatttgcaagagagtatggcagcccttcaaatgatggagattgggtgagaatatatgtgaccatgtttggtgaaatacagacctgtaagaaatgattacatctatttagctgacttgatttgatgtattaggtttattgtgatgagtgtgatgtatggccgtatgggtgcgacaataatttatataagcgctttaaggtacaccttcatgcatcttaacttttgattctaagtaatgaacacgcttgttgaactatcacactaatttggttatcatcttaaggaactggagcacaacagttactattgccctaactgtaaagtccagcatgagcttatcaatattagaagaacagaactcagtgttcaagtatattgttaacttctcatgttctcctgattttattgtttgcatttctccattgctataatatgcgagatttcctcacaacctctttgggattggtctacagaaaaggcgacacagactgagctgcctgatgagattaatgtagtctgtaatggcatggaaggaacatatatcagagcatttcatgcgtacgtattagatgtctcagccttatttcaatttcttcatttagaaaggatcttatttgtttatgaattatgactatgcagcacaatatcgtaaattgattttttctctgaaaacgataaaaaatccgtgtttaatcctaggtttctgttatcattgtcttgttgttttagagatttgaccaacacattaatctttgaactattgtttcagaattgagtgcaagtgtggttcatgtgggtcaaggaagcagtcaccaagtgaatgggaacggcatacaggctgtagatactagatagcgtaagagtgaaagacacaatgctacctctagaaaaatggctttgcatgaagactttgatactatatgtatctgtatatgtagaagagtatcagttttatctaaatgactagtctccaaatttgtggtttattgatttcgtcagaatggtaggctctttaactgatttaaggtgaaaactacattggtctttgttcagtgttagatttgtcttttgtgggtttggaatggattaaagaggagtcttttactggattttgttgaatgctagatttgggtttagtaaacaatgaatcctttactggttttgaaggatgttatatttgaaactgattagagctaaaccctctattgcttagtggttcttaatttaagggttttgccgcagcttccctaatttaagcttgttttctaatacaaagtacaaaagcagtgtgttcgtcaactatcttcttactctgttttcgtttagagagtttttgcagagatgaggagaactataacaatggtgataaagatgtcaatacttatgatattgatttcatcaatg

SEQ ID NO: 28728 - DNA, 3000 bp, Unknown
  misc_feature (1)..( 3000): 2750-1469P.txt file - cDNA_ID_2998400; gDNA_ID_2926250; Annot_ID_143015
ctgagattgttgggggtgtaatctgctgtttattaaacgaagaggatcctgatattccgtgtaatgatgacattttcctgtccaacaactcccgtccgatgtcagtttcttctttagcccggcggaactttaaggataccaatagtccaataactacatgtgtaagagacgtctccgccagtaaggaaaaaagtgagggatattcactccaggctcaaaagaaaaaaccaggacgtttacaggggtctactcaaggaaagccagagatgggccaaccaagtaaaggtagcaaattcagggcatcgactagtactgagttaaagaatactgtagctcctggtggttcttcctctgcacaggcttgctctaatactctactttctactggtaccggtgcaaaagatggaaagaaagaaactgctactggaacactctttgtcggatctgatggccatggcaaccacccagagaaggatagtgaaaattgtaaagagaaaaatgttgtaccacctgttaatgaatcgccacatgctaaagatactgatgatggcttgatagagattacagtccctgagctggagatcacccgtgcagaagcagaagcagaagcagaagcgcatgtttgtgagagtgatgaggacttacccaattattctgacattgaggctatggtaactcttgacttccatctttattcttgtgctatggttccatgacacgtaaacacctaatccataacactcttttttatttcagatacttgacatggacttggaacctgatgatcaagataattttgatctcgaaggtagttgagcgtcccttctcgtccagtggaactcatgtttctttctatctatctacatttttgggaaaagaaagcttttagtatgtgaataggaatgtatttcggcatttggctcctaaaagttattacatgctgcagtgatgtgggaaaccttttctatgggtagcgtatgagatgttagaagaggtttaaggcttgtttgtaaatccctaaaatgttttcacttgcagtctccaagtatcagagccaagacatgaaaagaacaatcataagacttgagcaggctgctcattcatatatgcaaagagccattgcttcccgtggtgcattcgctgttttatatggcagatattcaaaacactatatcaagaagcctgaggtaatattatcttattcgtttaatattccttgtatgatttgataagcttcttaagaattatagtagcacttgttgatatcggggttcttttttcttaacataggttttggtgggtagatcaacagaagacctcgctgtggacattgatttgggaagagaaaagcggggtagcaaaatatctcgacgacaggtcggtcaatagtagatacttctatttgtattttaggtctttaagttgtatgagaagcagcagcccaggatctgtaatggttgttgtgtatgtttttttcctttttgggttactgaatgcaggcgatcatacggctgggtgatgacggttcgtttcatataaaaaacctggggaagtattcaatctcagtaaatgagaaggaagtagatcctggacagagtttaatcctcaaatccgattgtctagttgaggtttgatccgggatactcttttatgatcattacttacgcttctaggtccgtacttaaacccgatatatgtgcgcgcagatacggggaatgccttttatatttgaaacaaaccaaagttgcatgcaagagtacctgaagagaagagggaaagtgaactgagaccagatcaagagtgcgtgttgtttgtgtagatgaatgatgcatctcttgtgtaatgtaccttagccataggaacacgtcttgtagatcttttaatacatctttagttccgcatcatgcatagttgaccctgttttaaggcgttgaaatgaaaatacaagtctcttgtatctgaatttgtgttttaagcgaagaatgattgttcttgtgaagttgatacacaagttctttggatatcctatcagtataaaggataggtttccattttcgtgactcactcactgatttccattgcttgaaaattgatgatgaactaagatcaatccatgttagtttcaaaacaacagtaactgtggccaacttagttttgaaacaacactaactggtcgaagcaaaaagaaaaaagagtttcatcatatatctgatttgatggactgtttggagttaggaccaaacattatctacaaacaaagacttttctcctaacttgtgattccttcttaaaccctaggggtaatattctattttccaaggatctttagttaaaggcaaatccgggaaattattgtaatcatttggggaaacatataaaagatttgagttagatggaagtgacgattaatccaaacatatatatctctttcttcttatttcccaaattaacagacaaaagtagaatattggcttttaacaccaatataaaaacttgttcacacctaaacacttttgtttactttagggtaagtgtaaaaagccaaccaaatccacctgcactgatttgacgtttacaaacgccgttaagtttgtcaccgtctaaacaaaaacaaagtagaagctaacggagctccgttaataaattgacgaaaagcaaaccaagtttttagctttggtccccctcttttaccaagtgacaattgatttaagcagtgtcttgtaattatacaaccatcgatgtccgttgatttaaacagtgtcttgtaattaaaaaaatcagtttacataaatggaaaatttatcacttagttttcatcaacttctgaacttacctttcatggattaggcaatactttccatttttagtaactcaagtggaccctttacttcttcaactccatctctctctttctatttcacttctttcttctcattatatctcttgtcctctccaccaaatctcttcaacaaaaagattaaacaaagagagaagaatatg

SEQ ID NO: 28729 - DNA, 3000 bp, Unknown; identical to SEQ ID NO: 28728
  misc_feature (1)..( 3000): 2750-1469P.txt file - cDNA_ID_2998400; gDNA_ID_2926250; Annot_ID_204340

SEQ ID NO: 28730 - DNA, 3000 bp, Unknown
  misc_feature (1)..( 3000): 2750-1469P.txt file - cDNA_ID_2998404; gDNA_ID_2926250; Annot_ID_143016
agaaagcgtttatttatgtgattgttacatcttggtgttcatttgggtccaggcaaaatgaattcaaatgcattaaaagatatagagattaacttaaggtgctagtggatcaaaggatctgaaatacgatgtaaagtgaaaatagtatacttgttctcaatgtgttcaagcgggtttcttggttcactcttttcattttacttatttgttactttaccatgaatgttcagagaaattctctaaatagtttcctagattttattcaagtcaattgctattttgttgcctgggttgaactgaggtttaggtaactgacgtgttgtcgttgcagtatacatacttggatgaggtgtcatttaattctctgcgataaagttactctcttttggatacatataattagatttacgtgcattgtaattgggttattctgttggttggaaatcttctctttgttttcttattttatacttgatttcttgcctagagaaattggaactcaaatatagtaagcaaaggtctgtccggaagtagaaattgatttcttttgttatttctacattttttatgtagattctggatgtggctgtttccttagccaaagttgcggatatagacaggactctacaaaatgaagttgcagcgacagatgggttcaaggaaggcatgagactgctggaatctttgaaactggactctgaagattctgctctcgagcaacgggtaagattcttgcacgactccctttttatttgtatcttatccaaagctgctgaatgtcagtaaaactttatctgacaaatgtaattttaacatgcatgcagcggctctctgtactggagttccttaagaagcaagtagaaaccgatgctgaaactgcactctaaaccgatgcaggcttaagtacgtatatagaaattatacctaagttctcgtctgtggcattttgctgaataaagaaagcaaaaatgttgtatttgcgctcaagggacaaagaaacagagttgtctgtatgttgtgaattgtgatggttttcaactttcaatgcactaatcttgcaatgttaaattgttaagcatgattgtactctatgcacttgtgaaatttaaaaattaagatatcttaagcggctacagctgtgaactgctttctatttcttttcagtgcaaaatgagaaagaacccaacagagattgagagatgatgtgaaaggaaaatgcaagtatttgcaaactcaatcagctacaaagagtataaattgcgacaacaaaaatttgtctttgttgttttgttgaatgaagtttttcttgtaactactcttacaaaaataaaaacataaacatagtcaatccctaaagccgatgatactatgcaaacgacaaagatatactaactccaacgcacgaatcaacaaaattaggtcacttttacgaaaataaatctacataatcaacaaaattaggtcaacttcgttctatttgtaaagcttttttcagtatttttttctttaatatgttcacgtcttttaactgttcatataattacgtaactaaatctttaacttcgtatgtaaaactatgtttttacgtattagatatagagaaattgttaagaatgtttttccaaaaatatgtttttttagtactatcctcccatgtaatcatttttattgatattatcttttaattattaatgactattttgcttctatttgaaaatacttaaatcaacaaaatgaaaaaatgattttttccgccaaaaaatgtacttcacatcaactgctatgaaacaatgtactgattttatcaattcacaaaaattcttgcctctaatcaatcgtgattcaagcaatcatgcaaaatcttgagtaaccaagcctaaaaaacctaaaaacctaatcaattcttaaaagatacggaaattaaagtcaaagattactatcaactctcgcctcttatccatcttaattagttcttcaaagatttcacacgagtaacctaaaatccattgaaattaagtcaactatatacctctcttcgcggtttatagttgaaatctggaggcatcgccaagtagccgccagcttcgccgattttacgttgaagatcagcgttttcttccaatatgaaatttctggcgtaaagcgataagtgcacttttccggcatagattgagttgaactgaacaagaatagtacgacgacagatcagatttttgaggataaagaaaccattgtcgagaatttgagaaaaagatgaaagtcgagaaatgattattgattatctgaggatttataaaatatataaaaaatatttaaagttcaaattttattaatcctactaatattagtttagaagtacatttaaaaaatatgaactaatatctatcatctaaaagagtataaattacaacaacaaacgaaatgtgttgaaagaggctgtttttccgggaaataagcatttgaagtttagtttcagaaaaaggagttaaaagaagagcaaagtaaaaaaatcacatatatccaaaacggtgtcgttccattctcaaacgtgctttatcttcttctttacacactctcgcctccggacgacggagacagtcagatataaattagggtttcagattttttagattttatctcttcaattcgagccagtgaattgccgcctcctcctcctcctcttcttccctcaagttagttactttcgtcttgagttttctaaattctctatctataaattgtgatatcaacttgtgagaatttcgaaaaaattgtatgtgcgtcttctttggagcttgagaatttaacgagagtattgattttttacctacagtacataaccaaagcaatgaaattctacttgtatcctgtaatggctgactaaatcaactgcgaatcgtggttcgtcactttcttaattaactatttttttttcgatctttgtctaatttcaataatttatccaaatcctgatacttgttgttccagttttgtgacatg

SEQ ID NO: 28731 - DNA, 3000 bp, Unknown; identical to SEQ ID NO: 14457
  misc_feature (1)..( 3000): 2750-1469P.txt file - cDNA_ID_2998410; gDNA_ID_2684120; Annot_ID_190924

SEQ ID NO: 28732 - DNA, 3000 bp, Unknown; identical to SEQ ID NO: 14457
  misc_feature (1)..( 3000): 2750-1469P.txt file - cDNA_ID_2998410; gDNA_ID_2926250; Annot_ID_143021

SEQ ID NO: 28733 - DNA, 3000 bp, Unknown; identical to SEQ ID NO: 14457
  misc_feature (1)..( 3000): 2750-1469P.txt file - cDNA_ID_2998410; gDNA_ID_2926250; Annot_ID_204346

SEQ ID NO: 28734 - DNA, 3000 bp, Unknown
  misc_feature (1)..( 3000): 2750-1469P.txt file - cDNA_ID_2998446; gDNA_ID_2926251; Annot_ID_143034
ttgtatctcctttcattattatgattgttaaactcttgatatatgttttcttgtctctgcagtaccgttaaagaggcctttgactgatgcttataatacacaaacatgttggtgttgatgaattggccttgaatcttttaagttgttgttgcattcttctttaaagtttatctcttatttggaacaatgatcttttggttttgattaatattttgcttgttaatatagaccattttggcatagaatctctaggttttcttgaagacgtttagacatcagaatccttgaaaatccaaatgtttttattatatggttttgatttcgcaatgtgagctctgccttatgcttcagctgaactacacaatctgataaagaaacctagtactaacatcattatctcacttcgttaattctctaatctaactgtacgttccaaaattttagtttctgtattaccgtaattaaaaattagtttcaaaattttacagtctaaacttgtcaaccatcccttgaagccatcttaagtggtaagttcctcttcgcttctttctaatggcttttcatcttaagtgaaacgaacctttcctagttccattctttgcgctgatccttgtggagcggatatcagagacgtctcgaacttgaaaaagaagctgcctccggagttgatgaaagaaatgggaacgatcaggtcatctcatgactgggtagctacttcaaaggacgatggagttctgcgtctccaagatgacttaaactcggttgcgtcggacagagatccaagacgcagcttgcgacctcatgcctcattgccaaaccaaaattgttaccaacgtattaatgccattatccttaggatggattctgttgtggcgattcaaaacgcagcttggtgttttttctgtttacaaaaagatccattttttttttaataaaaagactgaaaaaagcccacaattttaaaaataatttgttttgattataataaaatgccaaaaatattacaaataataaaatagataaattataatactaaaaagcccaaaaacgttttttgcccaaaggtcatcatttctttgggtggagctggttgtggttgtcaagttcttgggatctcaatttagcattatagatccgctcaaagcaaaaatttcaagtggatcatcatcgcaaacccctgctccttcccctcccgtgtcattagtccaagaaagatgacatgttttgcattcctggatcaagaggtcacttcactagatcatgggatctccacaatctcagcaagaaatcatgttgcagagtttacagttttaaaactttcatgtgccgacaaagactagacgagagcttttgaagtcgtgttgcacaagccaacactcgatggagtcattatcaacttgtgagactttgttggttaagtcagtgatacaaaaagaccaccgtcaagatcatcaaggtataactacaataaaaataaaagttttaatggtgaacaaggaaacacaacttatactaaagatgtcagagatctctgcatttcactctcaaaaattgaactttactctatcccagctagctcatgtcctagaaggatatggtggtttgctcatattttaatagatgtctagttgttgaaatttctaatttacttaggcatatcaaaatcaaaccgtaatcgtatttaggactataactgtaccatttttaaattgtaattagactataatcaaattaaacagttaaaaattgtaattattaatcgtaaaaaaaaaattggttaacagttttttatatgtaaagttaccatatttaccataacagttaaaattgtaactttgtaaattgtcaaaaaaacattacatttttataccaaatttagatattttgaatgttttttattttcaaattagacatttcgaatctatatggggatacattgttttgtaacaattgaaaaactaaataaaaataaaaatcattatatgaccaaaaattgttccatctctttacttggcatttacacataaatttatagaaaataataaaaaatatatttagcatttataggaaagcattttatgttatctaattagatgaattatttaaacaaataaaccatgtaataaaaagaattctatgttacctagtatgatttaatacattatcaaacacaatttttatgcatttctattttattacatggtcaaataaaataacatagaaatgcataaaatgttatataactatctagtttctccttcttgcatcgacaaacacaattttcatgcatcatctctatttgttttgttcgaacgaatggtattttggtccaaattcattactcttgccaaaacatgaggttagttcccactttaccaatccatgtgacttacaagttaaaagtgattttattttatgaaaaaatacttttttaaatagtgctttgcaatggagctataaaaatatacctatataatttatgttgggactgtttatgataaaaagtttgtaattatgagaagatgaacgttaaaacgtatattgaaataatggcatattcatttatttgtctgacacaacacatgtacatgtcccacccatctctctttcttatggcgaaaactacaaattttacgcattttttccttgtttcgtccaaattcgaaacaaaggacattttcgttcaaattcattcttttgccaaaccataaaagttagtttcaagccaaaactattttaaataatgcgtgtcacaaataaaaaaactaaaaaacgtaaataatgattgtcattattcattattaggccaacttgtcataatagttagtgcccatacgaaaaatacatctatccaactaaccctctcctcctccatttctactttgttttttgttttcccacttctctcaagcctcgacgaccaaaatttttctttctacaaatactttgacttaagagttgcagaaatatcaagttaaaaaaaaaacagaaggagaaatg

SEQ ID NO: 28735 - DNA, 3000 bp, Unknown; identical to SEQ ID NO: 28734
  misc_feature (1)..( 3000): 2750-1469P.txt file - cDNA_ID_2998446; gDNA_ID_2926251; Annot_ID_204375

SEQ ID NO: 28736 - DNA, 3000 bp, Unknown
  misc_feature (1)..( 3000): 2750-1469P.txt file - cDNA_ID_2998450; gDNA_ID_2926251; Annot_ID_143036
cccacatattatggtgtgatttggatagaatgtttcaaatctttcatttttccacccattttaattcttttaaattcagttcttcaataccccctaagtcgtttgagggactagcacaattgatatatttgatttagccacttggaaaaatccgttatctgaatccgaactataatttatgaattatgagagtcggccgaaatcaattttcattaaaaagaaattgtagaataaataacttttttaataaaaggacacatttctcttttgtgtatatacatattactttttgattttgaaagatattttttcacaaaattttgaaggatattaaacatcaattacatatgaaacaaaaatacattaaacatctaaaaagatttactttttcattgagtaacaggaggactatgcccatgaaattgaccatctttcttgatgttgcgagcatcccaaaaacgaagtaggcgaccaacaacctgttgagtaaagcgaccaagacgtaaagcatcaaaagctacatagtttgtttcagaaggaattgcaacaacatcaactgcagccactttcatatatataagaaacatacaaatatgagccgacaagtaaaccacaattacaaacgtgtatgcatttggtgatggtgatgatgcaactatacatgacacatcaaaagatgcatgttgatgatggaactatacatgacacatcaaaagataaccttcatcatatagtcatatattcgatcaagttggcattataactcaactatgaaaatgttaaatctgagctgataaatcaactataaccttctcaagtgatactacagaattaatagactcaagctgcaaacaagaacgaactgaaattgtttttgaggcaatgaaataatcttacaagaccaaaaagtatcaagccaggaaccctttaaagccattgttcacgacggagaccaagcttgttctgcttcatcttagccgacttattgttctgcaacacactatgcaatagcaatacacaaaaacattagccactcgtattgttataagcttatcagttgctaatcctaattcgtcactctaaacctgagtataagcactcaaaactctacttagtgcttacatcaataaaattaatctgagaagaatggagcgttgacttcatctgacaattaagcacacaactaattagaaccatcaccacggagagatgaatcaaaaaaccaatctctaatcgatgtttggtcttaccacattggtaataacttggaaagattggcttcaaaaggcagcttttgattgagagtgaacaagcacggattttacaaaaacgacgtgtccaacaacaagatcaaaatcaagataaaaaaacttctcctccatctacttcatttggacaatattttaatggttaaattgcaaactagtaacttttcagaacataattataaaatagggcaagttactatttataattgtagatttagtcactctcctcttaccccactaatcagaaaatcgattataccccatagaaacaactatatttaccaacatgccattgtgagagagagaaacgtgtgggaccttagtgcgttaggattttctttaaaaaatctttttctttctttattacatatcccaacaaagtttaataattaaaatgctctttaataaaattatatttttttaaaaattgatcatataaataaaatctatgtttttttctctatcatttgaaatgcattttgtttaatgacttttaaattttatattatatgacacagtataaataatatatatctatacagatatagactactgtacagatatggcgttgtgtatatttatatacatatgtacactaaaagtgtttgtacagatgtaagtgtacgaatcaaatagttaaaagtatacaagtgtataaaaaaattgagatatgttgttaaataataaattaagttgtataaatttgttataaatatgaatattaaatatgctgtataaataaaagtgtgtacatataattaattaattaacagtaaattatgatttcgtttaacagatgcatcaatttgtacagtagtttatatctgtacagtgatctatatcagtacagtaatcatatctgtacattggtctatatatatatacagtaatctatgactagtttgccaacacactcatattttagcttggcggatctacaagcaatttatcggactattaaattactagttttaagttttaggtttcttatgttgtttattttaaatttagtatttgtttgttgttaagtttataaaattattttatatttagtacttgtttgcttgttaagtttataaaactatgtgttgtaactgttgtttgtaaaatgattatatgtattaaataaaaaaaagaaattgagggactaaagtatagaaaaaaaaattgaactaaaaatagaattgagaatagagttgctctatgtatagagtcaatatgtagaaatctctatttttgagtcaattatagagtagagttgaagaagaattttgttattaagagagaccgctgtcgtttttgatatattttttcacgattttgttgagagaacccattgagagaacttgacttaacaatatcacatgtctttttttttttcatctaaaaaatacttcattaatatgaatcagtgtatacaaaattatcaatgagattacagagataatcaatggtttatgtaacgaagaaaggataaagtaaattacgctccactttcttaatcaagtacttaatcacatgtcttatctgcttattttggaataaaaaataggaggccaatgttgggctattaatgggcctacaacctagcccgttagtattattttgttttctttaataaatccgctgttgataaaattaatcttctcctccaacgagactaatatttctagggttttgaagagtctctcgtcgccgtttgtaattcctctgtgagcaaatcgacaaaatg

SEQ ID NO: 28737 - DNA, 3000 bp, Unknown; identical to SEQ ID NO: 28736
  misc_feature (1)..( 3000): 2750-1469P.txt file - cDNA_ID_2998450; gDNA_ID_2926251; Annot_ID_204377

SEQ ID NO: 28738 - DNA, 3000 bp, Unknown
  misc_feature (1)..( 3000): 2750-1469P.txt file - cDNA_ID_2998458; gDNA_ID_2926251; Annot_ID_143039
atatatatatatatatatatatataatattaaatttacccgtattgttgtttttgtaggaggagttaaaattttagtgggatgagttgaatctgttcgtctagaagggtttgtgctccgtcgacgattggaagccattctacattcaataaaatccaacaatttctaaattagaaaataaattattatatatctacgtcttgtactttagtcttgcatctatatatttttttttataactttatacatattacaacaacacttttatataaaatacgatataaatcattgattttatttgacaaattaagctagttacacatgtatattaaacatgtatgcaacatacacgtgtatatgagctaattactaaactagttgagaaactaagctagttacaaactaagctaattactatgcaacatacacgtatattacaaaaaaataaaagcaggatgttcaatggattaatcaggctttcacataaaccggaatatgaattctatatccatttctttaaaatataatcttgttctaagttgatagtgtcgtgtggttaaaaaactctataaacaaaattatacacaaataattacttttaatggggattggcaactttctttaatatcaaagtagaaaaaaaaaaagagtgtaatgagagagaatgaatttttgtgttttgttcgtaaattctctctacactaatttaccaatatataaggaagaaacaattaatagaaaaagaaattataaaagaagataatattgtaccagcgaattttactggaccactgcttaactggagtgtggcagttttgaagtgcggtcctgtgttattatcctttgaaatccgcatctgtttttttttttttttttggaaaacgcaatttatcttttagttttattgattggtgaaaagtcacgtttttccacactctcactttaaaatccgcgaatactgtgtctccattcactgcctaaaaaccacaaaacattttgaaaacaaattaaaaatatatgcgatgtatgtttacaatttaagtatttgtattaattattaaattttacgaaataaaatatttgtaattgttaatttaataataaatttttttctttttaagaaacccattgaagaattttaccattagacgaacaaaaaattaatgaccaacagaaacttttaaacttaaaaatttcaaaatttatgattaaaaatttggaagaaaccctcatggtcccttgccattggggttgctctaagaacactaatttttgggtttgtagtgttcactaattttagttttgtagtgtgaaaactaaaacatcactaagctcatgaattacatcttttgtaccttgaatcaacttgccttataattttgtctaggaaactatttctttagtaattaacaatcacttactcgtatttgaaccgatgtaacaaaaactgtggatgacaattaaacaagaaaatgcatcacagttttgttatatgactataaacaagttagaaagtatatcatcatagtccaaaggaccaatgtaaatattgaaaatagtaaggacttcttataaacggcgagaatatccggaacctccacatttcttgcaaaaaatcaaacctacattaacaaaacaaaacttattcatatgttatcaagagactactgtatttagcacccaaaaaaacagaccaagaaaatggtttaagtattaagtacctgaacctttgcagactttgcaatcaaccatgccagattccaccttcatcttcccttctaggcaaaatacacatttcgttccgcctttgtgcgcaacccataaaacacaaaagattacaaagacaattagactcggaaaagagaatgcgctagaataccttcaagttttcgtaggaattttgtaggaaatttctttcgaaattctgacatcaattttcgaaataacctttgaatttcctactaaatatatttttcgtcacaatttcgtagaattttgatagataattttttctaccataaatttggtaggaaaccgggtaggaaaactctatgttttcttgtagtatatcaatgttaagttgatctagaatacctgtgaaactacagtatacattgtttactttcattgaacaatgcataagtatccaatcaaaagacaagcatgctacatagtaaaactagtttagaattttttttaagataatttacatagaacctaatggattttgatttcatgatataggtgactaaaaatttaataagacatatactaatcataatgcaaacaaagagagacagagtaaaagattcaccgtttccaccacatctctcacaaggaactggatctccctgaaacaaatcaataagacattaaaaagatcaaaaactcaccaaaatgacttattgaacgattaagtagagaagaataattgatacaaaaccttgaagccgaggaatagtgagagagcaatggctacaacgagactaatggtgacaataaaagtctgtgtatcgatgaatcctccaccgccatcgaaggcgctacttaggaaaagaacagaagggtgaatgatgagattagctgagtgttgatgaacacttgtccgtgacaacttgttacggtttctatggtggtggctaattagttcaggtttatgaaagaagagaagttttgttgttggttttaacgaggaagatgaagaagaagaagaaagaagttgcagagagatgagaggtcgactggccatggattcactcaaaaaaaaaaaaaaaaaaaaaagctaaggatcattcaaagcaaagaacatgtggatggagaagaaagaaaaaaaaaaaagaatccaccaattaatgggcctttagaaatatggcccatttagataaaaattgtactagttataaaaactcagcttcttcatcatcgtgactaaatttctagggttttgaagagtctctctcgtcgccgtttgttattcctctgtgagcaaatcgacgaaatg

SEQ ID NO: 28739 - DNA, 3000 bp, Unknown
  misc_feature (1)..( 3000): 2750-1469P.txt file - cDNA_ID_2998475; gDNA_ID_2926252; Annot_ID_143048
tgtttcatctttggttggggcaattagaaaactggaagatgagaggctccacttggcatttgagaatgtaaatctcttacggtcccaaatagttgagagggcttctgctagggaagaaatcagatggttgaagtcagattgggacttgcatatacagagactagaaaaggagaagagcgagctgcaggctggattggagaaagagcttgatagaagatcaggtgagtggacgtcaaaactcgaaaaattccagcttgaagagaagaagctccgagagcgtgtaagagagcttgctgagcataatgtctcactccagagagaactatctgctttccacgaaaatgagacagagaacaaagacatgataacacatttggagagaagagttgctgagctgaccacaacagcagataaattgcatgaagagaacaattatgttaaacaaactctctccaagttacaagagagttacgcaggtgctacagaagatcttgatttcttgagaagaaactttgaagagaaggatcaagaatgcagggagttgcacaaatctgttacaaagtttttcagaacttgcaaagaacaagggaagacaattgagggacttcgagatggtgtttctgaggaggttaagaagcaaccgtcagagaaattagaccagttggtcaagaaattgcaggtcgagcaggtaaggttgacagggatcgagctttcacttagaagggaagtagaatcaatgaagcttgaaactgactctcttcgccatgaaaatatctgtctactgaatcgattgaaagggaatggtcaagaaatagacattacaacccttaagctagagaatgagttgaagatgcgtgtctgctacttgcaagaacagggactgtcaatgttaaatgagagcagccagctgtgttacaagttactgaagttcatcaaagggaaattaactcagcttcctgaaacctatcaggataagaattcagtgaaggacggattaagtgagcagtttatgattgagtctgaaatgaaagtccatgggataaggcgcggaactgaaaacctgaagaggagtttgcaaacggtgaccagtgtggtagcttcgaattcagaatcgtcttcctcaaatactggtaggcctagggaacaaagaaaccaatcagttgaagtaagtccacggatatgtccatttcttaatatctctattgtattttcttgtatgtcctgttttgctttacactaatatgtggctaatgtatacctggcccaatctcatgtaggaaaacttgcgagcagaactgagtgctgagaccctaatcacaagtttagtgcgggagaaactgtattccaaggaaaaggaaatcgaacagctccaagcagaactagcagcagcagtacgaggtaatgagattctgagatgtgaggtccaaagcagtttagacaacctatcagttacaacccacgaactgaaagacctcaagcatcaggtattgcaaaacaagaataacacatatcccatgtctgtttttgtatataaagaaactattcccatttataaaatgttaactttacgctaatcttttttgacatcagatgttgaagaaggaggaaagcataagacggctcgaaagcaatctccaggaagcggcgaaagaaatggcgaggctgaacgcactattgtcaaaagtgtctaatgaaagaggccagatatggagtgagtataaacaatacggtgagaaaaacatgcttttgaactcagagaacgagacattgaaaggaatggtagagaaattggaggagaaggtattagagaaagaaggagagatcacaatactacaagacacaatcggaagcaagcatctgaatctcctctcaagtcctgatttcttggtataagggtttttctttatcattgtttcttagacgatgggtcattctttggggcttatagatatgattgtttcttcttttatttttacttttcttcttttggattgcttatctcaaagctggattctctctagtttcagatttgtacttaaaaatgggcttataaacttagtggtgaagtttatggtaaagaaagtttgtcatttgactcaattctattcaataaatcttcataagccattagttcaaaaagagactagcaataattttatatatatactatcttacataaatatatatatatatatatatatagacttggtatttttacttttttcactaaatatatgatcacttttcactatagttagtcattctttttctcaataagtttgacaaagctagtcttatattattttttttcctacacttgtagtaacaaattggtaccatattttagagaatatttcataaaaatagtagaggtattaaatgttgcaaaaaaaaagtcaaaccgttaaagtcaaaaagaaatggagagacgacaggtagagaaaataaaatactataaatttaccagaaaaaaaaaaacaccataaacacgatgaccgcgactatcggtactttctctctctaaaaaaaacaaatccaacgtctccgtctcttcttcaaacgcgtcttcttctctattttaaccctctttcatcgtctctttcgctttttataggttttgatttgtattagtaatcatcttgctaatctttccccctcattgatctgaaatcgaatgatggattattattctactccaagcttttgaaataaggaaccctatttctttcatctaatcctcgatttcatcaggtatttcaaatcaattacccaatcaggttgatgggtcaaagttgaaacctttagattcatatgtggatggagttatgtaaagttttcttcttaatcaaaatttgtttctcccagatgcttgttatcagattgatgggttaaaagttaaaaaatttagtttcctatgttgaaaatttggagactttatccttttttcgattctagattactaaatgttttgtttttgtttgtgtggaatgcagattaatg

SEQ ID NO: 28740 - DNA, 3000 bp, Unknown
  misc_feature (1)..( 3000): 2750-1469P.txt file - cDNA_ID_2998479; gDNA_ID_2926252; Annot_ID_143051
ttgaatacgagaaatccaaaacgcattttccatccaaacgctaagaatattattgttaacaacacaaacctaacagatttctcatgatgatgcaactcattcaacacatagaaccttcgtgttcacacgcttccacacgttacttcatatatataaggcctatacacagatactagcaaaacagagaacaaagactaacattttgatcatgcaaagagtgttttgattttcaagtgtaagcacatcatttctcactttaccatcttttgttctaaatgtctcgcatactagtagaagatgataatgcaacaccgtttcattccatggagattattagctcatctttgactttaggccaacttctcaagaacgttagcgacgttcgtaaggttgaagttggtgacgaaactcctgttcatgaattctttgacagggatggttcttcacttgacggagataatgatcatcttatgcgtcctgttcctttcgttctatctttcaacaaccttacttacaacgtctctgttcgccggaaacttgactttcacgacctggttccatggaggaggacatctttctccaagaccaagactcttctagacaatatctccggtgagactcgtgacggagagattcttgccgttcttggagctagcgggtcaggtaaatccactttgatcgacgctttagcgaatcggatcgctaaaggaagcttgaagggcacggtaacgcttaacggagaagctcttcaatctcggatgctgaaagttatctcagcttatgtaatgcaagacgatcttctcttcccgatgcttactgtggaagaaaccttaatgtttgcagctgagtttcgattaccaagaagcttacctaaatccaagaagaagcttcgagttcaagccctaatcgaccagttagggataagaaacgctgctaaaacaatcattggagacgaaggacaccgtggaatctccggtggagaaagaaggcgagtttcgatcggaatcgatatcatccacgacccgattgttctcttcctcgacgaacctacttctggtttagattccacaagtgctttcatggtggttaaagtattgaagagaatcgcagagagtggcagtatcattataatgtcaatacatcagccaagtcacagagttctcagtttacttgatcgtcttatcttcttgtcacgtggacacaccgtctttagtggttctccggcgagtctaccgagctttttcgccgggttcggtaatccgataccggaaaacgagaatcaaacggagtttgcactcgatctaatcagagaactcgaaggatcagctggaggaacaagaggattagttgaattcaacaagaaatggcaagagatgaagaaacagagcaatcctcaaaccctaactccgccggcttctccaaacccaaatttaaccttgaaagaagcgatttccgccagcataagcagaggaaaactagtctccggtggcggcggtggttcctccgtcataaaccacggtggcggaaccttagccgtccctgcattcgcgaatccgttctggatcgaaatcaaaactctcaccagacgctcaatcctcaactcccgacgacaaccggagctactcggaatgcgattagccaccgtaatcgtcaccggattcatcttagccaccgtattctggcgattggataattcaccaaaaggagttcaagagcggttagggttcttcgcattcgcaatgtcaacaatgttctacacttgcgccgatgctcttcccgtgttcctccaggaacgttacatcttcatgagagaaacagcttacaacgcttaccggagatcctcctacgttctctctcacgccattgttaccttcccttcgctcatcttcctctctttagctttcgcagtgacgacgttttgggctgttgggcttgaaggaggcctaatgggctttttattctactgcttaatcatcttagcctctttctggtccggaagctccttcgtgactttcttatccggcgtcgttccacatgtgatgttaggctacacgatcgttgttgctattttagcttacttcttgcttttcagtggcttcttcatcaacagagatcgaatccctcagtattggatttggtttcattatctttctctggttaagtatccatacgaggcggttcttcagaacgagttctcggatcctacagaatgttttgtgagaggtgttcagcttttcgacaactcgcctttgggagaattgacgtatgggatgaagctgaggcttttggattctgtgagccggtcgataggtatgaggatatcgagctctacgtgtttaacgacgggtgctgatgttctgaagcagcaaggagtgacacagcttagtaaatggaactgcttgcttatcacggtaggtttcggattcctatttaggattttgttttacttgtgtttgttgcttgggagcaaaaacaagaggaggtgaaactgaaactactgatgatacctaaaaccaaaaacatatattgtaattctttttcattacttgtaattcgtagattgattgtgtatttgaattgtattctttttaacatttgtattacttttgccatcaataaaaaaaatatcattctttaggaaattggaaatacaaaaagcacctatgaatcgcttttactcagaaaattaatgcaacatttcaaatagaggcattgagattgtggaagaaaaatgaggagacacagacactgttgctagaggcaagtaactctcaaagccatttcactttgtaaggtatcaaaaagtcaaaattggaaggctatctacaaaatcaattaaaaacaaaccgatttatctgaaatttaaaaccgaaacaaaccggaccgaatcagcatcagaatatcgtctggtcctggccgctctgctctagccgcagtcgaaacacgagtccataatacgagcggtggttgctcacgcgccatccagtttggctggagatg

SEQ ID NO: 28741 - DNA, 317 bp, Unknown
  misc_feature (1)..( 317): 2750-1469P.txt file - cDNA_ID_2998483; gDNA_ID_2926252; Annot_ID_143055
tatctcaaataaccaaaatatataaaatcaataatatgaaagataacgatagaaaatatttgaaattatcctaactatgtgctctgcatatttaagggctcaaagcttcaaccaccaattgtcaatgcatctcccaatcaaaatataaaaaaagagacgaaaacgaaagtacacgtgcttacacatccaacactcgtaatcgtaactattgctacctacccttctctcttctacttaaccccaaaggccccaaaaacacaatcaagaaaagctctgtaacattattatcaatcgaaattccaaccgactcaacaatg

SEQ ID NO: 28742 - DNA, 3000 bp, Unknown
  misc_feature (1)..( 3000): 2750-1469P.txt file - cDNA_ID_2998486; gDNA_ID_2926253; Annot_ID_143056
ttgtctctaattccggtttggctgacattgtatagtcttttatctctcatgtcagatttcctcgaacatatcttttggattaccttggtgtttcatttgtgacttcaatattttttcaaagctttccatgtatgtttgaaacttgaagcttcgatcatttatttttttctgtgtttcattcatttgcctatttgactcttagaaaatcacagaccagtgagtgtaacaaagtcgcagtgtacaggctctctttcctaatccaaaacgacatgtagtttttatgactagaactgaacgacaagatgtttttcttttgttatcccaattcttaaaactaaaacggctgcgtttagtaacccgcgaaacccactaaactctttagttctctctctcgttcccttgcccctctccctctctcgtcctcggatttttctcgtgcttcactgataatccagcttgacgatgtcgttgacggagctagacgacggactggttcgcaggatggccatgggcgcagtcttctctgattttgtacgaacgaatttttctctttttgtaatctcatttgatttcggattaaactttggtggaatccagcttccgagattaatccgttcaatttctcggtgttggttttacacagggagggaagatacattcggtgggtttccataggactgatgatctattggtcacatccagcgaagatgattcacttcgcctcttcgatatcgccaacgctaagtcagttcttccttcctgtttttaggttttatacttatctggtcaagttctagagaaactaggttacttaaggaatcaagaagaagctttttgattaaccgattagttgaaattcttgtggagcaaaaagaagactgaaatattcaatttgtatggatgtttgttagacagctgaagattacataccataagaaacatggcaccgatcgtgtatgctttacccatcatcctagctctctaatttgctcttctcgatacaatttggagtccactggtggtgagtcctccttttctcttgcttgagattggataatcaaagcggtggtggattattacttacttgtatacttgtttttgtgtaccagaatccttgagatatctctcaatgtatgataatcggatcctacgctactttaaagggcataaagacaggtctgcttataacctctggaattgtgaatttggattttactagtatgtacattgatgatggaaaatgttcttctgtttcagggttgtatcactttgtatgtctcctataaatgatagcttcatgtctggttctctcgaccgaagtgttagactctgggatcttcgtgtaaatgcctgccaggttggtttctatagttttacactctgagaaggctagatggaataagtcttaatatgctagagttttaatgagaaaagtgcctttttctttttgttagcaaaaacctcgtgatatatcaccttgaaagttaaacttgatgaagatgctggaaccacgaaacattgagaatatttaggctctttaccttaatactctctctgtgaatttatatggtttcatgatctatgcttacccttttagtcaatagggaattctacatctacgtggtagacctgcagttgcgtatgaccaacaaggccttgtgtttgcaattgcaatggaaggaggtgctgttaaattatttgattccaggtgttatgacaaggttagcttcttacaatgattcacacagccttacgcatgactgctcttgttagttctaacttctaaacccaattgatctcttatgtagggtccctttgacacatttctggtgggtggggatactgctgaggttaacgatataaaattcagcaacgatgggaaatccatgctcctaacgactacaaataacaatatctacgttcttgatgcatatcgtggagagaaggtaatcacgttctctatctttcacctgaagaagacagaacgttaggtttcaagttggtaaaagacggtatgttattttgcagaaatgtggttttagtttggagccttcacagggtacacccatagaggccaccttcacaccagatggcaagtatgttctgtcaggtaatacgcgttcctagatgatcttttatcatgactcatctacacaatattcaaatttaatcagcttagttttctttttcggatacaggttcaggtgatggaaccttacatgcgtggaacatcgagaacccatctgaggtaaagtgcagaataatcaacaccactaggacactgattcacttaaaagtgatgaataatttataaagttgtagatactatttttgcgttatgctttcacagtatttaaattttagtggggattttgtgtaaaaagcaggtggcgaggtgggagaacaacataggagtagtgtcgtgtctgaaatgggcaccacgtagagccatgttcgttgctgcttctacggttctcacattctggatcccaaacgacggtgaatcaccagcccccgccgatcctcctaccgatcaacaacagtgacgacatatatgtttccattatgcacttgtgtatcgttttttaatgttgacaattagaaaaatttggaagcagtagtatgttaatcaaatttagagtttatgaatttgagtctagatggttacaatatgttttctttaatgactatttactcttattttacgtaaaaaagatatggatgaatacatacatcaatgttcacgtaaactggaaaagatttcacgaaccatgatcctaataaaaaacccagaagaacaaacaacaatgagcatattgggccttaaaagcccatggtataataaacctgagaagaagtcaaataggtcataagaagcccattatatcgtcctcttgtaccccgacttttaacaaatcgttttggctaaaaccctaattctctgtctctctttttcctctccgcgtctctcgttccttctctggtggcgttttcaccatg

SEQ ID NO: 28743 - DNA, 3000 bp, Unknown
  misc_feature (1)..( 3000): 2750-1469P.txt file - cDNA_ID_2998490; gDNA_ID_2926253; Annot_ID_143057
taaaatcctgctggttcttcttttgtccctccatcgagttgtgtttgagatttcatcgttgcagaaagtaaatagttatgggccaatttaagttagtaggcccaactggcttcagcaattagttgaaatgctgacttagaaaaagcaacaagaccgatgaaaaatgatgacattatttcatcaggaagttagaaaatcatataaaatcgaaatcaagggagactaaaaaaattatataatgcaatctttcgatctaataaaatcggccctgttctcggataagcagataatggatctcatgaacgacaacagcaacaattcacaagacggcgatcatcagaactaccgtgtcggcgataatggattggaatcgaagaaggaagctatcttccctagctatgatttccaacctatgcgccctaatgcctccgccggattgtctcaccacgctttagatctcgccggatctgttaattccacggctgctagggtttgggatgcgtctgatcctaaaccggtttcagcttcttccgcaagagtaatatttctaagttctcctatatctcccggtctttgtgatttgcgatcaatctagcttcgtttgttggcttcactagttaatcacgattttacgttatttggcttattagaatcggttcttaaggtttctttaggtttagaagatatgtactagttctggttcttgttcccaagctcggctctgtgttattcttcactgtgcttacatttatcatcgtgtgaagttgaaagcagagactttgtgtaacaacgatcatttgcttatctgttttctacattataatgtttgcttaaaccttgcttgatgcttgcatggttaggattatgacaattatcacacttagccttacttgttgcatttgttcgttctttcagagttatggctctatggactctctcgaaccttcaaagttgtttgctgagaaggatcgaaattcccccgagtcagcgattatatctgcgatcgatcggacaatgaaggcccatgctgataaattgttacatgttatggaaggtgtcagtgcacgtctaacgcagctggagaccagaacccgagatctcgagaatttggttgatgatgtgaaagtttctgttgggaacagtcatggaaaaactgatggtaaattgagacagcttgaaaacatcatgttagaggtactctactcttttgggatacctaatggagattaatttgaaattagaaataatcacatgaatctgagatactagacaaacgttcttctctgccttttggttttggatgccatttcttgactggcctgggaattcttgatctgttaacgtcaaacaagtttctggtttcatatttttcatgtttcaatgcatctgagctttcatacttttcgctatatcatctatcaagatcctagattcctcagttccttctttgtatgattgcattcaggtgcaaaacggtgtacagttgttgaaggacaaacaagaaatagttgaggcgcagcttcaactttcaaagctccagttatcaaaggtaaaccagcagccggagacacactctacacatgttgaacccactgctcagccgcctgcatctctgcctcagccaccagcttctgctgcagctcccccgtctcttactcagcagggcctcccaccacaacaatttatccaaccgcctgcctcacagcacggtctctcaccaccttcattacaactgcctcagcttcctaaccagttctctccccaacaagagccttatttccctccgtctggtcagtcccagccacctccaacaatccagcctccttatcaacctcctccaccaacccagtcattgcatcaacccccttaccagccacctcctcaacagccacaatacccgcaacagccgcctcctcagctccaacacccgtcaggctacaacccggaggaaccaccttaccctcagcaatcttacccgccaaaccctcctcgtcaaccaccttctcatccacctccaggttctgccccatctcaacagtactacaacgctcctccaacgccaccatcaatgtatgatggaccaggcggcagatccaattcaggttttccttccggatattctcctgaatcatacccgtataccgggccaccttcacagtatggaaacaccccatctgtgaaacccacacatcagagtggaagtggatctggtgcctacccacagctcccaatggcacgcccactaccacaaggtttaccaatggcatcagccatcagcagcggtggaagtggtggtggctcagattccccaagatcaggaaacagagccccagtcgatgatgtcattgacaaagtggttagcatggggttcccaagggaccaagtgagaggaacagtgagaacattgacagagaacggtcaagctgttgacctcaatgttgttttagataagctgatgaatggagatagaggagctatgatgcagcagcagcagcagcaaccgccaagaggttggtttggtggtcgttagctgtgttgtctctaattccggtttggctgacattgtatagtcttttatctctcatgtcagatttcctcgaacatatcttttggattaccttggtgtttcatttgtgacttcaatattttttcaaagctttccatgtatgtttgaaacttgaagcttcgatcatttatttttttctgtgtttcattcatttgcctatttgactcttagaaaatcacagaccagtgagtgtaacaaagtcgcagtgtacaggctctctttcctaatccaaaacgacatgtagtttttatgactagaactgaacgacaagatgtttttcttttgttatcccaattcttaaaactaaaacggctgcgtttagtaacccgcgaaacccactaaactctttagttctctctctcgttcccttgcccctctccctctctcgtcctcggatttttctcgtgcttcactgataatccagcttgacgatg

SEQ ID NO: 28744 - DNA, 3000 bp, Unknown; identical to SEQ ID NO: 28743
  misc_feature (1)..( 3000): 2750-1469P.txt file - cDNA_ID_2998490; gDNA_ID_2926253; Annot_ID_204434

SEQ ID NO: 28745 - DNA, 3000 bp, Unknown
  misc_feature (1)..( 3000): 2750-1469P.txt file - cDNA_ID_2998494; gDNA_ID_2926253; Annot_ID_143059
ctccaccttctccatccctcctctggtccccgtcatctcctccgacctcaacctctctgcctccaccgtatccgccgccggaatcgcttccttcgctggctccatcttctctcgcctcgctatgggaccactctgtgatctcatcggaccacgtacttcctcagcgattctctcttttctcaccgctcctgtaatcctctccgcctcactcgtctcctctccgacgtccttcatcctcgtccgtttcttcgtcggcttctcgctcgctaatttcgtagccaatcaatactggatgtcctccatgttctccggtaacgtcattggtctcgctaacggtgtctcagccggttgggctaacgtcggcgccggtatctctcagctccttatgcctctcatatactccaccatagccgaattccttccacgcgccgtcgcctggcgcgtgtccttcgtatttcccgccatttttcaggttacaacggccgtcctcgttctcctctacggccaagatactccccacggtaacagaaaaaactcgaaccagaacaaactcacaattcctgaagaagaagaagtactagtagttgaagaagacgaacgttccagtttcgtcgagatcctaatcggcggacttggaaattacagagcgtggatcttagcgctgctctacggatactcgtacggcgtcgagctaacgacggacaacgtgatcgccggatatttctacgagagatttggagtgaatctggaggcggcggggacgatcgcggcgagtttcgggatatcgaacattgcgtcgcgaccggcgggagggatgatatcggatgcgctggggaagagattcggtatgagagggaggctgtgggggctatggatcgtgcaatcggtggctgggttgttgtgcgtgttactcggacgagtcaactcgctctggggatcaatcctcgtcatgtgggtcttctctgttttcgttcaagctgcttctggccttgtatttggcgtggtccctttcgtctccacgcggttagtttaaagtctaccaatccggtttttgctaataatttcggtttggttttaatttggttttgtttataatgacagatcgttaggagtggtggcgggaattacgggaagcggcggtacggttggtgcggtggtgacgcagtttctgttgttttccggtgatgatgttcgaaaacagagaagcatttcacttatgggtttgatgacttttgtgtttgctctttctgttacatcaatttactttccacaatggggtggaatgtgttgtgggccttcgtcatcttccgaagaagaagatatttctcggggactccttgtagaagacgaagatgaagaaggtaaagtggttagtggtagtctacgtcccgtttgttgatgtcgcatttgaactgctggcccatttggccaaagcaaaagcaatagcaaaacattagtatactactaataaggacgaatttgctgttatcaagttaaagagtctatcaatttttttaaatatatatatgttcttgtttgtgttgaaattctccttccataaacaacactagagctgacaacattgcaaaacaagacataattagtttgtatcctttttgtatctcttgtaacaatataggcaaagtgactctgacaaatcacaatcgtgttgatgagctcattgtgagtttctttcttcctctgtttcttttcttgttaaaaaagaacaaatagcaagaaaattaaagtagatccttcatcattcaaagcgtacgtaagattaccaagagtttctacgtttgtactacttgtgatttcatttgtaatactaaagataacgagtttacatagaaacttacaccatttggtaaatgaatagaagccacgggccacggcgttgataaaacatggacggtagagaaagagctcagcaggggtgacctgagaacacatgaaacgagagctgtaacaatgacgtagcgtcgttatagccgttgattgctcgtgtgttctcatatcaaccctgtcgagatccactaccttaacaatatttatctatcttctaaaccagtaataaaaggactgttacagtttgagtttcgatatccttcaaatctgctgagagctactatatatacacaacacaacaaatgatgaaaggattgtgtagtacacaatattaccacacaaattgtagtacacaacacaacacaacaaacgggccaacgatttgttgcattcatatacgttttctttagtacaataaaaaaaacctacagaattgtgtactgcgaaactgatttacaaaaaaatcaacattgtacttctctgacagtagtacaaaggcgagttttgtactagttggaacgtcaaagaggtactaggaagtgttccaaagatgccctcacgtgtttgtttattatttcacactactgtgatatttatttcacgaaccagttttctgtaaattttgaattctgttaaaaaaatagttaacgaaaagaataaaataataatttgctgggtaagaattggaccgggcttaaaatatcccagtgggaagtgttcgctttaagaaaaaatcagagagagaggcccacttcaccagctctactcattgattttacacactcaccagcacctctatttctttctcactctccaagtctcctctgtgaaagctgaaagctcatcttcttccacgtgatttgtcttcccgatcaccaaacctttccggtaattactctcccttgcgttcgacgccatcttccttggagttctcttcaatcaaccggtaaatcttccactgattttgaagaagattcttccatgttcgatctggttcgtctccagagatcgagagttgaattgcctcgaaacagctctagtttcaccagagacgcgcgaccgatagaaataaagagactcgaagctgcgtgtaccggagacgaatggcgggaaaattgacttgagcgcgattttctgtgtggatccaaaatg

SEQ ID NO: 28746 - DNA, 3000 bp, Unknown
  misc_feature (1)..( 3000): 2750-1469P.txt file - cDNA_ID_2998498; gDNA_ID_2926253; Annot_ID_143061
gttgcgggtgtatctgttggtcttatcaccgatgtagatccatcaagtggtgaaataaaggactaccgtattgtaaccgatattctcgtgagttctcttattctaatttgttgtctttatttttatatggttagttatgtgaataatcatgaaactgaaatgtgtggcagtgcagtagttaatttaactgttgttgtctaaaccatgagtagagttaagttgctaaaatggattttatagaactgcatacaatgacttctcagggtttggaagatcatcttggagatatggatttcaagattgctggcacacgagatggtgtgacagcaattcagctggatataaagccagctggaataccgttggatatagtttgtgaatccttagaaaatgcacgtgaagcccgtcttcagattcttgaccacatggagagaaacataaattccccacgaggccaggatggggcttactctcctcggctaggtttttttcccacttgtcttttcgttaaccttagctaatagaatttcccctgctcaaactccaaaattatgtccgtcttgcagcaacgctcaagtactccaatgactcacttcgtaccttgatcggacctatgggtgtactcaaaagaaagattgaagtggaaacaggtgatttcttgacttcaactttaattgttaacagcttagttcttgtgacctttaaagactaaggaattgaataactcgtttgaattgaaaaatttaagtgcttttaagaaagtagtttcaagatgaaattcataaacttatgaataatatccacttgctttcttatagtttgctttgaagatctgataaataagtttttttgtttaggtgcaagattgtctattgataatggaacattaactattgttgccaagaatcaggatgtgatggaaaaggcccaagaacaagtatctttcagtcaattcagcttttaattgatcaatgattttccatgaattctgattttatgcatgtcctcaggttgacttcatcattggtcgtgaactagttgttggtggtgtgtacaaaggcacagtgtcatctataaaagagtatggtgcatttgttgagttccctggtggtcagcaaggtctactacatatgtctgagctatcccatgaaccagtaagctttcttagttacaaactgtgtccgtatgtttccccctgagtattgttttctcatgtaaacctaaatgttttcatctgccaaatcttagaacgacaatccgagagctttattttctttgccattactctagttgagatttggtttatacttaccttgtctttatgcaggtctccaaggtttcagatgtattagatattggccagtgcatcactacgatgtgcattgaaaccgatgtccgtggtaacattaaattatcccgcaaagcactgttgcccaaacccaaacgcaaacccgcatctgatgctggaaaagatccggtgatgaaagagtcgtcaacagtctacatagaaaattctagtgttggagagattgttgcaagcatgcccagtatcgtaacgccacttcagaaatctagattatcagttcctgcagttgtcatccgtactgctgtggagtgtaatgaggcagagaaatcttcccctgtgaacgacaacgacaaacccagacgcgctgctacatcaaagccagaccggaaacccaaatccacagcctctaaactgattgcgacacagaaggaagaggaggcactcgaatccattgctccagaagaaacttcagctgaatgtggtgagatactgaagcaggacgggaagctaaaatccgtttctcccaaaaacaatagcactgcttctaacctagtatcattttcaaaagctaagaaatcaactatgaaggagaatctatcagagaacaaggctgaagagagtgcatcggttagtacccgaaaactgaaaataggaacggagatgacagccacggtcgaccatgttcgagcccttggattggttcttgatttaggtggtgaaatccgcggtatgtacatattccaggtatgtttcagtaaattctcctttgacttgttctcccattttcttgagttaacttttgaggcgatatacttaattcttgctttgtattgatattgtgtactatgaatgagtacagggagataaagataagttcaaaaaaggagacacattgcgagtgaaatgtacaagttttaacaccaaaggagtccctgtgatggctttggttgacgaagagggagaagaatagtggtaaactctctttcctttctacaaggttttttcaacccaagggatcatgtggagtcgatcatatggatcatacgagagttttgcttgaaatgtttttatcatacggatcgaatcaagagatgctcgttagctgcttttggtgagcaaatcttggtagatggatagattcattggcgtcacaacttgaggaaagctaatgaactcggttaggtaactagtcttttactttggccttgtgatgtgccattttgtttctcttttattgggggggttttgtggaaccgaaagtggattgtattgtttagtgtcttagtaactgacgtctgaaaggtgcgtaacgcaagtttcatcatttttgtccaatttttacaaaaatacaaaagcaccaaaaacccaagtcggcagctaaagatagaaactacgcatcccaatggcattcttgatagatattatttgtccgaatatattttcttctaaattacaaattcatttcaacaattgacgtcaaaaattaatttaagccaagagacgaggaactaaaattgaatttcacattttgattgagcatttgggtttgaattaagattactcgaaagttgccaaaagtttgcctctgagtcattttattgttcatgaaagatttaaattcaaagataatgttcattgattgggtggtcgtgtaagtaagagtcgtcagcgagttttcttctccgagagtaatg

SEQ ID NO: 28747 - DNA, 3000 bp, Unknown
  misc_feature (1)..( 3000): 2750-1469P.txt file - cDNA_ID_2998502; gDNA_ID_2926253; Annot_ID_143063
tccttgtttttccttggcttcggcttgtaataactcgtctgagaatagttccggcgtagaattcaccgtcctccacgcgatatatcctgcgagtaccgccgagaagaacactaatacaaatctcaagggacacataatttcttgatggataaagggaaaattataagaagaggaaaaaagaatttggattttgatctcaggctttcgaagaatggatctctagggtttgtgaatagacaattgtaagagaaagaaaattaaacagacgttttcgatatttatagagtgcattacatgtctccttctcccatcgagaaaaggaaacgcgtttctatttatatattacttgtagaacaatttatctctagaaactactatttatcatatttcaaaattttggattttggttttgtcattaccaaatttcgaattttgtattctagaaacaaattcacagcaattatttttttaacaaaaagaaagcgtaataagacaaatcatgaaaatatctaatacatgaatatcataatgtagttggagaatttggactaagctagacattggagtcttgcaaacgttaagtaaccggtgtgacctcttgcttcactacaaggccgagccatgacgactgaagaagcattagaagagttgtcctgtgaaacagtgtcgttttcgtttgaacggtgctttctcttgcaaggcctcattccttcattgtcctcctcgtggctctcaccaaccatgctactggtatccattttcacttccttcacttcatatgttctgagaagcacctcaaacgttcttatctctgcaaaaaacaaactcatcatgagcaaaaaccggtataagaaagaatgaaactctcaaggaaataaggacttatatgcctatgacagttggttttgattcccctgactttccaaggccaaagaatgtcaaactatttctctaaagatacttatctacttaaagcaatcctttcgacttattaatccaaagatgtgtgaccatagaaagtcgatgatacatattggaaaaaattgtagactaaagaacagaacttcagtctatacaacatgattttagtactagccactaggatttgaaaatcgaggagaggttcagtcccaaattcactactttagtactttgatttttaggatccttccaaggcaagagcattcggataatgtgtagatctagagctcttttagtttgagttggagaagaaagtagaaagagatgttgtaaatcagaataaacttaccaatgaaatctgatctgaggacttcacaagtccgttgtacttgctcgatgcaaggtgagaaagagcatagaactccatcctgctttaacatctttgctgcagaaggaaccgcaagccaaggctgtggaaggtctagaaacacagaatcagccaaacctgacagtttctcaggaaaaccctctccttgaatgtctctaacctctacggttactaaactacttatgcccgtcttctcaaaatcttccctgttgcaaagtaaagtaaaggatgaataaatactatagcttcaaaagaaaagcacaacgagatagctaaagaaaacgaaagtttctaccttgcagagacagctcgctgctcatggaaatcaaatgaataaacgtgtccagttggagccacagctcgagcaagtgaggtcgaaagcgaaccactacctgtgcctgactcaagaacaacacagccaggcacgacttctagatacataaccacaaagctaatatccgcaatgtaaagaatttgagtcctgtggcttaaaaccaatgtccatagttcaggagtaggagccaacaggtacacaaatttacccttgttgctgaatactttcgtccctaatggtttcccaatccaatccgagtgcttatacacaccaaaacggttctgaagcacaccgtctttacttactttaactggtttcatcacatcatgtctttcgtaaacaataactaagtccccatcttcaatacaccttttgaatgaaaaggctttctttgactcagttggtaacatcttgagattatgaaatcacttgtagattgagttccagcttctgctctgcaattccaagtctcattgttaattactaaacaacacactttttaactcagaaaacaatgaattctcacaaatcacgatatatattcccaatctagctatcaatccaaagctacgcattctacgcaatattgcacagccaatcaaacacattgagattcaaaatcattgtaatgaattagcttagatgcacagaagaaaaacaatttaaagtttgattaagttaaaatttaagaaaaaagctagaaaaatcccattcacggatccaaaagtcctaacttcaacgaagagacacaattttttaatacaagcgggtaaaaaactggaaccaaacacaattaccagcttctataagataaaaagctgaaagaaacagtttaacaatagcgaaaaacgacagaaatactcacagaggaataatcacgaagaaagctaagaacttgagctgataatggagtttgggtaataatgttttgtgagaaggaagaacaataaatctgaccagacaaagaaataaaacctctaagtagggttttcgctttccttttttcaaatcaaatcggacattgagaccaaccggaccatattacagatttggtaccttcgaaccggcaaatccggtttgggtttatatagacagaaaaatttactgggccttatgttgggcctactgaaataatctatacggctctcttttccttcttgtttaccttgccttttcgccggaatcgtcgattattagagagctcagagcacactttagcaataaacttgccgaccgaaagctgcagattcactgattcagtgatcgaagttgagagtttgggttgaggtcggagtctcggatgctgaataagctcacgcacggcgttttcacgtaccgtgccagcctcaccgccatg

SEQ ID NO: 28748 - DNA, 3003 bp, Unknown
  misc_feature (1)..( 3003): 2750-1469P.txt file - cDNA_ID_2998506; gDNA_ID_2926253; Annot_ID_143064
tatattttttaatttataccttgggcaagaagatcgctttgaacatcaccgtcgtagtttttgcaagcccagacatagccaccttcacttttgactgcgtaagccaccatgtcatcaatcaaccggtgctcgtacctaaaccaacagtattattcacatattacctttaatgaatatgtaaagaaaaaggacgcagaacacaattttttaagaaaaaggaccagattgagtgctcttcaaacttttgcttccaattcgcctcataaacttcttgaaatatgtccttaaatctgtattgttccaccacatattaaagcagctcgcttgctgaaaagtgaaacccagacttcaaatcaccaagaagataaaaacaaacctgccatcatatttcttgagaattgtgttcttggtgctcaagtataatggccatttcttagttaatgccatcgccatagatgactcagcaaaagctctaattgactggcatgtcacaaaaccagcatggttgtcagaaaccaaaaccatgccaaaactaaagccagttactaaaagagacagacctcatctacgttgtacatagcaagtgcgacacctgggcccttgaaatcatatacatctagctccacaggtgcgtttccatcttctgggactaattagacaagagatgtatccacttagaatctgaactatatgattgaagaatcctcattgtctaatgaatatagtttggtatgatcttaccaaaaaccattttcaactttcctggccctttaattactgtatcagtggcacgatactggtcaccaaaggcatgtctaccaatgcatataggcttttcccaacctataaagacaaaagatttgagttctcatttggtatctcaaaacagatcctaacacagattcataacaaggcaaataaatttaccaggaacaagccgggggatattgctgcacataataggttcacggaatacggttcctagaaaatatagaacactgtgtaagaaatgtgtagatactagattgtaaaagaacctgctaacaggataaaataaaaagtcgcaagcaatttaaccaagatattcctattcagcaaacatgcattgttttttgacaatacagagacaaaccatctagaatgtttctgatcgtcccattaggactcctccacattgatttcagtccaaactccttcactctaccctcatctgccaaaaataacatacagaagatgtaaaaatgcttcctctgatcggaacaagcagcatatgtgttgcgatttgcgaaggacatcacataccaggagttatagtggcacatttgatagcaacattgtacctgcaaacataaaagttttaagcgcgaaatcagcttatttcacatagaaattaaaatgttttctgttactaaaagaatctaaaccatagaaaatgcaaagaatcaatagcacttacttaagagctgcttctgcactttcaactgtaaccttgtcatcagtagcatcgcgattcagaatccccaagtcgaagtacttaatgtccaaatccagataaggaagaataagctgcaaagacaagaaatcagacatgtgagctctgtcaaaaaaaaatgaaccaactgttgcagacttggtgataaattacatccttactttctcctttatcatactccatatcaccctcgtcatttcatcgcctgaatttccacaaaatataaacaaattagaaacattctcaaagataccaaattcagtaagaacataaacaaatgacttataccaatccaaccaattatctggaaactacgatcaaatgtaagtaaggaacactgattgcgcaaagaatctcaccatccatttcaacgataggattctgaacctgaattctatcagaaccgcctgaagaagcaaaacatcgaacagctgatgcgcgatgaaactgaacgggaaaagtcacgcgattcctcgaagcgccactagagaatataccggaactaagaaatctcgaagaaacgaacgaagacgataaaccagcagaggttgaagaagataacatggcggtgaggctggcacggtacgtgaaaacgccgtgcgtgagcttattcagcatccgagactccgacctcaacccaaactctcaacttcgatcactgaatcagtgaatctgcagctttcggtcggcaagtttattgctaaagtgtgctctgagctctctaataatcgacgattccggcgaaaaggcaaggtaaacaagaaggaaaagagagccgtatagattatttcagtaggcccaacataaggcccagtaaatttttctgtctatataaacccaaaccggatttgccggttcgaaggtaccaaatctgtaatatggtccggttggtctcaatgtccgatttgatttgaaaaaaggaaagcgaaaaccctacttagaggttttatttctttgtctggtcagatttattgttcttccttctcacaaaacattattacccaaactccattatcagctcaagttcttagctttcttcgtgattattcctctgtgagtatttctgtcgtttttcgctattgttaaactgtttctttcagctttttatcttatagaagctggtaattgtgtttggttccagttttttacccgcttgtattaaaaaattgtgtctcttcgttgaagttaggacttttggatccgtgaatgggatttttctagcttttttcttaaattttaacttaatcaaactttaaattgtttttcttctgtgcatctaagctaattcattacaatgattttgaatctcaatgtgtttgattggctgtgcaatattgcgtagaatgcgtagctttggattgatagctagattgggaatatatatcgtgatttgtgagaattcattgttttctgagttaaaaagtgtgttgtttagtaattaacaatgagacttggaattgcagagcagaagctggaactcaatctacaagtgatttcataatctcaagatg

SEQ ID NO: 28749 - DNA, 3000 bp, Unknown
  misc_feature (1)..( 3000): 2750-1469P.txt file - cDNA_ID_2998510; gDNA_ID_2926253; Annot_ID_143066
taagcaaacacatcatcagtttttccttaacattgatctccatatattcttacgattgaaaaatctgttgttggttcttaagatattccataagcgtacacctccagaagctgtagaccttgtctcaagacttctccagtattctccaaacctcagatcaaccgctgtaagtcaatgaagtgattaccataataacattatgtttgatatatctggttggttgattcaaacttacttgttattgtagatggaggcgatagttcacccgttcttcgatgagctacgtgatcccaatacacgtcttcctaatggtcgtgccttgcctcctctcttcaactttaaacctcaaggtctgtctcctccaaatatgcttttgtttgtttcccaatgctccgttttaacaaagactaaaagtgtgtgcttcttgttaaatatgtagagctaaaaggagcaagtttagagttgttgtccaagcttatacctgaccacgcccgaaaacaatgttccttcctcgctctctaaatctcttcctctctctctatatatatgtgtgtgtgtgtgtatgtacacatgcatataatatgcttatcgtttctaagtaatggagatagcttctcaggattatcattagctttcatctttcatgtatctttgttgtttattgtcttatcacaacctttgtactttattacatacaatgattagtgtaatgtatgtgacggtctttgactcgccggtcgctacagttatgttggatactaaattataaaataaacttctcgctcgtcacgtgtcattgcatgcatccaaagctcatgcttcaaagcttagccaaacttatttttaaaaaagcctatgttctgtgtaaaagtgtcatttacgagagtttcttgtttaagtttaaccaatttcacttcctcaaacgaaatacggtaattggtaatatcctctaaacatgaattatcattgactataaaaattagtttcgcaaattgcctctaagcaccacaagtgtcacgtaacgtgtcatttattcatgtttattgatttagttaattaaaaacattgtagtttaattattgaagtagtacaaagaatagggactaaattgcaatactctgaatttgtttttttcttttttagaatcatccgactttttgtttcacggtttcctcctccagtaaactgacgacgatacaagctctctcaccaacggcgacagtatctttgccggcggcgggagcgcttctgcttaatctgtagctcaaactaaaaattctctgggtattactcatggtgatttggaataacgatgatgatgattttttggagattgataactttcaatcttctccacggtcatctccaatacatgcaatgcagtgtagggtcgaaaatctagctggtgtagccgtggtaagtgatccaatccaacagtcataagtttatgcctaagcagaatcattgcttatgtgaatttttgttttgtttcagacaactagttctttgagctctcctactgagacaactgatttagttcagatgggcttctcagacgaggtttttgctacattgtttgacatgggatttcctgttgagatgatttctagagcgatcaaggaaactggtgaggcttttttctcttgtttgtattcctttctggatatatatgatccgtaacttgataccaataattatacaggaccaaatgtagaaacttcggttataattgatactatctccaaatactcagtgagtttctaatactttgatctcttgggttgcttgtcatttacatgtgcttctgtcatcacagtattcatatcctctcctttgtttatttgtgaagagcgactgtgaagctggttcttccaagtccaaggctattgatcatttccttgctatgggatttgatgaagaaaaagttgtcaaagccattcaagaacatggtacttacagatttctctcctccttaagtaagaagtaacactttatcactttgctgatatttgctttataaatcgcaggagaagacaatatggaagcaattgcaaatgcattgctctcttgtccagtaagcgatgttacgaaaatatactgtctcttgacattaaaaaaatagtacttaaagttcgttgatggtttgtaggaggctaagaaactgccagcagcagtagaggaagaagatggcattgactggtcatcaagtgatgatgataccaattacaccgatatgttaaactcagatgatgaggtataactctttcatgttggtgataacatatttaagcatcccaggtttgaattgtaaatgtatctcactgctattttgtatatgtatctaattttatgcgttcttaatctattttaaatcatgacagaaagatccaaactcaaatgaaaatggcagcaaaatacggtctttggtgaagatgggtttctcagagcttgaagcttctttagctgtcgagagatgtggtaactttattttaaacgattgccattgtcattaaattttagttccgttttgttcaggtttcttctagacaacgtcgtataaattgcttggtttagcctctgatttagtggtgtaggccttagatgtgtttgctgagcattttgattgtatttcactaatcgaaagttgtcattagttctgtcttagcttctggttctgtgatgtacgccttagatatgtttgtagagaatgtgatcgtatttcacaaaatgataaaagttgtcagtacttgataaaattgtatgttcactagttcctttttattcaggtttcttctagaggaagtggcataagccaaattgcttagttttagtgtaatgtgatagtcaaattgtggctttagcctctggttctgtgatttaggcttgaaatgtgtttgctgagcattgtgattgtatttcactaaatgatacagttgtcagatgttaatatatatctcttacttactctaagtatgttgctgccttatccagactcatatg

SEQ ID NO: 28750 - DNA, 3000 bp, Unknown
  misc_feature (1)..( 3000): 2750-1469P.txt file - cDNA_ID_2998518; gDNA_ID_2926253; Annot_ID_143070
aatcaaacgcactgctgaagaatctccacaagatccagctgatgactaaatttcaaaagcaacgcaaaaccatgcggtgatttcatgtctgctgaatcccgcaagcttttgagagacaataaatgggtgtgttgcagtacagaagaagaaaaacgttacaaaaaactcttttgattgatctagtaagtgcatctgtaattctagatgttattcgatgatactacacacacaaagcatcatatatattcgtgtttagtctccattctcgaaacataaaaacaaaaagttcctttatttgttgtgtaatcttagactcttcaatgtctttcatatatggctatccaatgtctggtctgctgtatctgattgcaaatgcttcttgggatgttctcgtttatcatcatggtcctagtattaactgagtactaaggaagtatcaaagaggtggagcaaatgaagcgtttcttggaggaattgtcatgtcttgagctcgttaacgttggcgcatccccaaaagaccacaaggaaaagctacgactcaccacggattttctaatgctacctaaagcttcttccaaattcgagatcaagttgagtttcttgaaaattaccatattggctctcatatttgtccaagtttgttggaacatgaatctacttactcttctgttggaccatttgagccctcatgcatagtgtatttgatttggttttattagggttctataaactgagagaatttgtaaaaaccttctatataaggaggaaaaggtatcatatctactctttagctaggaagaacatttccataagtttagaagaaacaaacaaaaaggtaaaagtaaaaactatcacaaatccatttttgacgttttaacacacaatgacacaagcatcaacggatggatgctataaaccgttgtaaaatcagacataatacttctttcttctccacaatcactaatggtctccaaggacaaaaagtgttcagcttcatcatgcctactcagtactcaatcaaaatgaaggtttgatcagtattcatgaataatgattttttcctctaaatgtctccaaaactgtatatatagatataatctaaaacccctaaggatgttatttaagtgcatcaatactttcaaaagagtgttcctttcaaatttctacttagttttaaaatgggatatttaagttatttaccttggtagcgatgttgttggagagccaatcaaggccttcatagagaccttctccagatgtggcacaagtgctttgaatgtacctgttaaaagaaaaaaacataagatacatgttatcacaatgtgatcaatctaaccacatttttttttatttttcaatctaaccacattaattaatgaaaaactttgtagaaagaaaataactttaccaatggcgttggcgaagagagtgaagaccaagcttatcagttatttctgcagcattcattgcgttgggaagatcttgtttgtttgcaaacacaagaaggacagcatccctcagttcatcctacaaacatggtataaatcaaattataggaagttgtttcagtctaactgtgtaacaagagaaaactagaaagaaggcaaacctcattcaacatgcgatgtaactcatccctcgcttccacaactcggtccctgtcgttgctatcaaccacgaatataagaccttgagtgttttggaaatagtgcctccacaagggacgaatctgtttatgtttttacggaagtgcattttaatgtcaaatatcagacaaaaaaagaagacgacaaacactcatagatactagacgtggagattaaaatttcaaattgagcttgcacgatatgaataaccaggttttatgaaagatcattactagtcacaccaaaaccagagcagagcataaagcatcacgaggacagtataccataaacatggcaagagttaaatatgtaccttgtcctgaccccccacatcccaaacagtgaagctgatgttcttgtattcaacagtctccacgttgaatcctggaaacgaaaccctccttaacattaaattttaagaaacaaaacttccatgcagaagaggattacataaaatccgtagcggaggattacacacaggtaagaaacacataaaatattaatctaagtgtacacatcgacagacactgtgatttaaggaatccttaaaccttaccgatggtcgggatggtagtgacgatttcgccaagcttcagcttatacaagatagtggtcttaccagcagcatcaagacctaccatcagaatcctcatttctttcttggcaaaaagccggctgaacaactttgtgaaattaagccccatttttttcctttagctagcacctacatccaaagcaaaccacaatactctaaagaaattctctgtataactgaagaccaacaaaagaaacacgaaacactaaatctttattgataaacacgatcacgttaacattccaaaaaaccttaacaacaaagttcgtatagattaaaaaaaatatagataatgagatccttgaacaaagccaagtgacgaataacacctttagaccatgaacaaaaagaagaagaacgtataaaccagataaatcaatcgatcaatcacttgatactcttaagaaagatggagatcaaagaccgagaaaatcaatataccagagattttgagaaacgatgatacagaacttgaatcgatgaatggtgtgagagtttgtttacctttcgaagaagctccaaagaaggacctgttgtagagcaagccgcgagtttcgaaagagaaaatgtctctcctcacaaaagctctaataatagaatattggttttaaaaatcgtccttataaaatataaatatttcggaattgcaccttaaacaaaagcagaattacaaaatggtctactcaatcttttacttactctccacacaaaattcagtttttccgcttcgtctgaaattactcttcctctctagccatg

SEQ ID NO: 28751 - DNA, 3000 bp, Unknown; identical to SEQ ID NO: 28750
  misc_feature (1)..( 3000): 2750-1469P.txt file - cDNA_ID_2998518; gDNA_ID_2926253; Annot_ID_204448

SEQ ID NO: 28752 - DNA, 3000 bp, Unknown
  misc_feature (1)..( 3000): 2750-1469P.txt file - cDNA_ID_2998526; gDNA_ID_2926253; Annot_ID_143074
gaaattattaagcctacctaagaagtccactaactgttgataaaaaggcccattgataaattccttttttcttcattattattttttgtcaacgaatttggagtttttactccaacagaaaaaaggattaaatatattagaaaccgaatattttgactttgctaagaaacaaaaatgaacatgtttcacatgtgactgaaaaaagacggacacagaccaattattgatgtatattatcaaaaatatggtattttcttgtaaaaccggacattttcgcagccgggccgaaaaccaatcaggtagtccggcaattaaaacccatccaccaatcagaagcttacacgtaagctcaattatttttacttccgaaacaagcccgttactttagtgacgcaccatcaactaaccatctcgatgtctgaaaatagggcaaagagtacggttgaggcccgtgcgtgtctactggtcattcaacacgtgcttctcctaattttcgcgttttccctctcagccgagccgtttttagccacatcaattatattatgttgctctcgtgaaaaaataacagcataccacaataccacatcattctacgatttcactattttcgtgaaataaaaataaaaatataatggataatgtcattttacaaatcttcagttaagtgaaatttttaatatgaaacgaatcgtagtattttttagctttaaagattctaaccgtttaccattccaaagtgttatactatcatcgtttaaaaccctaatctctttaatattctatccttatacgaattgtacattaaatctacatttctctagctataaacatatatttatttagttatgttgcgcagagaaaatatgtttggttaagtcatatttgtacatattgagttgaaattgatgtgacattgttcgtcaaacaagaacgaattaatggaataatgtttgaccatttctatctaaaatgtactgaattgtaacttcgtggtgagagcatatgctaagttggcccaaaagcagaattgcaaatttgaccactcttatctgcgtcttcattttttccactcgttaattatttgaccaaaaatgggcttaagaagctgaggcttacgatactcaattaatatttatccctgaatattaaatatttatactatgtgattagtgtatactagtaaaaataaagcatcttaagatgtttaattcaattccctgtacggatcatattaaggataatctttagaatttctcaaatggtcatatatattcattactattctcaatggtggtaggtttacttaagatgtcatcaaataacaattaatgtccttataataatcgtggaatagctttaatgatttcctgagtattagattttgcctttttccttttggccttacgagaccttctaagcaagagtaatagattagactttttcaattaagagaaatagtaacccataaagcaataagagttggtgacaatttgttgcaccattaattcactttcgtttaaaaacaagagttacactgttgaaaacatgagaatttggtacgatttgacatttttggaagtttataattagtgttttcgatttttttgtctaattcgtagtatgatagttaaatttatgtatagtagatttttttaacaatataagtacaattatgtatccattaaataatatattgtatatttgtatgcgtagacactttcggtaattgctaatatgcatctttgttatttgtagtcagacaatattcaaatgtgtggatggtcaaacacctataatataacaaaaaatatattacacattccatagttatatgtaagtagctcaacatagaaaatgaaaataaaatatgttgagaagtatttattttttttttatattaaaacgtaaaaataaagttattaaaagctgaggcggagaacaaaaatatgaaaatggaatgggaggaaaaacaatactggttacgtgtaaataattaatggcggagaacaataccatttattctctatattccgtctagtccacccacgtaacactctatcaaaataaaagtaaaaaatcaatactaaataaaaagtttagacgttaatataatacaagtaacagtttacccaaatggtaatattttgaacaatttttattgtatttagattacgaacatttagttaagtcgttgtcctcttaattaatcaagttacttagccgtcgtattattaggggtcaactagtttgaccttatttaaaattaaaccaaaaaaaaaaaaactagtttgaccgtaatgaccggtttggaccaaatccacgtatattcaaaataaccagtcatgtaacacggcagctctatttttatttacgcaactctcactaaattagtttattttaaattgtaatttgtaacctatctgacttcataatataagaagaagaaaaaaccctgtataactttgtaattacttgatttttttaaacaaattctattacatttacatactccaacaataataaaaattaagagactaataacataatttagttcttgataaactttgatatttacttagtcacttcatatacattaccataggtgatctgaaagatatcaggtttttggaacaaataaaaacgtatttaactatttatagtcttttttataggtaaaataataaatatacaccgtagatgggatcgtattcgtataaagaaaggaagccaagctgagccgataaagctgaattgtattacacttgtcttatttttttcttcaaaaaaatgagagactctttagcattctcgtgtgatgtgtaacggcctctgtttctttctctctataaatatcttcttcctcatttctcaatcctctgtgtatctctttctaccttctctgaacctatagagccaacgaaaccagaggacagtgaacaaagaattgtataattcgatctcaactcgttcctttgttgattctttactccgactattatg

SEQ ID NO: 28753 - DNA, 3000 bp, Unknown; identical to SEQ ID NO: 28752
  misc_feature (1)..( 3000): 2750-1469P.txt file - cDNA_ID_2998526; gDNA_ID_2926253; Annot_ID_204452

SEQ ID NO: 28754 - DNA, 3003 bp, Unknown; identical to SEQ ID NO: 24444
  misc_feature (1)..( 3003): 2750-1469P.txt file - cDNA_ID_2998534; gDNA_ID_2926254; Annot_ID_143076

SEQ ID NO: 28755 - DNA, 3003 bp, Unknown; identical to SEQ ID NO: 24444
  misc_feature (1)..( 3003): 2750-1469P.txt file - cDNA_ID_2998534; gDNA_ID_2926218; Annot_ID_142334

SEQ ID NO: 28756 - DNA, 3003 bp, Unknown
  misc_feature (1)..( 3003): 2750-1469P.txt file - cDNA_ID_2998542; gDNA_ID_2926254; Annot_ID_143079
ctcccgaagactaagaggatttgtggacttagaagccagcttgatgatccatggatctctgattattcagtgttgatgttatgttgcagcttaacatcgttgaagggaagatgcagtacttgtatgatgagagtggtaggcgatatctggatgcctttgctggaatagtcactgtgtcgtgcggtcactgccatccggatattcttaatgcgattacggaacagagcaagctacttcagcacgcgactactatttacctgcatcatgccattggtgattttgctgaagcattggctgccaagatgcccggaaatcttaaggtacttgagagttttaaacaaacaagtctgaatgatgtagttaggtttctcttgttggtttatcgaggaatcagcatgctctatgatttggatgcaggttgtgtactttgtgaattctggctcagaagctaatgagctagcaatgatgatggctaggctttacactggtagccttgagatgatttccttgagaaatgcttatcatggtggaagttccaatactattggactaactgctcttaacacatggaagtacccattacctcaggttttccccagagactttcatttaatgaattgattcctcttcaaagttgagatattttctttagcattgatttttgcctctcaagccgagtctttcatctttagcctcgttttagacccatcagaataaaattctctgcaaagtagttctctgccatagactgcttgtaaattttggttgccaattctgttattgtgcagggggaaatccatcacgtagtaaatccagatccataccgtggagtttttggctctgatggttctctttatgctaaagatgttcatgaccacatcgagtatggtacctctggaaaagtagctggatttatcgcagagaccatccaggtttttgtttgtttaaacaaaccatcaagtgaaatttagtgatttaccactctcttgaacataatcgtcaccatgccattatcatttttacttcagggggtcggaggagctgtagaattggctcctggttacttaaagtcggtttatgaaattgttcgcaacgctggtggtgtatgcattgctgatgaagtccaaactggatttgggcgaacaggaagccactattggggtttccagactcaagatgtggttcctgacatagtcacaatggcaaaggtttgtcaaaagaagttgttaccacttgctctgttcttacttcttaccatatgctatgttctccattctttgactacgtttactgttatatacttaaagaaacatgtgtagttcactaataattgacaccggttatattcacagggaattggaaatggattgccattaggagctgtggtgactacaccagaaatcgcaagtgttttagctagcaagattctgttcaacacttttggtgggaacccggtttgttcagctggtggacttgcggttctaaacgttattgataaggagaaacgccaagaacattgtgctgaagttggttcacaccttatacaacgtttgaaagatgtgcagaaaagacatgatagtaagtaccaaacaaacttatataatcagatcatttactctgtttttacttacaaccgtgtctgtttggtttcagtcattggagacgtgagaggaagagggttaatggttgggattgagcttgtgagtgaccggaaagacaagacaccagccaaggctgaaacatctgtcttgtttgagcaacttagaggtaaacaacattaaagccaaaagcatcgatttgataagcatcagttggttaaccaaaatgttttgctcctttctcttaatgaagaacttggcattctcgtcggaaaaggaggacttcatgggaacgttttcaggataaagccaccaatgtgtttcactaaagatgatgcaggtaaattcttagtttatatatcgcttaaaattatgaagtttcaccaaagaacaaaacgagattgtataatatctataatgaatttgtgtgtgttgtaatgtatccacagatttcttggtagatgcattggactattccatctccaggttgtgaacaaggatgaaacaaagccaacgagagtttttaaccatatgaaccgttttaatgtttccgcgtctttgtaacgaaaaccaagccaagtctcatctcctttgatttcagaataaataaataaaatttatttatttctcagtgttgctatgacataatacaaatacattagaaaagcccaattatttttgttttctttgttaaaattcccatatttcatctggtggacttaaaaaaataaaattatacatgagctatatattattctgctaaagcatactttaaataataaaaatttaaattctatagatatattttgtgtttcggattaaaaagaacactccaaatcatagaactaacaatacatgattttgattatataaaaaagaaaatcaataacacatgattttgtttcgatatcaaactccatgaaccaaaaaaccttataatgtggaaggattactaagatttaaatattttttttttctttttaaaacactttattaaatttttgatatcatttatattaatattttgttgattttagtttaataaataaattagtatcaaaaataatattgtagaagataaatgttactttagatcctatttctttcactaaaataggtacaagcatttatagccattaattattctttgtatagttaaaaatcccataataattaatggtggacccgtaaaggttgcgaaaagtcatacacgttccaaaacaaaaagtcgcaagtctacattttccttcttccagaaccataacacgtctcctcccatttcttcgtaaatacgtttctcctctctgacccatcacgatcacaatctaacaaaaagagttttcaacaaaaatcagcaatcgtggcgaagctatataagaaagaggaggagagacacaaagcgatg

SEQ ID NO: 28757 - DNA, 3003 bp, Unknown; identical to SEQ ID NO: 28756
  misc_feature (1)..( 3003): 2750-1469P.txt file - cDNA_ID_2998542; gDNA_ID_2926218; Annot_ID_142337

SEQ ID NO: 28758 - DNA, 3003 bp, Unknown
  misc_feature (1)..( 3003): 2750-1469P.txt file - cDNA_ID_2998546; gDNA_ID_2926254; Annot_ID_143081
agctgcaacttgctcctctgacaagggtaagtaatatatcctggggatcgcttttgtcttcttgaatagatcatcaagagtgacaatgggaggttcttgttcctcaggggctataggaggagggggaggcagaggaagacgttctacaacgtgaggtggtttggccagaggtggtggtggtggaagagcagttggaggtggccgcgaaagagtctgagcttgtggctgatgctgaggctgaggaggcagaggagcttccagtttttcttttacttcttctgctctaacaaattcagctatcagatggcggcctccattaggtggccactggaggttatacactgcttctcttgttgctgctgcttcttcaaccgagggatactgcagtcacgtcacaactcactcatgttacacaaaattctttggatatttagataattgaattcgaaagtacacaaacagaatcaacatttttgtaaatcaaaaggatttgaagaagcggtcttaccgatacatagcagtgggtcttaatgtggtccatccagaaactagtgacatttccggttttacccaggagctcctgaacagctttcagtgtgaacggcctaaggaaacggtcaatcctgagggaatttgtaggctcctttggagatggaggaactgccaataaatattgaacacatctatcaaacaaagctttaagacaatgaataagagatggaaacatacatagagggggtgctgtattacatacccacacgttccttgggtccatcttcactaaccgaagagtcagaccttgagaagtcgcgcttcagaccagtcgaccttggtgttgtagtgggtgtagcactattagtgatctgtgcttcaggaactttaatactattagagttccatcggcgcctctttgcaggttcattgtttccaacagcttcttgatctacattgagttacaaagaaagacatttcagcatacatagctagaatttcaaaacagatgcttcaaaagccaatatatataagaagtagccataaacgacaaagatgaaacaactattaaacactaccagtatatgcctcaaacaccaacattacagattaaacacagtaaaagatttgattaataaaacaaatgaatatgagaggaattaccattagcaggaagctttcttttgtcagaagccaccagtgggtgacttttattttcaggggatttccctttccccgcatccatatcagcacggctttcctccttagaaagcatttcaatttttgcactcttatcatcagatgtaattgactcggattgctttgtctccggctcatcctccatagactcatcaccagaacttctatctaaattcaacttttctgagtcgcctgcatcgataatattattttctttgatcatatctgcgtttgcagcattgctgtcatccccacctccaacagatgtcttctgctcaagtggctcctcgacatccattggatgcgattcgccaacgactgttgatggctcttggaacttattaacattttgttctaatttgacattatcagcaattttgttatcctttagttctattttttcattatttgacacagaatcagtagaaatacaatcagattttacctcaaaccctgtaacggggatgacctcagatacctggttgtacatagcagatttttcaagcactgcctctgatggttgagccttagaatccccaccatccaacccactaaatggttcattattctcagatttgtgctcactagacgccacttgcacaactgctgcatcacgtgcaaccactgaactatcaagaccagctatgtctctaacatcatcaactttctctttctcatcttcatcactagcgaatggcacagcgttaacctctggttctgaaaacaccggggctggtgtagtctcaacaccagctgaagcttcagttgttatcttggtctgagttggttctggggttttctcagctgtaacaggagttgtctcagtgctaaatgccgcttcaacaggagtaacaggagtggtttgattacgatcacctacagtaacaggaaacatctgaggctcttgattggctttttcagcagcagcaacagtagcactattgatcctttcagactcttcttgctcagcacgaagtgcttcatcaagacgcctaaccaattcctccttcaagcctcttgttgttagtctccgtcttttaagctcttctttcaattccgtaaccttccacttatcaattggtcggttgtccaagactggaaaaggcgatgacgacatcttagcttatgagagagctgattctgaaaaaatattgaatataaaattagagaaacccatcgcagaggacaaaacctaaatcagacaaattagcaaagcaacgcagcaaatctatataatttaaaaccaaagcttaaatctttaacaaacccaatccaaaagagctagaagtttaaagatgacttacaacaaaatggcttgaaacttcctctgatgggtaaaagaaggcaggaaaaatgtaaaaccctaaattcgtagcataagaagaatgaaacaattagagagacaagacaacaatcaaaacccagtacggaagattacaaatttatcaaatttccgactcaaaatagattcttcaacaccagattttactctcttaagacgaagaagaaaaagaagaacgcaaaccttaaaaacgaaatccagaagcaatggaacggagagagagtgacctttggttgaagaattctaatcgagaatgaaagataaagcggacattgggaatttttctatcccgtcattacaaaaattgggaattttggaaagaggaggcgaattctagggttcttgttcgtcgagtggttttgatattggggaaaaactcgaggacctgaagtgataatgggtcgcattgtattgtgaaatgtctaaattaccctttttctcaagtaattttgtacggcgtcgtttcaatg

SEQ ID NO: 28759 - DNA, 3003 bp, Unknown; identical to SEQ ID NO: 28758
  misc_feature (1)..( 3003): 2750-1469P.txt file - cDNA_ID_2998546; gDNA_ID_2926218; Annot_ID_142339

SEQ ID NO: 28760 - DNA, 3000 bp, Unknown; identical to SEQ ID NO: 24450
  misc_feature (1)..( 3000): 2750-1469P.txt file - cDNA_ID_2998550; gDNA_ID_2926254; Annot_ID_143083

SEQ ID NO: 28761 - DNA, 3000 bp, Unknown; identical to SEQ ID NO: 24450
  misc_feature (1)..( 3000): 2750-1469P.txt file - cDNA_ID_2998550; gDNA_ID_2926218; Annot_ID_142341

SEQ ID NO: 28762 - DNA, 3000 bp, Unknown
  misc_feature (1)..( 3000): 2750-1469P.txt file - cDNA_ID_2998560; gDNA_ID_2926254; Annot_ID_143089
agtttagtcatcaaagactttgactccagagaaatagttttttttttttttttggggcaaaacagtagatgttatgaaattaggagattttttttctttccattttgtattttggacaaaaatttagttatattctgttttttttttcttccataaagtgcacagtcctcgaatttacccatttggtggtttacaataagagcacgtcgcatccaaaattgtcctgtgaatgtgatatatggtcaaaagaatattaacatgcatgtctcatacgtacgaaaatatgcttgatttcattaaatacttatttagcatgaaaattatttctcacataccggtaattaattgattttcagtattagactttctagctttgctaagaattgcattgagtatatatatatatatatatatatatgtgtgtttttgtgattttgccacatttctttttacaaactttggccaagcgtaattagctcatcagccataaattaatcacgcgtaactaaggactcgataaacgggattaacgtgatgcggacaattatttgcatatgatacttttatgcctcgtagggttccacatgttaggtagagacactcttgattccttacacgtgaggtgtcggttcggaattttgatttgaaccttgccttaatgtcatgccatattgccatggacgcatatttatatataacttcatacacattaacacatgatatatatattttacttctatgggtgtataatgtaacatacgaacatataacaataaatatgtcctttggctaccgaatatgataatgaatctatgatttattacgttattgttcaagttaatatatatgtggaaacaaagatatatgtatatatatatgaggaatgcttacactaaagtcgtttgtttcttgatgcatatatatactgtagttttttacgaatatgaagagataactggttgcgaaatcagaaagcttacaaaaattaagaaagtatgtatatatatatatatgaaagtgtggtttgttcaatcaacaattgatttaggttccacaattaattaacaaaaaggtgataatttcgttatcccaaaaaaaataaaaataagcttcaatcaaatgtaaaccgaactatatctgaaagtagtggtcataaaaataattgtagactattttagtcccataaccacgtttccctttttaataaggtttccttctcctagaagttactaagaatcctattcaaattcttctaaatctcgtaattaaatcatgatgcatgcatatgcatcgatgttttctacatcagcagtggaagcttctatgagattttgagcatctgagattctagagtatgagaagaataaaattcaccggcgagtcatgaagatgacatgtgaggcaaatttcagataaaatggttcaggtaaatggacattcaaagaagaagtgaaaatgggattaattaagccatcgagtgaaaaagcatgtagttaaattccgttgagaatctgatatttgatcttactgcaggagggagtcttcgaacaatgaatatctgattctgccggataaattattgaatcgagttaaactcacgagtgaataaacgtgaatgactttggcacacaaccgtgactcgaactccgatgaatatttgtcagcgatgagatactaagccacgtggcattatataaatttcaacagtatagcatatatagctaaaagaaaataatacagttataacttataagaaggaaatgttccgatgcagttacgagaatcttttggcgtattataaaattacatgctaggagcatgattggctgatacaagtcttaatgcggtaatcgttaaaataataaactaaagtggtgattaaaaatgaaaaaatccttcaaattattttgaatttttacaattgtggaaccatgttacagagcatggtatttcaatttttatcgtactactactactacggtattgtttccatttttttaataataacacaaaaggggttaaatcatgataaataacaaaaatgaaggaccaacactttgaagagaagattattgcctaatgtgtattttcttgaattttcaaattttcattttgaaactttttgattgaaaataattggttctgttcgtatgagttcctgagattatttattaattaatatatatactaaaaaattaggagcaagatggcaaaagaaagaagcatatggtggggggtgttaatggggaggggaccacgtggcggttactgggaacgctgcaaactaaacgatcggtgtgagcgggaaagccgctttgtggggtccatcatccatctagtaggacccacactcaatgggttccagcgttcagacacacacaatatctgattttccctttaactttttttgttcaagttaaaactaaagtttttttaaaaaaagactttttttttattttcctataataaactgcaactctataaaatcagaccataccacaacctcagcctctgtctctctcaaagcctacacactcattctcactctgtttctacaaccctaaatctcttttcatttacagacagaaatgggtaaattgtttagagttccttagattaatgcatacaaacgtttataatctcttacataatccttatcttgttttctgttatttcagttagattcatagaagaaaacacaaaacttgtagaaaaagaaaccgggaacaaatcaaacaacgatgtaacaacaacgaagaagaaagctcttcaagatatcattatcaacaatggagtaggattgatcaattcatgggttgattcaatgagagcttgttcccctactcatcttaaatctttgttgaaacaaagctcttggctcgtacgtctatatatcatccattgatccaagctctagtttctacttacatcttttttttcttgaaataataaacggtgtgtataaattcgcagacggaacatccatcagctttggatatg

SEQ ID NO: 28763 - DNA, 3000 bp, Unknown; identical to SEQ ID NO: 28762
  misc_feature (1)..( 3000): 2750-1469P.txt file - cDNA_ID_2998560; gDNA_ID_2926218; Annot_ID_142347

SEQ ID NO: 28764 - DNA, 3003 bp, Unknown
  misc_feature (1)..( 3003): 2750-1469P.txt file - cDNA_ID_2998570; gDNA_ID_2926255; Annot_ID_143096
aaatgaaacctggttttgatcccactaaaggtggaagacctgagttcattttcgaagatggacagtatcctgaacaagtaattaccatgaacatctatacattttcctttgagtttcagcttaagtatttgttcattctagtgtaacatgaattggttttgtgtaggttgattggattggacagaagaatcaaattgatgcaggtatgtgtactttcttccatttgtcttttgtttaaggttaaattgcctaatttggttgagcttctatgaacagccaaggttgctggtgttaagcatattgtcgtggtcgggtcaatgggtggtaccaatccggatcatcctttgaacaaactgggaaatgggaatatactggttggtggaaatttctgtgtgtttgtctttcccaaatgagtttagtttcttacactgcgatcaatatttggctacctaatatgtgttcaggtttggaagagaaaggctgaacagtaccttgctgattctggaactccttacacaattatcaggttaaataaattctttagagtgcttctattacaataccctttttatattaccacatcaaaattcatcccaaattctgtagtttcaaaaacttctagatacattgtgtcttggtaattggttaagctttttattctgtggatcaaggagtgttattctctatatttgcgagcctgttcttacttgttttcaccatactttttctgttgatgaacttagagctggaggacttctagataaggaaggcggtgtacgagagctgctagttggtaaagacgatgagctacttcagacagacacgaaaaccgtccccagggctgatgttgcagaagtctgcattcaggtctactcatctgcttttattttgttaacaaaattttcatatcctctccttggtttattattttcagatcttgatatttcttctttgcaagtacaggcattgctgttcgaggaggccaagaacaaagctttcgatctcggctcaaagccagagggaaccagtaccccaaccaaagacttcaaggctctcttctctcaagtcacctctcgtttttaaatcattatctttgttgccaataagaacatttgggatcaaaccttctaaaataaattctgtagtgtctatttgaaaggatacgttctttcaattcaatgagaatattggggttgaatgttcaaaatttaaaattttgatcatacagtaacttctccagagctattcattgaggtgaaacacttattttcatttagtctaacacatcaatcttatagccaacccctttaacaaattaaagaatctactttgttaacgttttggaattaaaaatagaaatttcagttgaaaggagacgatgaaccctttaagagacgtcatgaagatcgaattaaatctgcagttgaaatcgctagacgggatactttggatgattcgttatcaatttggtgttataggagcgtgaagaacgaaagaaacgaatgagatttgacaggcactctcgaaactctcagctggtttttcgtgatcagtcttatcagaacagagacattagagtttatgatcaaagcaagctccctcagggtaagtaaattatatgctttggcacttgttcaaatgttaggttcattggtttgttaaagtatgttttcttcttataataggtcggctagattgtcctggttttggtctggagataggattgtatgcttccttgtttatcttgtatgtgatgttttttattggtgcgtatgattttggtcttgaatacgacattgaatctgaacactgctgtgtatcttactttgacatggctagtaagagtgttactccaagagcaatatcaatctttattgttcatagctaatttttacatgtctctctgctgcagactgattgggaaggtggattctttccattaacgatgcacttcagtgaggattatccgagcaaacctccgaaatgcaaattcccaccctaatgtctatccatctggaactgtctgtctctctatccttaacgaggattacgtaagtactcttctgtttctttcttttcatttctccatcagaaaagccaaatgtatcctcaagctctcttttcttatgttgtatattgaccagccattaccgtgaagcagattcttgttggtattcaggatttacttgacacacctaatcccgctgaccctgcacagaccgatggttatcatcatttctgtcaggtacacttccaacgaaaactctaaacactttgataggttatgaaacataataggaaggaactaagtcgagtacatgattttgcatgatccagttgagtacaagaaaagggtgaagctgcagtccaagcagtatcctgctcttgtctaaaacctcaaaaaagagaacgcaccaaaactgatgacaagctctgaatatattctcgtcatgtgtgtcattgtgtttaaatgtcattgggtgattgaaaactcctcattttggcaccttaagacactggaatctatttattttcggaaaaaaactcttctttctctatataactgttaatattcttggtactgattcagttggtactgattcagttggtgttgcttctatattattataaagaaggaatgcaaaacatgacttgaaatagtgtttgtctctagtatccatgtatacgtatatctctttcaaatgatctcttaggaacatttgggaggtaatgtatcaagccttttaaaataaaatctccggggtcaatttgaaaggagcccataacattaagtagggcgttcatttcattaattgggtttgaatgttaaacataaagcatggggaacatttagtgatttagtaaaaataaggggccaaagatagaatttctcgtttttatcacccgcttcatttgcctttctatcgccacaagaacacagagagagaacgattagcccagttccgatatcgttcggtggcttcttcatctgaagctacgatg

SEQ ID NO: 28765 - DNA, 3003 bp, Unknown; identical to SEQ ID NO: 28764
  misc_feature (1)..( 3003): 2750-1469P.txt file - cDNA_ID_2998570; gDNA_ID_2926255; Annot_ID_204502

SEQ ID NO: 28766 - DNA, 3003 bp, Unknown; identical to SEQ ID NO: 28567
  misc_feature (1)..( 3003): 2750-1469P.txt file - cDNA_ID_2998570; gDNA_ID_2926276; Annot_ID_205340

SEQ ID NO: 28767 - DNA, 3003 bp, Unknown
  misc_feature (1)..( 3003): 2750-1469P.txt file - cDNA_ID_2998574; gDNA_ID_2926255; Annot_ID_143097
aagaatattttcatgttactatgttatctaaccattaatacaagtcaccgactaggtgataatttggtatttacgtaagaatagttatgcatgtatcgacttatagacttttttttttttaaaaaaagggcaaccctatcagctcatactttatttcattgcattttcaacgacggctaaggctaatttgacagaataaaaacatatcaaaagtgaatctagaaccaatgatatttaagcaaatatatttgttttttggtttttatatcttataagtagaagttaagaacaaaatagcatcttttaaactgactatgatgtattgtcaaaaaaaaaaatgactatgatgattaatgaaatgtatatacccaactaggaaccaataaacaaagaaaaggtaatttgacggtttctgttttatacattgggaaatactaacagatgtcaagtggtacggacggcgtaagatctaaggatctgtttgcttctaaaactcaaccctaacatgcatctttactaatttctcataaagctattgcgtaaaacatattgatgactaataacatcggtaaaaaatattaattcacatgtagtaaaatgaataacttgtcgtctaatgccataaatgatttgttctaggtgaacaatattcttggaaacaatctcatgtgcttcttggaattttacttcaaataaatctctgacttttgttgacttcttgtttaattacattaacatacgatctatgtgtaaacaatgtgattataatacattttgtaaaatccgacaaaacccaaaaaaaagtgtggaaacatttatggtgtacgtaacgtagtaatataaatatgaaagccctagggtaatggcttacgtaccttgaaaccaattatttatagaattaaagtaattataaagtagtggcaataaatgaagccacatggatatagtggtcgaatatttctataaacaaatcatagtattatatataccattatgtgaaatatatatacaaaatatgtacgtaaatgtaaaatctgtttttgaattcgagtctacggtataaaatgatgattacgtttttgcaaatattgtttttaggttgttgattgtggattaggtatatttatataatgtgatcttctgtattttttctgtatgtttcgtattttactatttttgtaaaagaatgaatatacattatacgtaacatttattcaagtggggtttaaaccagtcatatttatatatgcataggtaatgtatgtggcaaaacgtgaggttggccccggaatcagttgaggcccaactgcatcgacgcacggctttttaattgtgatgccgtattttccgtgttcttatacggacggacggacactctcgtacacaaatagaatcgtttcacaaataaaatatcatacactttgttagcaattaattatagaatcgtttaaactataagaattagtgtgtacttgtgttgtcactaaaagatggaagaagaaagggaatgaaattcccgttatcaaatatttgtaatcatttatctttgttctatttctatataaacacaataatttcaagattatgtataaaatatgaattggattggatcggagggttttggttcatgtgggatttctgattagagacacaactcgcaaattgaccaaagaaaaatgcatgaggtgcccatgtgcggtccacgtgcatttgctatctttttggcttatatacaaaatttaattattaactcgactaacagtgagtgaataaacaatgctgcatttctctgtttgaagaaaaaaaacaatgtagcatttttctgacaaaaaagtaataatgtgagttttatattggtgcttcttatttttcgtaagtagatttttttttttctataagtagaattttcttaaaattgagtataaatgcttcttttttaaaaaaattcaacgcgagtgtaaatgcattttaagagaacgaatttgatgagctttttgaaagaaagttgatataatttaaataaatgacattcttacaatagtaaaactcttaacagttatttttgtttacgtcaaccaaattaagtaaaaagttgacaaaaaagttttaagtaagaagagttctcaaagaaattatctaattaatgacgttctataaattctccaacaatcatttaatatataattgcaaatcatcgtaatataatcacttttagttaataagttagttattagttaaggtcactgtgacgcagatctcagactcgacgcgctacaactctcgacaactacaattttcgccgcgaattatgatcgcgtgaatatgacatgcatgacttgcgcgtggtatagatgactttaagcaccaaagccacgtaagccgccggaaatgtttagttactgggccaagacgtattttattttgggccgattaatcaattccatatctattatctttgacctatagtttatcgcgtttactatttttacctattgtttagttactaggccgacttttgcatgtacgtaaatttttgatgtattctttattctttttagatattcactttttgctttagagaaagtttgaaacaagtgttcatttttttttggggaataagtaccaaagattggatatttatcatcttatactcataaaacataattttcgtattttttgtggggtcaaatttaatatttaaaaaacaatttaaatagtgattgaacactttggtaagtatgcattctcgtgaattcggtggaataaatttatattagatccacgagggaaaaaatacggaattacaatatagttttttttatttgataatttttattaataaaagaatacttaaattagaaaaataattaaaaaaaggcgtaaagtcatttgaagcctccataagtagccttcctagcttcccctctccctctcacattcctctcttctctctctcttttcccaaaaaccaaaaccttttttccgtaccaaggtcaacaaatg

SEQ ID NO: 28768 - DNA, 3003 bp, Unknown; identical to SEQ ID NO: 28767
  misc_feature (1)..( 3003): 2750-1469P.txt file - cDNA_ID_2998574; gDNA_ID_2926255; Annot_ID_204503

SEQ ID NO: 28769 - DNA, 3000 bp, Unknown
  misc_feature (1)..( 3000): 2750-1469P.txt file - cDNA_ID_2998578; gDNA_ID_2926255; Annot_ID_143098
gtggttttagttatagccagatttgaagtaccttaaaaggctaaaaccagattcatcaacctttctttctagaattagaatctaaatgcaatggcttgtgaaagttttgtgttttgaatgttctgtttctgaaagaagaattcttgtagggctaagttcgaaattcttgagtagagatgggagcaagggctcgtcgaccgcttccttctcttatatgcctcgaacagaaggcgagatcttgcaaaatgctaatctcaagaactttagtctcagtgaactgaaatctgcaactaggaatttccggcctgatagtgtggttggtgaaggtggatttggttgcgttttcaaaggctggatcgatgagtcctctctcgctccttctaaaccggggaccgggattgtcattgctgtgaaaagacttaaccaagaagggtttcaaggtcatcgagagtggctggttagtcacatttcttctcactttttctcctcaagctactttttttgttatttcaagattgtcgcagagcctggttttgtggtttcagggagtgatcatcttttttcgttttttttttcattttgaaaacaacaggctgagatcaattatttaggccagctggatcatcctaaccttgtgaaactgattggatactgcttggaagaggagcacaggcttcttgtttacgagtttatgactcgtggtagtcttgagaatcacttattcagaagtaagttcaaatcttcaaagataaagaagctcatggaagaacttgttatacacaatggttaatctttctttcttttttctcataataggaggaacattctatcagccactttcatggaacacgcgggttcgtatggctcttggtgcagctagaggacttgcttttcttcacaatgctcaaccgcaagttatataccgagacttcaaagcatctaacatcttgctagattcggtatgacatgattgatactttttgtagctttggttttggatgcagtcagagaagtttatcttaatgtttctctgcatctgcagaactacaacgcaaagctttcggatttcggtttggctagagatggtccaatgggtgacaacagccatgtttctaccagagtcatgggaactcagggatacgctgctccagaatatctagctacaggtatatatgaacatgcattctctgttattatgatcaatgaagagacctccaacacttatgtttctgtcaaatttgaaaggtcatttatcggtgaagagcgatgtatacagttttggggttgtgttactggagttgttatcaggaagacgagcaattgacaagaatcaaccagtaggagaacacaatctcgtggattgggcaagaccctacttaacaaacaagagaagacttctgcgagtgatggatcctcgtctccaaggtcaatactcactaacccgagctttgaaaattgcagttcttgcactcgattgcatatctatagatgccaagagtagaccgaccatgaacgaaatcgtcaagacaatggaagaacttcatatccagaaggaagcatcaaaagagcagcagaatcctcaaatcagcattgacaacatcatcaacaaatctccacaagctgtgaattatcctaggccttcaattatgtaacaatcctaggcgagctatttaccgggttttagagatgtatagactctttaccttctgtctgtttagatattatgttgtttggtagtaacaaaagagctggcaatgtaagggagagaaggaaacttactagttgtaaacttaggttctcttacaacgttcacatgttatctcacatacaaaatgttatcaggataagaaaaccacaaaaaaaagaggcaaagaagtgagatgatcctagcagagaatcaatctctagttcatcgtcctaacaaagcaacacgatctgactgtacagcttgagtaaggttgatgtcgaaaagctcgcaacggataggcatttcaatctcatagaaaggattcttcaagacgtaatcagtgtagagttcataaatgtatctaaggaggctctccatgtgaggagtcccaggttcacaaaccacaaagaactttgttcctgagatatgatcagttattgagccaagtcagtaatcaagagaatgtgacggtatcttcttgcaaatggcgatgtatgattacctgggagagactggaaacaatggagatcgaaagtgtcggcttcgagaagctcgatgccagaacagccattgacaggtgaaagctgctgagaaatggcgtgcattgaatgccataaactagctactctcaagctatcattcgtatccattcttccctttgttccacaatcctgaatttttcccaaatccaaacacacacagaacagatcaaaattcaaatccaatttctttagtagctattcacaacccctagattaataccgaaaacactccttctactaaacctagtgatctcaaaaatttcatcttttggtctatccctcgaaattaacatcaattagctcgtcattctctagacatggaaagtccacaagctgcgagatcgagaacaagaggaagatggagagatcgtaccttgtagaatatcaaaccaccagatttgttaattatgtaaagactgtaaatcgctgccatttttttcccccgataatcttcaaagatccaaatccgagaaatcagcgagacgatgaagaacaacagtacagatcttattaatgatttttctttttctcaaaacggcgtcgttattatatcgatggtctctactcgcgccacgtcgcctaattaatttaacgacgtcgtcttttaaagaactagcgtctcttaaagcgccacgtgagctaatgtttaaaaaacttcaccaaaaatggtgtcgtttcaataacttttcttcaccaactaccaaaaacgtctgaagaagaaaaaagtataagtaaagcagagagaagagcaagggagaggtactaaaaatg

SEQ ID NO: 28770 - DNA, 3000 bp, Unknown; identical to SEQ ID NO: 28769
  misc_feature (1)..( 3000): 2750-1469P.txt file - cDNA_ID_2998578; gDNA_ID_2926255; Annot_ID_204505

SEQ ID NO: 28771 - DNA, 3003 bp, Unknown
  misc_feature (1)..( 3003): 2750-1469P.txt file - cDNA_ID_2998582; gDNA_ID_2926255; Annot_ID_143101
gagcttctttatctttgaagatttgaacttacttctgaataagtgattctcaagactaccacgagtcataaactcgtaaacaagaagcctgtgctcctcttccaagcagtatccaatcagtttcacaaggttaggatgatccagctggcctaaataattgatctcagcctgttgttttcaaaatgaaaaaaaaaacgaaaaaagatgatcactccctgaaaccacaaaaccaggctctgcgacaatcttgaaataacaaaaaaagtagcttgaggagaaaaagtgagaagaaatgtgactaaccagccactctcgatgaccttgaaacccttcttggttaagtcttttcacagcaatgacaatcccggtccccggtttagaaggagcgagagaggactcatcgatccagcctttgaaaacgcaaccaaatccaccttcaccaaccacactatcaggccggaaattcctagttgcagatttcagttcactgagactaaagttcttgagattagcattttgcaagatctcgccttctgttcgaggcatataagagaaggaagcggtcgacgagcccttgctcccatctctactcaagaatttcgaacttagccctacaagaattcttctttcagaaacagaacattcaaaacacaaaactttcacaagccattgcatttagattctaattctagaaagaaaggttgatgaatctggttttagccttttaaggtacttcaaatctggctataactaaaaccacataatgactgaaacaactcaaaaaccatactttagattatgaaaagacaagcttttttgagagagaataaagtgacagtcaattctacttagccgacactctgatttgatttccatggattcagctcttcttaccaataatggaaacatattgtctgaacaagaactgaaatctaaaaactttctactacaggactaagcaagtgtgaaagaataacaataattgaaatctttctacaagatatcaatcaccttcatcaaattaataaataagagaaagacaagaaaattgaccaaaggagactcacatgtactggaagcaatatctgttttaatccgattgctgaaacaacctcccattaaaactccaagaaaccaccaatcagtcactcagctctataatcttctcgattgaaagaagaaaaaagataagagctttatgtgtgtaaacacaaacccagttctatgcgtacaaaatggagcgagaattgaaaaagacccttaagaaaatcccaaactcccagagaaagaaagaaagaaagaaagaaaattgagctggctagtaatcaataaagcctaaccttttgttctctcggagaagaaaagtcttttgtgataataatgaaactaattgaaaatgaaaagaaaagatgtttttttttgagctctttcctctctctttctctctcagttttgggtacgccctattggactttgtcttcttcctcatcttcctctgttcatcgttgacttgttgactttttctaataagactttgagtctttgtggagattttttttcagttccttttcaagtttttttttttttgtttgacatcatctttgtggagatttatctttagaaaaccgttatcaattagtttgtttagtgatataaagttggtttgtggaccttgtgaatgaagtttctttgtgggttgtaatgaaggctgaatgaaacgaaattagtaggaggaacatgatttgagcatatgtgaataaaacaaattggctagtatatctatgggcccatttaggaaataggtattaacaggcttcactttcatccatggacttgggcccttggccattaatatagttgatgaagtgtatactttttaaacttcaaaagttcaaatgtaatggcatattgataatttttgtctatcaataaatttgcagaattatatatatatatatatatatatatatgcttgaaaattttaatttatttttgggacacaattgtttttaagttagtgcattattcattttacaatagttgtattcagtatatcatcacttactatactacatcaaacagtttctatttagtttattatatcatttactatttctgaaattgactttttgttttcatctctgtctaatgactatatatatatatatatcttattttttaattttatttatcaacaagacattatatttatatagaaaaagacttttgatttcttgaccaagaaaaaaaagacttgatttacaaaggccatttacctttcatgtttctcattactcatatcttggtaattacaaaattgtaaatgaagtaactaattttcaaaatatgcatttattataacttatataaaaaagtagaaaacaaatttcaccaaaataaaaacagaaaaaattaaaattaaaatttaatgtcattaaaataatatgatccaaagattctacatttctactagtaatggagctagtgaattgatgacaaaaaggaatttattttagtaattgaaaatgtcaactactaaatcaacaaaaaaaaaaattatttagcaaagagaaaaaaaaaattacaagagtgacttattcttcgttcgtatcacaattggtaaagagacttgccgagctccgcaaaccgccatgcctttaaccaatcttcacctataaactctttcgtatttggtgcaatcggagaaattagggtttttttctgagacaattggaggtatttcttcttcgatttttggaacctaagccgattctattgctgtaatataatcattgtaatttgaacaatttaggttttactttaaagttcttctggctctggtgtgaagacgatcacttgttggttctatctaagtttcatcgtcttcgttgtactccgaaattgaggaacaaaccctggagagtcacagttccgtgttagtgtttctgcagcgttgtgtcagtggtggttttgtatatccgccgctcgttaattgtggagatg

SEQ ID NO: 28772 - DNA, 3003 bp, Unknown
  misc_feature (1)..( 3003): 2750-1469P.txt file - cDNA_ID_2998586; gDNA_ID_2926255; Annot_ID_143102
agattgtctcatgaagattctgtatgtactgcgattgtaagcagcagctcctttgatagctcaatggcctctgaagtccacaaaattgatcctttccatgccctgcttccttcttctgccatatatttgatacgcgaatgtttgaaagttttggagacatgcttaggaaatgatgaaggtatatcaaagtttctttgcaagttgtcctcttctagcggcagaaacatccctgaaagtaagatgtcgtggccaaggagagatttgttaaatgttgaaactggaggaagtgtatctagtaatcttgccagttctagtagagatccgagtactggcttatcacctctatgcggcgatattcaaacaaatcttagcttggataatgtttgtggaccgtatggggtggttcagacagatgttacagctgactctaaaagagtatcttgcaactctgctgatttgacaaagaatgcatcaggattacgtatacttggtctgtgtgattggccggacattcactatgatgtgagttctcaggccatatcagttcatcttcctttgcaccggttactttctctgctaatacaaaaagcattaaggatatgttatggagaatctgcatcatacaatggagtcagtattagtcatgagatcccacatgcagacttcttcagctccgtgataggagatttccatccttgtggattttctgcactcgttatggaacatgttctacagattagggtgttttgtgcccaggttatcgctggaatgtggaagaagaatggggattctgcattagtatcttgtgagtggtatcggtcagttcgttggtatgtgagaatactattgtttttataaactgctataattcatcatttactcgcatgtttaactagatgcagctttgaaaactggtagattggttgtgaagagattactcgtttctcattctagtaatttctatttacaggtcagaacagggacttgagcttgatctatttcttctccagtgttgtgctgcgttagctcccgcagattcttatgttgataagcttctcagtcgatttgggctctcaagctatctttcacttaatccggatataacaaatgagtatgtacctattgtcctcttactggtaattgatctcattatatggttttatagttctactacattcgatatgactgtctcttcatttcattgttcaatctgcattagaggagaacaggtattttatattattctgtgaattttctgaatcgtgaatttatttattactagatggtcagtcctattttactataatcagtctgtcttacctccttctgacatgattcttatcataaatttattttcaggtatgaaccagttttggtccaggaaatgcttggtcttctgatacagattctgcaagaaagacgattttgtggtctttctactgctgaaagtttgagaagagagatcatcttcaagttagccactggagatttcactcatagtcaattggtcaaatctttaccccgtgacctgtccaagtcggacgagctccaggaggtcttagatgacgtttcagtctattgcaatccatccggcatgaaccaggtcttgattcttacccatatgctgggatcacctttaagttgacacataatgtaaaaaatcacttgacattagttcgttggcagggaaagtattcactacagtcatcttgttggaaggaattggatctctaccaccctcgttggcagtcgagagacttgcaatctgcagaagaaagattttcgcgttattgtggagtgtctgcgttgaccactcagcttccgaggtggagaatgatctatccacctctaaaggggcttgctagaataggcacttgcaaagccacatttcaaataatttcatctgctttatactacgcactacagagtggtacatcagttaaatcacgtgctcctgatggtgttctcataactgcactgcagttactctcgttatcattggatatttgcactcagcagaggcaatctaatagtcaggattgttgcttagaaaattcaattccaattctcgaattagctggtctggaaataattggtatagctcaagggactgaaaaagaaagtttattgtctcttcttgtttcgttaatgaagactcgtatgggagatggccgccatcaatttccagagccaggcagttgcaatatttcgtcctggattggaaatctgctgaagaagttcagtgcaattgattctgtttgtatgaacctattgcaaagtcttgcccccgaggtggttggtcaatctggcttcgataaagtcatgtcaggttctacttctgatgagaagcgcaaggctaaagctaaagagaggcaggctgctattatggtaagatccttttatttcaaatctagtgcaaaagtttgacatggaaccggtagccattgatgtctgatcatgcacttgaacatatgatggctgctgttcgctccctgacttgtctgggtcctgcatgctccctgttaatgtatctccttgttgataagcatcaacaaggagcatgcagaacgtagacatagttacctctgtggtaatagaagatttttgtataagactgtctaaattgtttttatgctcattattcaagttgttatctgtagttagaattaataagttccaggatatggtagttatgcttatatataacttgcatgcaggcaaaaatgaaagctgaacagtcaaagttcttgtctaccttgagttccagcatggatgatgatgatccgagatctgaatttgaaacaagtgattctgtgatggaacatgattcagaaatagctgtccgtgaagtttgctccctctgccatgacccagattccaaagaccccgtttctttcttgatttttctccaggttggtagcatgactgatgctataatatgcgactgttaaggttaaataaacatatactccgaggaaattttgttctgcatcattcttaatg

SEQ ID NO: 28773 - DNA, 3000 bp, Unknown
  misc_feature (1)..( 3000): 2750-1469P.txt file - cDNA_ID_2998602; gDNA_ID_2926255; Annot_ID_143109
caagttgtgatcaaacgtttcaaggatctaagacagaagataaagcatgtgattaatgagaacaagaacgagaaacaccgtatcactatggatgctgtgttggacaaagtacctcggaagtacggtttttcgaaagatttgagagacgatattttcgaacacttgaaaggaaactctgcagctaagaacaacaacaaagcagaaggtacaaaactgaagcaaataacaagagcttcgtcgctgtgtggttcgctggatagatatcttcagctctatgagtgtagcttccaaagagaagcgaagaacagtagtaattcagagaaatcaaagatggagttagaggaatcagcgttgccttctaagagagctcctaaattcttggggaggattctttcgttacctcaaatgaaatttcatgctttgaagattgatgaccttactgtccaatcaatagaggaagaacaagatggcttggacaacatttcagagatctcagaagatcactctcagtcttcagaacatgaaacacttgaccaaacaatggatgcttctgaggattcacccgttgatgcagaaacagaacaagacagagagatctctacgcttgacgttgaacatgaaacaagatcgttaaaagaatcatcagaagaaagtcctaataacgtttctacagttgatattgacgaaaatgcttctgtatttgatatctctcgaggtatgtatatatctttaacattcaatcatttctccatatcaaagttttccatcaaattgagaaagttattttttttttgttgctcagatttagatacagagactgtctcaacaagcaaacaattagatgaagaagtcctcaacatagatgcacaagataaagtgaaattcaactatgtaagagacattctcgagatctccggtttcaatgcaccagaatctctctcaatgtggcaattagattaccagccactggatccattagtctacgaagaagtgacaacgacaacaacaggatgtatgttccaagatccagaatgttcaagaaatgaagaagaaggcggtaactgcaaccacttgcttcttttcgatctaatcaacgaggtactaatcgaaatctacgaaaggtcttaccattattatcctaaaccgttatcatccctatgtaagatccatccaatgccggtggggtatagtgttttgaaagaggtttgggttagaataagctgttacttgcgttacaagccatacgacgaacaacaatcgtttgataaggttatgagtagggatttgtcgagagacgatggatggatggatttgcagttcgagagtgaatgtgttgggattgaagttgaggatttgatcttcgaggagcttctggaagaattgcttatatcatgttaataggcattcaagaactcgaatcatttcttcatttttcttctactttgttgctttgcttggagtttaaggtacataaaagagaaaatatggtgtttgtatgagtttttgttgttgtttatgataaaactttgtttaaaagaaattgtagaggataaatttttggaatatacaaaaatattttcaggtgattgatacattcatagtttatataatatggtatactatggtataataacattgtgctacaagattttaacaaaagcccgtctagctcagttggtagagcgcaaggctcttaaccttgtggtcgtgggttcgagccccacggtgggcgatactttttatgcgattttgagatttgtgtcttaaaatgtaatcgtgataatattaactacgcaactgttcatttcaattcttgtgaacgtgtaaacctcgaaactacacaaatcaaatcacgagatcctttccttttttcatatagatactcttttacttttttatagaattagacttatcgacactccatgatgattcccatatggatggttctcatatttttaacattactttttacatagatcgaatttttggaaatgtatcgaaaaaagaggagagattcgattcaaatacccacatagaacggacaaggtcaataatgggcccactattcttttgagagcccatctcaacaagttgaatcatcttttttgtgtactctcacttcaccttttgacaaaaagtcatggaagccaaactttggaacactactttactttgccaacatcttgttttgttgaatacctttttcaaattggaaaccaaagacatatctaaagggaaaacctgtaggacaataaaacaaagaagtgatagctaaagtctaaactaatctcaatatatgtaaatcaaagagataactaatgaaaaatatgaaaattttcgcgaggattaatgaacaaaggaatttttttttttccttctaaaattttttattagacaattggtattacaatgacaactacgaagctaatacaaaacttcggaaaccaacttattacataagcaaaattatgtgtcatatactgaaaattacgaaactgaaaaagtgaatttaacgatttttcctttcgataagctttattcgctaacatgttaacatgttagaacatagaaaatattgaaaaaaaatttatgtttaaattgtcaaatggaaatatactttacacttttatttgtattaattgttactttgctctcctagttataaagaagtaaagtctatgattttgttacttctttttttcttgtaaatctttatacatgtaaaaagcttttgtttccaactctaatcctcaatattttatttttctgtttattggaaaagggctgtaaactaaaattatttacttgaggaacgattatttaggtgataagagtggacaaagatcgttgacacgtggacggtctacaaattctaattttgcctataaatatcaaagctcctgaatatgtaagtttcattcactgattatcgtttaaggcaaattaagatcatcttcataaatcttctcagatctcttccaattttctagaaaaaacatg

SEQ ID NO: 28774 - DNA, 3000 bp, Unknown; identical to SEQ ID NO: 28773
  misc_feature (1)..( 3000): 2750-1469P.txt file - cDNA_ID_2998602; gDNA_ID_2926255; Annot_ID_204515

SEQ ID NO: 28775 - DNA, 3000 bp, Unknown
  misc_feature (1)..( 3000): 2750-1469P.txt file - cDNA_ID_2998605; gDNA_ID_2926255; Annot_ID_143112
cgtgcctttgctttgcatggggtcctcgcgatatttttttgaaacttctctatgttttagtttcttatgtttcttcaatcttcagatatacaatgtcgtatatggtaaaaatttcccaatatcgtgaaagaataattttctcagatgcttcctttatcgtgcacgcaagtaatgaatcaccaactaataattgacttcgcactaattaatttgtgttctcatcgtttctttccttatcaaacacgaaaaattatctttttatttcttatatatttctcgaaaacattattgcctatataacggcctctctaaagaaagtgatgtttaatttaccataaaaaaaacttttagatgttacttatagatttaaaatgtaaactgaattaatgatagtaattttcacaagctaatgatactactttagaggatttctgtatatttagataataaaataatctttgtaagctaaacttgtacatgtatcaaattatttttaatttactattttaaattagatttcttgataactattttactgttttgtgataggagtagaaaacaaaacataagattaccattaaatgcagcaataatttggggtatgactatgactacttactaatcatacccctaagattgagatctccaaattgcagacgcaacctttcatgttcaaaaccaataacaatccacacaagactgttctaaaatgtctatttttttctttccattttgaatatttgttttatccatcattactgttgtagttttacttgttattattaacataaacatttgaaatatcgatgttctttagtataaattaatatatgagtgatactcgtggaaaattataactttggattcctcagccgtaaaatgtgaaccactttagatttggtaaacttgctatacgctaaacgacgactaccagaaccaccatccaaagtccaaattaacaaattgtgaaatatatagatgtaagtaaattaggggattaagtatggattaaaaggtgtagcaaaggataatgaaagattggcgactaggcatgtggtgcgatgactacgcacatgggtgctcatcatgtcctccatctttcacgttttgttatttactttttttagcttaataaattatacttatgattgggtcaaaaattaggagaaaaaatatctctcaagtacaaaatttatattttcataaatgtatatagtacaattaaaagtcgcgagagaaagttgcaaacatgatcaaataacatgtttatgcattagccaatttaatgaaaaagataacaagatcgtacaatcgaaattctcaacctcttacaaagcatatacaataacaagttaaaataagactttttgagctttatcagcttatattctaaaaataaatatatcttggtataatttccaaagttttgtagtatcattaagaaatttttgatcaggtttccaattaattgattccagtgattacaaaattatattaatacagatttttttttctgttttcaagttacaaaatatccaactagagtgttaacgtcgtcaataaaattatctatgtgtgtgtatatatattgatatatgtatatagaattcaaagagagtggtttctctctttttatatagcaaaggtggtgtgctttttacacatggagagaaaagaaaaatgagatactttatgacatcaaccgatgctgcttagacatatatgaatcaaatcccacatgcaaattttgggaccatttcttttgcttggtttttacccactctatctaatgatcatgatcagtaacaactattattcacctcaccctctaaataatcacatccggaaactatctaatgatcatcatcaggaaactaaactgagaaagtctgaaaaaaacaaattgtgctttgatgttcataaattgataatcaagtcgtcaaatcttttaattcttttacacgttatgaaccatcatattttcagaatcaacgattatatatgtttttcacgttaattttatgcagttttataatttatttgtccctttgtaaacaaaagagaaaacagcttattaatggagtttaccttaaaacaaagtactaatagtataaactaaagtcaaaacatatagtagtaaattagataaaggttgggatctgggtccagagattctaattgaatgctttcattatcttataaagctttatttgtgattcccacatcttttaatgaaaatcgctttgcagtgtatattcttaaggacacgagacagctttgttgtctatttgtgtaggacatgcttagtctttttcctctaataattatcaaggaggaccattaaaaaaagaacaatatatatagaaaacttttaatatacattttcattaaacttaaaaaatgatagaatatgtgagaaataataatatggggataattttagaaaaccttttccgtttgacaataattcaaattcattcgtagtcatatcaatatcagctaggcattattaccaaaacaagaaagacacacacatctgtgcagttgttatcaattatagagtgataattgatctggttagcatgactagtgaaattgacaagataataaagcgaagaaatcactttacataggaaaattttgatcactacaaaagttttgggtctaacagtagttaaatgaaaatattgaggactaatcgaaatatcgactttttaaggtatgagaattacaaatatatataaatacagggctttcttgttacaacttacttgggctttagtaaaagcccaacatcaatcttgatacgttgacttcgatttgactcctcgtaagttttctccgatgtaatctcaccgtcttcttcagctcactcaattttccgggaaaatccgatttccgttgtgaattattcgtcaggcaacgaaaacccatgattgatccgcgaatgtgattcggatccgattggttccttttgtgggaaattagagggaaaaaatg

SEQ ID NO: 28776 - DNA, 3000 bp, Unknown
  misc_feature (1)..( 3000): 2750-1469P.txt file - cDNA_ID_2998629; gDNA_ID_2926257; Annot_ID_143132
gtgtgtctttttgtatatggatggttccgtgtaaaaatgtaactgtgagtttgaacaagccttctttggtgttaatttagctgtcttccaagcaaaggaaattaatgaatggggtttggtggttggtttcttcttaattgattttttgtcgaatatgattggttttctacaacctcctcacactcgaaatagcagaatcatttggtccatttttaaaagataaaatctacacatctttctttcttctatattacctggtaggttttagagtcaagattttaatttacctttttcctgttagatgtaacaatacgtttgaatactgacataaactaagatttgacactaaagtatgttgagttaataagttaaggaaggtgtcggcggctaccattcgagcgtgttcatcacccgcctgtcgtgcgcgtagaaaactcatttcgctcccacaaattaatgtggaagacccttgctatctatgttacgaggcccatgggcccatgtaattaaaatagtgtaatttgaaattactgatgtgttctcgggaagatcaatatataattagaaagaaggctctgcgccgacggcgtagaagacgatgcgtctcttgtcgtcgccgataaatcgaggcttcttcgactatgttgaactctatccatcgctcgtttcatcttacttcccgccaccagatcgtccttcggctgtgctctccgtcggcgagtaggacgataatgagttcttctcctcactctccgatcccaaagacgcatgtgagtgatcgttttcgcattctctagactattatctttcaacctagtttcgctgattttgaaccatttttactatgccgctgatcgcatgaatttgattggaaaaaaatgctctcatgctttcatagtttatattcaatttccagtggcataccatatcaagtactgttgtttagagattatgaactctccattggctcccagtgattttcctatgatcaaagcataatcgtggcggtatctaaaggacacgttatgttaattctgttaagcagactgcatcgcttgactcacttaatgattatgaagagcaatttccaccacttactggtggctctaagacgaagaagttttatcttggttctaccaatccttctactccatgtcaaagttcacagcttcaaaactggacaagcggtaaggatgctttgtctttgcagaggaatttgggatgtaagaataggaggaggagacgggcttcacggtttttacatgaagaatccaatgggacaacttttgaggttggcgctggtattggctctccaacaagtatggttcattttgattctaccaacccttcttcttctagtaaaagttcacaatctcaaaatttgaaaatccgcaaggttaggaatcacaggaattctggattcaagagtagggatcaaagtcctcagaggataaaggatcctccgcctttcgacatatgttcttcagtcctcgaaagaaatgatacaagtataaaagattggattttggcggatgaaacaaacagagaaactgttgaagttagtaataaacacaaagttataaggcctggaatggtgcttcttaaagacttccttacgcctgatatacaggtaaaaaactgtgaaaatgatcacataatccacatatttctctagtaaagtaaagagttgtacatgcttataggttgacattgtgaaaacatgccgagaacttggtgttaagcccacaggattttaccaaccggggtatagtgttggttcaaagcttcatctgcaaatgatgtgccttgggcgaaactgggatcctcagactaaatacaggaaaaacactgacattgatagtaaagcaccagagatccctgtcacatttaatgtcttggtagaaaaggcgatccgagaggcacatgctctcatagatagagaatcaggaacagaagatgcggagaggatacttccagtgatgtcaccagacatttgcatagtcaatttctactcagaaactggaagacttggtctccatcaggtgttgtgcagtttgactttaaacctctttgaagggttctcttgacactaataatgcgttgttttgtattggcgtataactatggcaggaccgtgacgaaagcgaagagagtatagcaagagggttgccgatagtgtccttctccataggtgattctgcagagttcttgtacggagagaagagagacgtagaagaagctcaaggagtgatattagaatcaggagatgtgttaatattcgggggagaatcgcgaatgatcttccatggcgtcaagtcaatcataccaaactcagctcccatgtctctactcaacgagtccaagctccgaacaggacgtctcaatcttacttttaggcatttctaatcatctttcaattttatcaaatatataaagaattattgaaaaaataagtaaaccctaaatttgaagaatttctctttattaattttaaaaatacataaaaatccaaaatctcaaaataaaatgaaaagaaatcgttgaataattttgctgtaatttaggtgaaataaaaatatagatgtgcaacattattttccttaaatttatgtatattgaaaaagaaacaaattttgttgatttcccaggtggtatatattactatcattaattaaaaaaaaaaaaaaaaaagagaaaagagagaagaggagacaaaacgcaacacacattgacgactttccgtttcttcatcttcttcttcttcttcttttttttttttttttgctgctgacgacaaaatcccaaaatttggcatttctccacatttctctctttgtgcaccaccatctaactcttcatctcctccggtgttcctagggcttccgcttcgctcttctccgtccttaccggattatctcttcgtcatccgctcattctccctgcagtgcacaacagtggctttgctgattgaattcgctttctcattgttcaatttggatg

SEQ ID NO: 28777 - DNA, 3003 bp, Unknown
  misc_feature (1)..( 3003): 2750-1469P.txt file - cDNA_ID_2998633; gDNA_ID_2926257; Annot_ID_143135
ttagtgtcaaatcttagtttatgtcagtattcaaacgtattgttacatctaacaggaaaaaggtaaattaaaatcttgactctaaaacctaccaggtaatatagaagaaagaaagatgtgtagattttatcttttaaaaatggaccaaatgattctgctatttcgagtgtgaggaggttgtagaaaaccaatcatattcgacaaaaaatcaattaagaagaaaccaaccaccaaaccccattcattaatttcctttgcttggaagacagctaaattaacaccaaagaaggcttgttcaaactcacagttacatttttacacggaaccatccatatacaaaaagacacacttgccaaaagctatacttaaattatcaaagttttagtcatgcactttaaaccaaagtgaatgcgacagttactataataatcttctgatcaatttacgtaactcttgtaactgttcattgctcttatttaacaaaaaggtaaacgtattatatgattcggagttgcattaccgacacaaactgattaaatattataataataagacgatggaacacaaaataaactaatatatgaaaaacattttataaaatttcaacgttttattttccaaattttgcagcggaattagcagaggaaacatctgcggattccgaagcaggaagtggattgtgatctctgaattgggtagtcagcagaagagtcgaaggatgaaaatcttcgcatgacattcctttctgtttgaaacttgaacagatcgtactcattttcgtcgatcaacactctctccgacagagatggtggtgatgaagccgacagtttcttagccttaccattgtgatcgcccgatagccagaagagccttgtcgggattagtgcgaggattttcttggtggactttttggaacggcggcggatttggtcgccggagaaagagaaatgagacggcggaggagtgagaggtggcagagtaggtagctcagaggaggggtgtttgggtgtgcctggatgagattcccattcgaaagggacggcaccggcggctccgtcgtagtagtagattctaaaggaaggacaagcagctgataccgacgaaaaacgttgtttggtcgacggtagcttaccggagaaggtggcggtgtcttgctttttcagtgagagtgaagctgcccgctcagatcccgcgtttggcattattgtcttgggagagtgagagagagagagggaaggaaagagagggagagatgtgtgcatgagacatatggagtcaatctatcatgtatatatgggtgcctggtgtctttggtacggtttttacttttgggcttatttgtttggctttggtgtctatagaaactatatattaaaagcaaaatgtaataattaatgatagtgaaataatagtttcaatagtgcggttaattagctctcatagttagaacttataaagatacatctcgaagtgtgttggtccaatcctacaaaggcaataaccactcgatggatatataaagtcatcacaacttattagacccttgaacactaagtaatgctaccgggtacaaaagaaaacactcacatatgaataatgaggagatctaaatacgtcatactcaaggcaagatatttgtatcacatgtatatagcaattaacgattcatccatgagaatatttacattacaagccaacatatacataacttcaacacaaacatgtcattgatgagtagattttattaagaaaggtgtggttattgtagaagcatttatttggagagtagataggaccattgatgaaaacaatatgaattgaataattggtttttatctgattaaattggaaaacagtgtatgactaaacgagccacgacccatgcattcctacatgtgctccacatacctccgagcattgctttccttagtatatacacactgatagaccccatggtcggtccattcttttgcattaatatctttcatgtgatattcatatactcgctcccctcatcagaatttacatctcttcgttaaaggttaaacaagaagacataattacattttcttccgtccattaaagaaaaatgagagattttttttttaaaaaattgaaggtctttaaagtattgagaaccgtgacctatttataaggtttaaaaccaacaaccaaatttctcatttgttgggttgtgaaagataatttggcgaatatcatacaaatgcgattaattacggtttaaacatctccattaaggtattgacagtatcaaaataaggagaagaaaatggaacaaacaattttgtccagaggtgtataaacttggagtatcatattcttatagcagatgaaataaaatactagttagtttatttgtttggaaaacaaaataggtaatgtgaatatagattttaaaagtaattttgatactacagccctttaattagattgaaaataataataataataaagaaaggaccaatcatatgtttgacaaaaaaaagggccaatcatataattctgttaccatggatctaaatgagaggagactcttgctttttcacaaaaaaaaagaaaaagagagagagagcagcaaccccagcagcatcgaagatcgtcgatcgtcgatcggttgctctctttcattaatcagatctaattgatacccaagcttcttcatcggaggccgtgtaagctagcttcttcttcttcatcttttcgtacacttatttgattgttgtttatgtatcgattctatggaataagagcttttagcacatattaatttgtccccagtctcgtcgtatatgcagacctatttagcgcttatggtttgatttagatctgtttaatttagcgtttcaacctaaaattgttgacaactcaaaatcggaatcccccaaaaagtgtctgttgacttatgaatatggccatctccaaatcggtttttgatccatcatcattaaatttggtaatatatagatctcacgaggaaacatg

SEQ ID NO: 28778 - DNA, 3003 bp, Unknown; identical to SEQ ID NO: 28777
  misc_feature (1)..( 3003): 2750-1469P.txt file - cDNA_ID_2998633; gDNA_ID_2926257; Annot_ID_204592

SEQ ID NO: 28779 - DNA, 3003 bp, Unknown
  misc_feature (1)..( 3003): 2750-1469P.txt file - cDNA_ID_2998644; gDNA_ID_2926257; Annot_ID_143140
tatgaataactttttcttactatgaacaccctcacttttatataaagacaccaaatccttccatcgtagattcatttcggtccgctagcattctcgttcaattagtagtcaaccagtaacaaaagtaataaatccgtttttacgtgagacattgcagagcttagaaataagagaatatcattatctatgtttagaagtttcaattcgaaagtaaaatgaggtagtgtaatatgcaagagacatgaactactcattcactaataaccaaataatctcgaggataaccatgaaaattaacaccaaaatcattacaattgtaatttacgtatttagttttcatagcaaattttgaaacttgtgattttgaaaattttatgtttggaatgacattttggtacattatattggataactatttgtcttttgtaggtgtttttaagaacagatacatatacaaagattttgttgtttattttctggttcaaccaacacctttagaatatataaaatcattagtggaattttttgctgcctagttattcaatcattagttgaacaaccggcccatatctctccgcattaagcaagattttataaagcaaatgtgccatttaattctatactaaagcattcggattaccatcgaatgattattttatacagcagtggaattcacatttttcttttctttctgtaatttcgattaacagttatatacgtatatatagtgccatcaccacctcataattttatatcgttaaacaaaaaataatttacacgttttcacctgataattacttaacggtttaaaaatgtataaatagtaacatatactattatcaacaatagttagctaggaaaataatggcgtaaagaccaagtggatgatatatctttgttttaaccacaacagtctcatattccgcaacgaccaatcatttatggaaacaaacaaacatcaaatcactcttttcaaaaagattgtgaataccattcagatcaaatatattagatagattaattaataacttagccacagtgacgtacaaaagactttcaaaacggtggtagtaaactgcctttttaactgcgacaaagaagaggttatgcataccaatattattttaccatccttaaaatccaaaacttctccttttaaggtggtgtgtatatatatatatgattagtcgataaacattgcctagattatccaactcatgatgatctagtagttgaaatactagaattcaaatctttctctgcaatggttagctactacgattgccaaaaaaagccaaatttcccacatgtcttagagatcaaattagtaaagactttgatataaaattcttatggtaatatacttatatcaaacgtataggtagattaattttgttttttttttaaaaaataacaataataattttgttcataaaattgttgttaaaaaaaaaatatactctaattttttataaccaaaaatgtaaagtagaaacgaattttaaaaagttggcttgtttgagttgtttatcttgtatatttggatttcactttggtgacccatgacttaagaaagtgaaatccaaatttgatattgggcctgttgtccattaaccgtagtagaataaattacacgcgtcttctaagtgatattttagttgtcgtcttaaatcattttttttttttgtcttcttcactgctatttaaaaacttcatgtcatgtacatatatgatatatgattggaaatatttgaatatgtgaagaatccacttcacacatggctactgttagagaagaaaatatgtgattataaaaagcctacgaatcatagagaagcaaatagaaataaggtagaatctcattaaataagactgaaagaagaaaaatatggtaaaccatacgtgcgtgtagtaggtagaagtaggacccgaaaacaaagcctcatgtctcataaactcatttgccaaactccaaaatataattccaccaccattgggggagctctctctcacctgcctaaaccggactccgatccggacatgtggtcgtctacattagacgttcttttgaagtagtataattttctacaataatagcttgttttgtagaaaaaataaataaaaaggttttgataaaatcatataaataaaacgtgctaaaaagaaaaagagaaaaacgacaaggaacaagaactagtaattaagtgtggacaaaagaaaaaaaaagacgaagaaaatgcatcaatcagataaaattgattcgaaaggaggcaagcacgacgacctactaaatagccagccacaaagcccatacttagccgagagccgagccgtgcatccattactcgagtaggacctaataagaatgtccaagtcggctgatttgacacgtgtcgtttaataatttggtatcgaaagacattactccctccaatttcaattattaattaagaaaagaagacaagaaaaagagagagagagaaactacttttgttttttttgggtaaacgtcttcgtcttcttcgtctctctttttttttttccattacttttcagaagattaaacattcctctcgccggagaactaactgctcgatagatagagatagagagagagctctgataactgccattctgtctctatctgcttcctctagatacacgttagtttttttttctttgaaaggggctaaatttcgtacacacgacctatttcttcttcttattggattttgtagagaaaactttattatataggtttctggggaatcttctgagccgtttagaacaaggatttaggcaaaaatatggtcagttagtttcttgtgctagcaattttgaatgggagattgcgacgacgacgactagtctctcctcgaatcagggtttatagttgttgttgatagagatattgaattggaaccaaaagaactcaatgatagagtagtgaattttggatgtagtgtttttctcatcaacggagtaataataacaataataatg

SEQ ID NO: 28780 - DNA, 3000 bp, Unknown
  misc_feature (1)..( 3000): 2750-1469P.txt file - cDNA_ID_2998648; gDNA_ID_2926257; Annot_ID_143144
tcttcttaaagaaatagaaaactaaaaaataaattattattaacatatactaattcatatgtctatatctaaaaaatattatattttatttttcttaaccaaaaggaaaattaacaaaaatatatatatatatatatatatgttattggtcaaatttttaatatatatggtattaacaaatgttttattattatgaattatgttttgttaattgttaataatttttaatattaactaagatatagatttgatctcatatatatatactattttgacatgaaatcattatcaagtaagataaagtgtgtagaattaaaatcgagttttttatgaaatagatagttaaattgtattacaaaattgaatgtataagataaaaatttattttttcttctaaatactaaattataatataaaaaaaagtgtgtaggttactatttatacttcaaatatcatcaataagattgaatgggtataacaaaataaaatgtataagactactattttactattcaaaattatatatcaagaacaatgtatcgattattattttactattcaaaatttaaatattatcgataaaaattacatttacatcttacacccgcctatttaggcgggccttatctagtattatatatttttaattttaagaccgttttatgctttgactaatgtttataggatgaaaggcatgatataagaatgtcaatatattgaccccataataaatggtctaatatcgctttttagatgtttgaagcatatattttttgctcaaatttaaacagaaaccaaaatatttaaatttgatattttatttatttatttcaaaatatttaaaaccttgttaattttgatttgtgtttacggtatttaaaaactaaacaaaaaaaaaagtttgataagagcttgatcagtgacagtacatggaaattaaatgcatataataaataaggcttataagttgaggagtcaaatatgggcctgatattcagaataaaaaagcccattaattaggtgaacatgcccaagtcagaataaaatctgttgttacgtcaagcaaatggaagcgggagatatatatttgctccctattggacaacttcaactcttgggcaatcgaagctttgaatatgttttgtggctgggcccattaacccaaaattagaaattaacatgtcgtgtgtcatgagaacagagaatatagggtcagttgtgatggcatggacatggttaatgcagggtgcacagggatttaacattacatataaaaccatattggttacgtctatcattagtttgggctaaaccatacatatttgttattcttttctttctttgggtgtcaaatactcatttataataaacaccacgtacacacacacacacacacacaaaattggtaagtgtacagtttttataggaaaagaagacaatttctatacctacctaacaatggataaacaattccatcgaattgagaaacgatggtcacatcttgattcacaatacattcaacttgaaattaaagttgaagagtgatagttgtccttataatatctgtatattgaacaaaacattgttactaagaatttgtgttaatcataaccaaaaaagaagaagttagaagtagatttttttttttttgaaaaaaacattaaaacaattctactcgagggagtaggggatcatgaatgtaagtgtttttttttttttttttttacatgtgaaacataataatgggaagtggtgagttgttgcttgggaatgaaacaaaggtagagtcttgagatcgtttggtaggcatgttttttttttatcctcaaatgatcatatcagtcattatccctcttttttttgcctctctattaatttaatctcccctaatttagtgagtgataataaaggagttttttttttttttttagtgagtgataataaaggagttagtttccatcaaactagttgtatgattcacagataaaaaccaacaaaataaataaaaaaattcgtacgaacaaattgaaaagaggagtgaaggtaagtaagtcaacgggaaggttgtgagatggagtgagcaccgtttacgctacttctccactgtgtgcattcaatgaagtgattctactgaaaatcttatataaactatacatgcatgatgcattgagatgcatatgtttttataattgacataagattagtaaacacatgcgtgagtggtacgactaatctaagagtagtagtgcttgaggtgtggaagctctctctctctacaccttcttcttcatagatggatcgtctaaaatcacttaagtaattatctgtataataaaagaaaggaaatgatggcgtagcaatgcatgctaagggacaagaaaggcttcgggggagagatcacttctcttctactccatcctctttgtctctgctgcttcaaatctctcatctacatgatcagatcatttaagcgtgatagactctttttttatttttttattattacttatatttttttttgaaaaagtattaaagtagtaataaaaagcggggagaggagaagattgtctcctagagcgacttgaatccttgagctttcaaactcatctcccggagcttcccttttctctttactctctctctctctctctctctctctcacttttctctgttttttttcttggtgtctgtcttaattccaccattaatgctctctaccttcccttttactcttcccctgcttttgtgttttctctttctcttttctaaaccctttcaaactcttcttcctcttctttctttttctccaataacagtttcttgtgctcatgttaaaactgcagctcttttccggtaaaaagaaaagctttttggtcagtttagttatcctcaagcatcaaaaccttacttgagctctgcatcatcatccatggccatggccgactagccttctttcttcgctttttacctccttaatatctttaaaagcgagaggaaatg

SEQ ID NO: 28781 - DNA, 1859 bp, Unknown
  misc_feature (1)..( 1859): 2750-1469P.txt file - cDNA_ID_2998656; gDNA_ID_2926257; Annot_ID_143150
ctactgtttttgtagtacatcaacaaaaaacacttgaaaatcattgaggcctgccggacaagtgtatctgaggaatatagggacaagtgagtaagcaccaaatgatccaacaggatactacaacgaatcatattgggaatactgcatagctgatgaactgttagctgatgaaagtggactcgttaaagcaagggaaaccaaatataggagagaaagtacagaccattcaccactatgataaaaatggcatgccagaaaggtggtatggactttggaggcagcatgattaagggatacaagaggtcatccttccgaaaccaccaataaacaccaacaacatgggccgtaaatgctacagagattccaattaatgccgagatatgcctctcaccctgaaatcattaaaagagacttaagactgacccatttgaacattgaatgggaaaagaaacaagtaaaagcaaaagaaaaccttcaaagctgtttgcttcttgagaatatcatttgacttgaacatgacagcagcaatccaaatggcgacaaagaaccctgagagagagatagcaggaggaaaagtcaaatagcaggaggaaatcatcagaaaagacacgagagagagagatatgaaatagtaccctgcaaatgctggcggataaaaacaaccaacagaagcaaagaaaagggaagaatttgctcaatccagcgtgcagcctgctgaatatcatatctttggtaaggcgaatcccgggaagcggcgtctccagcagcaggatcacctggagcagcctgagaggcaccttctgaagcacctcccatgggatcaacctgagtagcagaagaacccaagagttcagagtgtccgggttccctcagagcattggtatcagtttcagcatcctgctcggtgttgccaatgatcctaatggcaacctccccattggagagtcctgaagaatcatcactaacaagcgtctcagcctcatgactaggacttggcctagctcgaaagagacccgaatactctaacaaggtagaaataggggcctggatgatgttagaagcagagaggatggagtttctacgaggagaacccctaaatgaatcatgactggcgccgggcgtttccatttaagaaaaccctaaaagcatatatgaagatgattagctaacagtggtggaaagaaaacgcgttttccaaaaaacaaaaaaaaagagtacctgcaacgacgagaagcaatagaagaaagcttagggtgaaatcaaaatcgtatttagctcatatcgtgtaagaaaccctaaaggcaatgaataagaggggaaatgaatgaagaagaagaagaatagagtcaaaaagggtagaggcgatcgccaagactaggatcgagccacggagtctttcctaaaaagggattgagctaaacggaacccaggggaagaagacaaaggagatccggcgagctgcggaaagagagagagagaggggacggaattgtcttgtctcgtctgtgtgtgaatcaaatcaacggttgagagttttttagttggacgaattgcattgtggatttaatccaaagggttggttgacttaaaggaagcgacgacagtcttctctaaatgggcagcctattaaatacattatgggccttataacctaaatgggctttaatgcaagcctactaaaataacatgcgtgactacagcccccagccattggggaggaataaaatatctctctctctctctgagactctgactgagaagaaagaaagaagttgactgacatgagaagaaagggacaagagcgcgtctcgaaacgccgtcaatgttgggttgctgatactaataaatgcaggctaatg

SEQ ID NO: 28782 - DNA, 3003 bp, Unknown
  misc_feature (1)..( 3003): 2750-1469P.txt file - cDNA_ID_2998672; gDNA_ID_2926258; Annot_ID_143161
cctattgcccctgtaatcaattgaagattaaagaatgtatcctgtgttacagacacgtttgaagcttgaaacagatttaaactgactaaagaaacacagtttttctgactacccttttaaaatgcaagtgttaaatcaaataaagacagaagaaagaggggaaagtacattgaatccagcatatagaggaaattctctgaataagaaaggttggccgaaggaagaacaggaggcctgcctgccgtcctcaaataagcagctgctgcaattgttggtgcctgcaaacacgttgtaaaccctttttctagtcccgcaacttatacacagatacgttaaggaaacaaatcatcaacagatagaacaatacctttccgagaatgcgaacaatctgtttatcacgaacttgttttgacttgtaaatgtcttggccctgcacccaatgaaagaaaatcgagttggcatagccattttcagaaaaaggcatcttgacagtacgaaaagaacaggatttcaaaacttacactaagagcaggatttgcatcagggtgaaagatagaaagtgcactcatggcactcacaagaactcccattgggtgtgcatcatgaggcatggactgtatgatatcctgcaaaaacattcagaaatcgtctcagatcaaaaatccatagaaaattcttttactaagcatatacacataactatattcacaacggcgagtaagacataaggtactaatactagaaagagatccagtatccttaatagacatggtttacaagcaagacaaacaacttgtacacttgacaagaaatcattttcaaaatccctctttggtttggatttgcattctgatacaaagtttggaatttgcactagtatgaaaatccaaataacgaaagagtagaaatttcaccaatactccttgtggcacagctgaatgctgagaaacagtgaactcccaatcagctagctgactttgagaaggcagatttccatacactggagacaaaaaaaggggaattttaacacgacactaagagagacacaattttcaagacattttcttttccacaagtagacgccacaaaagtaaaataagcaacaacaacaacaagaataagcaacgagattgataaagacttactgaggagataagcaacctcaataaaagtactgctctcagccaactcttcaattgggtatccccgataacgtaagattccttcatctccgtcgatgtaacaaatcgaagatcgaaccggagccgtgttcaagtaaccaggatcgtacaacttcagccccttatcatccttccccgtcgttatctgcacaccaaacatgcaaatccatcaaattccttatcatattcagggaaaattaggtgagacgaatcaaaattcagataaaactaactcgattccacaattctgttcaggattacaaatccgttacataccttcttgagatcaacggctttaacggtaccatgctctgagacagggacctgatatttcttccccgtacgctcatcgacgatcgtcaagtttcctttgagtgatccatgaggtgcagcggtaatgtgagccgatgtacaccatggcgcgatcgccggcaacacctgttccaatccgacggtatcagacaccgccaaatgcgcggtgagaacggctaatctagctttcactctctgcgaaatctccatttcttcctctcaaaaaattttaaaaaaaatatctgaattcaatttcaaaggaaggaagcgaagaagaagaagaagaaacaatcttgcggtaagtgacttggcttttgtatcctgcatttgctaattttggtagtagctgatatttttattctctgcgggtaagtgtattgaaaatcggatccattgtttatccaaagctcgacggtgataagattattcagcttagatcaacggatagaattgttcgtcaaaaactaatatggaaagtctaaagaggcttatctgtcaagtttatcaaaggattaagactttcgtttctgaaatccacccgggcaagggcagtgaagactacgcgctcaatgagaatgacaggtggaagaacacgagcgagtgtctttcagacgctatgtagatcgagtagaagtcgattggcgtcctcggattgctaaataactatctggttttcgataatgggccaactcattggtctcacattgagaaatttaatttccctaagtgtattgatcggcccattagctctttacgcctgggctgatgacaatagtaataagaacaagggaaatggtccaatatctttgcagttaaaatttatgaacatatggaaattttatatttgtagcacaaagattcaccagtaagaggctggtaatacactgcattgggtcacaacgggccggtccattaaacccaattaactcttatgtatgagaaggaacttaaaaccccattcagtttttgatggacttgtgaacgctgctactaaaccaaggtcacttctcagttctcacaacacatatgttatgtttgcaaattaaatgcagttttataatttttagtatttaactgactatcccaaattattttcaaaatatctttgaaatttaaaaagtgattcaattatgaaacctccactcacacttttgtaccatcctttgcttttgcactaatcaaatttatttgtttgttcagttaaattgttcaaaaaaggagaaagttatgtccaacaaaaaagagagaaaaaaatgcaattagccttttaataaaaaaaggagtagtaattacaaaaaaaaatgaagtactgtagattatgatgagtagggaggaggaaaacgagtatgatacttcacccgcattaagaggcaaacccttaaagcctgctgattggttgggacttttttttctacttttctttttcttttctgttgctgccgttacagttccatttacagctcatattgcttgcggcagaaaattctcaccaagtcctctgttgaacatg

SEQ ID NO: 28783 - DNA, 3000 bp, Unknown; identical to SEQ ID NO: 4552
  misc_feature (1)..( 3000): 2750-1469P.txt file - cDNA_ID_2998676; gDNA_ID_1620714; Annot_ID_49068

SEQ ID NO: 28784 - DNA, 3000 bp, Unknown; identical to SEQ ID NO: 4552
  misc_feature (1)..( 3000): 2750-1469P.txt file - cDNA_ID_2998676; gDNA_ID_2926217; Annot_ID_142284

SEQ ID NO: 28785 - DNA, 3003 bp, Unknown
  misc_feature (1)..( 3003): 2750-1469P.txt file - cDNA_ID_2998684; gDNA_ID_1620714; Annot_ID_49087
gtttaggatcaggttgtttcccaattttatgttatcgtttagactttagatcttttttgagcatggaagggagtttagcatcattttttaagtattctagcgaattacataagaattagtcattctaacgaacttaaaacccgaccaactaataattgtgaatccaaattttcttgcagtgtactcataaactcattcttggtcaccaactatgtatataagtaagtaactatataatattgatatttttgaaacaatatactaccaaacatattcgagagccccacattcaccagacaattcgtccaacgccaatctcgccagcctttagcttaaattaccaaagggacaaaaaaaagttaaagatgaagaaaaaatataatacaatttccgttaaatttacttataaacactaaattgctagtcaaaatttcattacctatgaataatatttagaaaaaaaatactgtataagttggatttcttatacaaagatacatgactcagccttccgttacaaatagtcggaaccaaactaagaatttgctccataatctcttacttgtggcattaattagtcatttgaacgtcatttctattaagtggagagtaaaagtctgatgctaaaaaaataatcgatttactttcgcctttgtgtctctttgtatccccaccacctccttatctagttaaccgcgtaacgagatggacgggcacaactatatacatacaagacgtgtgtgtgtgtgttcatgcctatataatagctaatgttcttgtaagttataactcgaacaagaaacagtaagagaacttataaatagagaaggctatatggggaattgtgcactaaagccaaaagttctgtcagaaaccggagctccggcgccggaggagctcaaggattcacttcttgaataccataagatggacgctgcaaaatctcttagcaacttgttccttcaagtaagtcactataaaattaaaaacaagcacaagaaattatgatgttatattaagttatgttattctttgtgtctcatttgtgttttcttttggttaataggacaaggcagataagataacgaaagaagacgagaagatcacaccggaaaagataccggttactgatgatctgaaaacagctttggaggaggaaaatactccgaccaaagaggcaaaatctccggcaacagagacaaagtattcggtaacagagaaaagagctccggctgacaagaagataacaccggaaatgatgccggttactgaagatctgaaaacagttttggaggaggaggcaaaacctcctgcaacagagacaaaagctatggttgatgatcagaaggtgaagaacgaagtggccgttcgtgaagagaaaatcattgacctcgtgactgtgaaagagaacgaaacagaggcgaaaacagagtaggtgggaaaagaataaacacagtgaaacagccttgaaacgctagtttctgcgttcttgatagcaaaatgcttgtttttgtttagattatatttttcctcgatagataaacgcaaacgctgtattctttatatgaattgaaaacttcaaatttcctattgaccgatccgtcaacccaaaagaatgtcaatgtaagaggctacgaagaacgtgtttttccgttttcgttttctgcgattgcgtttcaaagagaatgcatgcgtaaatcggtgcccgttacaacactttcgaaagttttggtttggactttaacgggccgatacgggccgtattataaaaaatttgtaaaataagcaacagtttaatggaccgaacttcgtcgatcgagatctaacgggcgagtaagaaccgggtcggaaatacggatccggattctgagcattaaattgtgaaacaactaactcgacaaaccttttaattgcagcaatttaagaggccaccgaactctcgcgcctcgacatctcaattatacatgtagtgaacagccaataatatttagccacgtgttcatagtttgttggtagttataaacttagactaataaactcgaccacttctaaccaccaccggttcatggacgaccgacctgacctacgaaagttaaagtgagttctttaataaatgtgagaccaaacgaagaatttttgttagcatcaaattaagtccaaaacatgacttttattgatttcatatgattcaattataaagcagatcagataagtgatgtgtaacgaggatgaagacattaattgttatggcgagttcggtataataattcgaattttatcaacaacgtccaaccagatttatccataatggctttaacttcaagtttgaaccatgatgatgtgaattataagaagaagaaaaaatcacaacctcgcatagtcatatattccaaaaatagagaaagtgaaaaggacatcttaattatacatcatgtattttttctttttatccatagctaattgacgtgctttaaaaccgtgagagtgttatatgccagtcataaattcccagcaaataaatcggccatgcaagaaaatttgaaatcaagaatcaagggcagtgaattcagtaacgtgtcaattctgacagtaattttttctctctttttttcaaaaaaaaaaaagaaaataatcgcatacaaaacaaattatatggctattttctgttaaattttataaatgatagtaattttagtcaaccataatttaaaatgtgattttgttttaagaatttttccctaagatggcatttcagtcaacattcatatatggtattatatataatgaaaataaataactttcttaatttcacgaaatggaaaagtttagtatagaaacaaatctttagtctcttaatttactggtggcagcaataaaagggatattaatatctctatctacttctctcaactgtaactgcccatatatgtaccactccctcgagagtatcacacaacataaacccaatctctcactcagactaagacagagtcagaaacaatg

SEQ ID NO: 28786 - DNA, 3003 bp, Unknown; identical to SEQ ID NO: 28785
  misc_feature (1)..( 3003): 2750-1469P.txt file - cDNA_ID_2998684; gDNA_ID_1620714; Annot_ID_165582

SEQ ID NO: 28787 - DNA, 3003 bp, Unknown; identical to SEQ ID NO: 28785
  misc_feature (1)..( 3003): 2750-1469P.txt file - cDNA_ID_2998684; gDNA_ID_2926218; Annot_ID_142303

SEQ ID NO: 28788 - DNA, 3003 bp, Unknown; identical to SEQ ID NO: 28785
  misc_feature (1)..( 3003): 2750-1469P.txt file - cDNA_ID_2998684; gDNA_ID_2926218; Annot_ID_203116

SEQ ID NO: 28789 - DNA, 3003 bp, Unknown; identical to SEQ ID NO: 24446
  misc_feature (1)..( 3003): 2750-1469P.txt file - cDNA_ID_2998688; gDNA_ID_2926254; Annot_ID_143078

SEQ ID NO: 28790 - DNA, 3003 bp, Unknown; identical to SEQ ID NO: 24446
  misc_feature (1)..( 3003): 2750-1469P.txt file - cDNA_ID_2998688; gDNA_ID_2926218; Annot_ID_142336

SEQ ID NO: 28791 - DNA, 3003 bp, Unknown
  misc_feature (1)..( 3003): 2750-1469P.txt file - cDNA_ID_2998696; gDNA_ID_1971923; Annot_ID_58556
agaaatgaataggagacaaatgtcttaagctgcagtgactattgtttgaagcagagtttccaagtccttcaatctacaaacaacaaggaaacaccataaagttagcagatgggtacgaggaacagagagaacctttacgcataatttttgtgagaaacttcaagtttgatatatgatcctacttacttcacattgctgagatcagggtatacggcaatcgcatcattgaaattctggataaaaaaaaacaaagtttccgcctgttcttaaaccaaagagcaaaagaatagagaagtgaagaagatgttgttgttgtagaccagacctgatcagaggttgaagaagtgtacgtgatcacacatgacatccctgcttttgtagcagcctatatatagattaaaagtcaaggcattttaagattttctttcaagaatagcgaggacaagcaaaagataagacttttgacctgcaggccaatcacactgtcctctacgaccaaacagtctttcactgaaacacctagcttctgcaatcaaccaacatatacagaatgtgaaacttgggctaattcttcttgttaagttatattaactttcattttacttgggagttatattacctcggcagctgtaatatatatcgaaggatcgggttttttctccttaacatcatcccctacaaagccaaatatacaaccaaatggattcaaactttagaaaagtgtttaacacataaaatgcaagtataagaagagagagaatgtgatgaaatcacctgcaaggaagcaatcaagtccttggaaccgctcctaaacgacataaagtataatcgataaagaaaaaacttgaaagaagcatggtagatcagagattggcgaaaggaaacaacttacgatatcgattagattctcgagacataagattactgaactctttgtagctgcagaacaaacagctagttttttcccctgaaagcatttcaagaacctattctcataaagagctaaaaatacagtttagacaattataaaaggctaaaaagaagatcttattacagcagcttttgcttcatccattagtcttattacaccaggtcttggttctacctgaaagtaaaaagcagagagagttagtttctctcagagtaagtaatcccaaaactacgatttggctacttacacttcctgattttatgatttctttatacctctcagttttccaatcctgcaaaagataagaatccaatcttttaacatcaacattgcagtaaattatagatttggttcttcttcaggcaagtgacctgaagagtatcgattaacttggctcgatcatcgtcattctgaggaggagagtcaaaaatggtggaagttggccatccattttctttgaaataccaacgcattttcggtttcccacctccgactagattctgaaacttatcgtagaactcgaggctccaatcgagagactcagaggaagaaggaggacatcgaacatcgaaatgcgagaaagcatcgttgtaagcttgacggtgtagattctcggattcgagaatcacgccgtcgcaatcgaaaatcagagcttctagagaacgtaaaggcaatgccgagacaggagaagaaactctagatttcgaataaacgcttcttgatttgaaacgcagcgtttggaaacgaggaaagccgatgagcgacgaggaagaagtaacggaggaggaaccagcggtggatgatggagagaagagaatcgcagagtggttgcaagaaaccgccatatcgatgaatctctgtctctctctgggtgtgtgtggttcttctcaagataaaatgaaaaaaaaaacaatctgtggtggctataatttgcgaaaacctaattttctttacaaataacggtcaataactaacttttaccgctccatttttgtatttttgttcaaataattagttgatgaatattataggattttgaataagattctgtaaaataatacttttttgcagatataaaaaactatcatcatccaataaagacagattttttataagaaaaaaatcaagcaatcaagcatttccaaaactatgatccattaaatgctctaaacttattgtaatgattttggtaggggttgatattcgattttctatcacattaattttatttaaaatccttgtgtttcatatatataaagggaagttagtataagatggtgacaaatattaaaagggcgtggtccatgaattcatcatatcttataaaaggattcagtgtgtgtgttaggtggtgataaacacaaattagtctttagatcatatgcaacttgatgagtggtggtagatttggttggtgaaggctttttttgtcattagcccaatttccggacttccctttaaattttttttttgtcatcatccaaattttgataagtggcatcaaatttcgaatgttttaaatgagctacctaaaaaagaaatattatacgtaacgtggcataaattaagttaacaaacataaatattggaatatatttttatactttccaaattctggtttttcaaccttttgttttgttttgagctttgtaaatcaacaaccaaaagtttttaaatgttatctagtatctaccaaattttggatcggttcaatcaaattgaatcattctttactttttagcatcatctattataaaatttattttttacatgaaaaacgtttcctttaacggtggccaaaagagacaaaagcttccacgtcgcctgaaaaatatctcaaagcacacaatttacataaatacccctacgacggccaacaaccctctttttggtacactagtgttctgtctgcaaaacaaaaaactctgaaaagtcgaaaccaaccctctcccttataaataccttcttctctttccacattgtcttctctctcctcacatcaaaaccgcctccatttctcattctctctctctctaaaaaaccaaatccagagtcagagaaaatctgtgatg

SEQ ID NO: 28792 - DNA, 3003 bp, Unknown; identical to SEQ ID NO: 28791
  misc_feature (1)..( 3003): 2750-1469P.txt file - cDNA_ID_2998696; gDNA_ID_1971923; Annot_ID_177209

SEQ ID NO: 28793 - DNA, 3003 bp, Unknown; identical to SEQ ID NO: 28791
  misc_feature (1)..( 3003): 2750-1469P.txt file - cDNA_ID_2998696; gDNA_ID_2926219; Annot_ID_142368

SEQ ID NO: 28794 - DNA, 3003 bp, Unknown; identical to SEQ ID NO: 28791
  misc_feature (1)..( 3003): 2750-1469P.txt file - cDNA_ID_2998696; gDNA_ID_2926219; Annot_ID_203219

SEQ ID NO: 28795 - DNA, 3003 bp, Unknown
  misc_feature (1)..( 3003): 2750-1469P.txt file - cDNA_ID_2998700; gDNA_ID_1971923; Annot_ID_58557
aagcaaccgtcaatcatccttcacatttcatcccgccgtcaacaccaagcctaaatccgttaacctcgtcacggctgtacacgcggctgagccagctagaaacgctgtttcagtcaaagaatccgttgcgtcttcttcgtctggtgcattgaaatggactccagagagctggaaactgaagaaggctctgcaacttcctgattatcctaacgccaatgagcttgagtctgtgcttaaaacgatagaggcttttcctccgattgtgttcgccggagaagctaggaatcttgaagagagattggctgatgctgctgttggtaaagcttttcttctccaaggaggtgattgtgctgagagtttcaaggagttcaatgctactaatatcagagacaccttcagggttctgcttcagatgagtattgttcttacattcggtggccaggttccggtcattaaggtcagatcgatgaattcaatctttcttgttttttcttttgagcggaatttgagagaatttgtgtgtttaggttgggaggatggctggtcaatttgcaaagcctagatctgatgcatttgaggagaaggatggagtgaaattaccaagctacaagggagataacatcaatggtgatacttttgatgagaaatccaggattcctgatcctaataggatgattcgagcttacactcaatctgcagctactttgaatcttcttagagcctttgccactggaggttacgctgctattcaaagagttactcaatggaaccttgattttgttgaacaaagtgagcaagctgacaggtacacccaactcatcaactcaattttgaaagcaaacttttctagatgaattagtgatggtgatagcagctatcctaggttatgtaaggtgctaaaggttttgctgtacaggtaccaggaattagctaatagggttgatgaggccttggggttcatgtctgcatgtggacttggcacggatcatccacttatgactacaactgatttctacacatcccatgagtgtttgcttctgccttatgaacagtcccttacaaggttggattcaacttctggtctctactatgattgttctgcacacatggtctggtgcggagagcgtaccagacaattggatggcgctcatgtcgagtttctcagggggattgctaatcctctgggcattaaggtacttttaactttttcaaagaaaaatacaaaattcaacgcgtaggtagagcgataatatgcagcttcttactgatatacttaaaccaatgattaggtagatattacttttggtttatgataaagcaaaacagagtaacatttgagaggtttatgcttggtctcgtagcattttttgtttttttcttctcttatcttgcaaatcagacggttgattttgattgtcttttcttcagtgagagactggtagctggtttgatttgccactgaataacgagagtttattaagttgagttttaagcggaatcgattgaataaccaaaactcttgttgcaggtgagcaacaaaatggatccctttgagctggttaagctagtagaaatcctgaatcctaataacaagcctggaagaatcactgtaattgtgagaatgggtgccgagaacatgagagttaagcttccccacctgatcagagcagtccgcagatcaggccagattgtgacatgggtctgcgatccaatgcatggaaacaccatcaaagcaccttgcggtcttaaaacacgtgcctttgactcaatactggtacacactttataagctaaacctctcataagcgtaacatagatttgccataacagagatttaaacttcctgtctttttctacaggctgaagtccgagcattccttgatgtgcacgagcaagaaggaagccacgcgggcggtatccatctcgagatgacaggtcagaacgtgacagaatgcattggagggtcccgcactgtgacctacgatgacctcagttctcgctaccacacacactgtgacccaaggctgaacgcgtcacagtctcttgaacttgccttcattgttgcagaacggctcaggaagagaagaacgggtagccagcgtgtgtcttgagtccggttcttcccttttatacactttttgattccaaacaaatcttttctctttgtcctgtgactgtgagttggtgtctttatgacctaagttaaaagccccaaaagcctctctaggaggagtaaacctgtttctgctgtggacagaccatgtcatgtcattgttctttatgttaactttaatgtcaaaccgtgtcacttacactagtgtatatttctttttacatatctacacgaacatgaaacttgtcttctagttagtactaaagattgatcttcgtctttcggctattcgtaaactagaaatgaacaaatctttagaaaacgatcttccaaaatggcccattagctcagttggttagagcgtcgtgctaataacgcgaaggtcgcaggttcgaaacctgcatgggccatttttcataatatctttttttttcttctgagtttcgtcgtaaataaacaatccgacgccgacggttttgggaccccccactaatcaatatcgtgtcccgctcacttaacccaaaatatgatcccctacgtacctctttactctcttctggtgctcccaacaaccatacttcgtctcgatttccatcacgtgttctacacttctctttattccacgtgtcatgatcttggctcatagtcactctcaattaccaaagactctcacacactagatcatacaataacacaacaatttaaatcaagcagtcaataatcagccaactagctttttaattttctctacaattcctctgtcgctctcaccagttaacagctacagcacaaaactgtaaccacgcttccgatctctaaaacctgagagagagagagagagagagagagagagacagagagaagtgtttcaatagtttggcgtgaagatg

SEQ ID NO: 28796 - DNA, 3003 bp, Unknown; identical to SEQ ID NO: 28795
  misc_feature (1)..( 3003): 2750-1469P.txt file - cDNA_ID_2998700; gDNA_ID_1971923; Annot_ID_177210

SEQ ID NO: 28797 - DNA, 3003 bp, Unknown; identical to SEQ ID NO: 28795
  misc_feature (1)..( 3003): 2750-1469P.txt file - cDNA_ID_2998700; gDNA_ID_2926219; Annot_ID_142369

SEQ ID NO: 28798 - DNA, 3003 bp, Unknown; identical to SEQ ID NO: 28795
  misc_feature (1)..( 3003): 2750-1469P.txt file - cDNA_ID_2998700; gDNA_ID_2926219; Annot_ID_203220

SEQ ID NO: 28799 - DNA, 3000 bp, Unknown
  misc_feature (1)..( 3000): 2750-1469P.txt file - cDNA_ID_2998712; gDNA_ID_2926220; Annot_ID_142383
gtttcatgtttgattatttgaaaagctaggaaaaataataatgaaacttcgaaaaagatgatttgcatcttcttcttcttttgtcatctggaatttacagtaaacatcagaaaggatacacaaaactcatacaaagtgacaaagacagctacctaaaacccaaaaagggaaaactaagccctaggaaggagaagctgataaacaccaacaaaaaaaatcaaagagaaggaactggtatactaaacctgaaccattgaaccgaaacactaccacgaaaatatgatttgcaattttgcatctatagtttaaaaattataaaataaataaaattttggaagaaatgatttgcatttatctctttggatgaacagttggttactttggattcagaaggagaaagcggatcaaacggtctaaaacgaagcaagcagaacaaatgtggatcaagattttttcttaagacttttgttttagtgtatataaatgcacctcggtataagagtttgtatagtatttttatttttttgcaacttgttgaaatttgaatatactacaaatccacaagaatatataattagagtcgttgtataagagtacaaagtccttttttttaattaattccagtttggatgactgaaatctcattcgttaaatatataaagaaactacaagcatttatgagagtctttatctaagagtaggaagtctttttaaaagaattttgttgattgaaaaaataagcaaacacatggccaagttacagctttaaattagttacagcgttgcattaaacatctcacaattacaatctctcccaatttcctgaaaaagcttcaaccaacaatggatttagttaatgttcattccaatgaccaaccaattctcatcaacaaagacatgttcaccaacaatcaactatccgaaccagtcaaagatcaaaacctccatggtttagccgaaatattgactcttcagagatgtggaggtacagaggaaattaccagaccgggtcaagaccaagactataagagtcaggagcagacttgctccgtgttctgtgagatcgaggtgataggagagaggtcggaagagaccacaggagacagttggttaatatcgttaagagacaagctcgatcaagcacatagagacgacgacacaacgatctggggagagctctgcatggagacgttgaccgaagttgaccaaccaaaactcatgaacgggcaagaaaaatcattggacatacttgacgataagggcaaattgcactgtctggatgtatttcgtcagagtctgctccagtctaatcctacaccgaatcaaagatctagactaatgaggttgactaagaatacgtatgtggtggacaagcgattgcaacaactggtaaattgcgtgacagagctaagaggagctggtgtaaagttcaggagaaggaatactgaccggttttgggatattcaattcaaaaatggttatctagaaatacccaaactactaatccatgatggtaagctaaaaagttttcatttctttcctactttttattcattactcacatatgtttgtataaaatctaatttgttcaagcagctatgtcaagaagtagtttttgatctccaaaatagtcatctatctcgactgtctactgatgtagactgtttttctaaccgtaggtggaatgtttttaagagaatcttgatatacaagtaccaggtgaaccttaataatccgtgggcatatttttcattttttgctgcagttgctctgctacttctcacattatgtgagagtttcttttctatttatgcttattataagccaaacccttaattttgttttttgttttgttatatagtttttactaatatggaatgttaagtttttctgttttttttcccatcattttctattttcttcttttcaaaattggtattgtaatttttgggttttggaatgttgttgaaaaacaatactaaaaacgttgatttggtgggtaagcataactaacatctcagaataatcaagtcttagactatgaatgagaccagtggaaccggtggtttatgttggtgcatgaattaacacattcgacaataccgacttaaaccagagagattgtgaataaatcgaaaaagagaagacttccatttaaaaaaggaggatctcacgaaaaatggaaggaatgaaaattcaatctttagataattaaaagtttagcatatccttaaactgtctaaatattgtataaatagagggatttgtcctctattcaaatcatctgcaacttaatatagaaaccctatttttcttacattgttctgaagcaaaagccctaccttcgttcttaagcaaccatgttcttcttttcatctaatctttggttactttagagcgaaagaaagaagtgaatttatctaatcctttaatataaatttattatttgattttcagaattaatagtttaaaagtggtttgataattatattaccattcaacaacattttgcaaagtgtagtacacaaaataacttgataacaaatttataaaatagtaatatgttctaacaatacttaactacaaatgtttcttattttttaggaaacgcggcacacggcacaatgagatgcttttatagaaaaactacaaaagtgaaagaaacacctcaacattttttcttataagactattttcttgtagtctttctttaagactttctttcttgtagtctttctataagagcacctcaacatttttttttttttaataagagtaattgtttctatcaagagtagttgaagaaaagtcaaagaaacatcgctcgcctaggcattcattatccaatacgtttaacgattatttaacacattttaagtataagtatgattagatgtcaatattggtagttgtcattacagaaaaacaagtccaataatataagcgtccagtcactctcaaagtctcaatctcctaaaatacttcaacaaaacaaaaatg

SEQ ID NO: 28800 - DNA, 3000 bp, Unknown
  misc_feature (1)..( 3000): 2750-1469P.txt file - cDNA_ID_2998720; gDNA_ID_2926220; Annot_ID_142385
acataaactattgcagctaatttctgttttcaaaatatcaagctatacttttggtttgtttcacaaagctatacactctttggggaaaaactagtgtataatgaattacaattaaatccataaatagcgaattagcgatggacgtcaaaccaagttgtttccagcttactaacttaatcataatcgagtaattaagaacctaaagaaaattgaattttaaagtttccaccattccattttgatacgttgcgtttatataaatataacaaataattcaagaaaaaatggattcccaaataaacacttctttaaaaaaataaaagaaattaacttccaagattttaacttctagaacgttagtaaaaaatagtacatcacaatgttttattcattgctctattaggttaacacaaaattttgcttatagctcacatttcgtaaaacagctcactacttacttccttttaaatcaaccctcatttttatccctttgagaaatcttataaccatccttcaatctccttcttcctctaaaactcttctaaagaagaaaacagaggaacgagaagaagaagaagagtgaacaatgaagaacggatcagggaacacgaacacaaaactaatccttcttcatccttacatccaaaaacaaacgagcacgactcgtttatggcttctcgctttcgtctctttcttcaccatagtttttctcctcactcttctctacactagagacacaatcccttccaaaaacacctccgtcgccgcagccgtagctgcagtcgtcaccggaggatccacaccttcagcatcatctcccatctccaactccaacttaccaactagtgcaatcaacgctttgcttcactacgcgtcaagatccaacgatagtttccacatgtcttacggagagatgaaatcaatctctgacgtcctccgccgctgcgctccaccgtgtaatcttctcgttttcggactcacacacgagactctcctttggaagtcgttaaaccacaacggtagaacagtgttcatcgaggagaatcgttactacgcggcttacttcgaagaaatccacccggagatcgacgttttcgacgttcaatacacgacaaaagctcacgaagctggagagctcgtcaccgcggctaaagaagccgcgggaaacgagtgtcgtcctgtgcaaaatcttctcttctcagattgtaaattaggtctcaatgatttgcctaatcatgtctacgatgttgattgggatgtaatctttgtggacgggccacgtggcgatgctcacgaaggaccggggaggatgtcgtcgattttcacggcggcggttcttgctcggagcaaaaagggcgggactccgaagacgcatgtgtttgtgcatgactattatagagacgttgagaggctttgtggtgatgagttcttgtgccgagagaatcttgttgagtctaatgatttgcttgcacactacgtgttggataagatggataaaaacagcacaaagttttgcaatggtcgtaagaaacgttcggtttcgtctttgtcttaaaagtgatgccagaagacttcatacgtacatttgcttattgtaagaaataaagttttttccttgaagttttgctttttgtgctggtgtaaattttcgatcttggatttattgaagactttaatttaatctcttttttttttttttttttttctcaaaggccaaagcaatcaatttgatgaaacatctagggatatatataaccaaatgtaaactgaacttttgaaccaaaatcaatattttattcattcaagctgaacactaaaacaaaatatctcaaaactaaaatgcttttatgtgtgtgaataattatttattatttagttttttatataaaatgatgatcggaagcattttcgtttttcatatatattttgttttccttggctatagttaagatacgattttttgttattcatgatacacctattctaaaataaatcttttttttagttaaaattaacgaaatagaatgtgtaagattgaattaaaaaataataatattaaattaactagaaaaagtgtgttgaatacgatttagaactaacatatcatagattaaaatagcatttatttcttgcaccttctgtttacacgggttttatctagttacactgttacaatagaaattaaagttcattacaaaattttgaaacattaatattaataagtttcctttttaagcaaaattaaactgaaaaacttaagagaaaaatcgagcgtttttttttagtccattttgataattgtttttcaaaacccaaaacttcaaatctcgatccctaaattatttttccattaaatacaaaaagagcaatcgaaagattcaatgatcttgactatataacaacttcaaatgttttaaccctcttaatcattcatacttgcgtacaaaacaacttcacacacattgcatacttagatttcttctactcactacacccattctcttattagactctaaacttagcaactattttaccttacctctagacattagccttagtgttacaagcaagcaagcaaacttacacaaccttaccttagccactaaccttacacaaccttaccttaacaaccccaacaacacttaactattccatcttaagtacttggctaagatttaaacccatattacacattttctctcttgggcctaactaagcttaacagcccattagtattcttagcccaaaacaacaaaataacaatcttcctcatcctctttcacttttcttatcgttgacttctcctcctttctgtagcaatcgaaagattcaaatctcttgaaagaaagaatcttgagtaagttttcttttttcggtcaaaaacaaaagaatctaaaaatagcaagttcatcgtttgatattttagagtttaacaagaagaatcttgaaagccgtcacctacagatctgaagaatattctcaaggatagagagagaaatg

SEQ ID NO: 28801 - DNA, 3000 bp, Unknown
  misc_feature (1)..( 3000): 2750-1469P.txt file - cDNA_ID_2998728; gDNA_ID_2926220; Annot_ID_142388
ttgttttgtaccacagactttactgtgttatgttacgccagatttttttttttcgcagattttttaaccgtgactgatttgtttcatatagtctccacagattttatttaaatttcaaaagtaagaatgttgaaaccaaatctgtcactgatttgttttccggaccacagatttttctttatggtggcaacagattttctatttgcacccaaaaatctgttgtgttataacagatttgttaacctcgaaaaatgttatataggcatgacaaagttgttttgtgtaatcacagatttaattaacttgttaacaaatttggtgttttacaacagatttttgttaaaaaataaaattactacacagtcacatagtgataacagatttgtttttagtgatgacagttttgtttttcagtgtcaaagcataacagatttactcatgtcaatgttatggccgatttgtttatgactagaataacttttttagtaataacagactttttttgacagatttatttttaaaatttcgaaattttttgttatatgagatttattagctagccctcaattaaattatttccggtctgattgtatgttaaatccggtttgactagatttttttttttttttgaaaaagaaattttcataacgtcacgacagacttttattaatgtcggcagatttttacataatattgtcatatttgaattttaatgaattttattagtcatgataaattctccaagggttttcataaccgttttttttcttcttctattcctaccatcaaatcaattatttgtgaattgatacatgtcaaaatattattggtaagctaaaacaagtcaatttataatatgcaatatcaaaattaaattgtttttctttaatatttttaaaatcaaaaacgaaatatgtgaagaagattcttctttatctaaattttgttcaaaattattattttaaaaaaagtttgttctcaagttaactggattttcgtttttgttttaattatgtaatataggttttggttttcttttttatccacgatttcttttttgattttataatgggtgatttgcatgaataatactttttgagagaaaaattaagaatatagcactatatatgtaattattaagtaagtaacttaaggggtaggtaaaatgatctaaggtggtggtggtggtggttccagcgaagatggcggtggtggttccggcgacggcggcgatggtgattccgacgacggcggcggtagtgattccggcggtggtgattccggtagaggtggttgtccggcgatggtggttatggtggtagttccggcggcggcggttatccggcgacggcgacggtggttgtccagcgatggtgacagtggttgtccggcgacggtggttgtccggcgacggcggcggtggttgtccggcgatggtgacggtggttgtccggcggtggcggcggcggttttccggcaacggcggtggttgccggcgatggtcgttatggtggtgattccggcggcgtcggttttccggcgacggtggttgtggttgtccggcggcggaggtggttgtccggcggtggaggtggttggccggcggcggaggtggttggccggcggcggtggttatccggcagcggtggttgtagtggtggttagtggtgttagtggtggggataaaattgtaataatatatattacatatgttatattgttaggttgtttttattggttagtttgttaatttataaatgcttttaagttatatctgcaaattttccttttataattctgttgaaaaataatttggttttgctgatttgtcaaaattttattggtggagtgacttgtgctttaaaatataaaagatttgttttattttttattttttattttaatttgattacaattaatcattaaggttatttcgtctttttaccaaagatatgggttactacagtttttgaaactaaacgtgtgtcatttaagttatttatgttaagagttgagtcaatctaaacaaatcttactaaataaaacgtgaaaagatagccacgtttttcaaagctatcatgattaatcatggttttaagcagaaatgtgtagagttagttaactttatcgtacaatgaccattattagaaaaactaacattcaataatatgcagctcattttaccaattacaatagtttgatgatttcactattttcttatgttcatgacttctctctttccgtccagtgatcaaaagccaaaaggtccaaaaccactgaaaatacttagtatatcttctaaaaagatcgaaaaatggataaaggaaacggatacaaaccaagtgatgaattctgcaatgcagatagacatgtgaggtagggctcaataaaggcccaaatagagcgtactgcggtccctacactttgggatttttgtttttaatataatttctgtatctgtattttactgttgggattttcccgcgcagaagaaggaccagaaacgaatgtcttgactcttcgtaatttaataatttttgtcgttaacttaaagagacgatggaaactaccaaaactttggaattatcgacctttacacacccagttgtctcatttacacgcaccataattaatttaactcgtctataaaaccaacaacattactgtattttatatgaataataaaagtgtggtagacagatctgtataataataaatccgatcttgtttcaatacacacggaccagtggattaaataagaataagtcaatagaagaagaagaagaagctgacgtggctggcaaaaaaagtaaatttagagtctcgtggagggcacaaaaggaaatataaagatacctcgtatacccaaaccagagagatatcagtgaagagagtaaagcttcttcttcactttttcttctcccgaggaacaagacgaaattgagactctgattcaacttttcttctcatactcgtcgaagaaaaggagattcctcgatg

SEQ ID NO: 28802 - DNA, 3000 bp, Unknown
  misc_feature (1)..( 3000): 2750-1469P.txt file - cDNA_ID_2998754; gDNA_ID_2926220; Annot_ID_142401
tctctgcataaacataaacaccctcagtcatgtgaatatctctctcaatatgatcacaggaatggaagatcggaccaacggtgttgacattgtgtgaacatctattcgtcagttttgcaattcgcatattgaaacagcacgccactaaggccattacaagtctaaggccaaagaaagaagaagcagaggccgagacaagtgacagtggttccaatactgcaatggtaccagtagttagtgacaataagaagaagaaaatgaagttcatgtggaaagctggtattgggaacttcgttgcttcaggtatcgtagcttacatcgacggacgtttgtgccgacaaattcctaatccaattgctcgccggattgtgagtgggtttttgttaagttttctcgataaaagcagtgaacaataatcacttcctctgtatatatattcttctataatagaaccattacataaaataaaagcaataaagctcctttacgtttgttttcctcttctctgcatcaatcacgattcatcaacataggactatgagaccgatttcgaagtcttctgcatccgaggtgtgatatatcggccaatatagttttaatggggttattaaacttgtcccccaagcaaagacatgtaatttgttgatcagaagttcagaacagttttgtaaacaagattctactcaacttggcgtgaccaataagaggaataaaaatggaatgagagacgttgaacattgatcatcaaaattatgagaaccaatcaactaaaattactcaagtgattcattacaaataccttgaagaaaagtaacgttttggactgaatacgtacattcagtcagaagcagccttgtctgcaaggaccatgtatcaacagcctcaagtcttgtgaatccaactcctcttggaatctttttagaatctgtaggagaaatttgagaacattcgccaatgatccgttgtctggacactcgtccgtcttcttttctgcgtaagatttcgactttgtattgtcatcaccatctctgaaaaactactcatacttggtgatctgcaacaagttgctcttgtcatgaggccaaacatcactagtatcatccacaattacgacactttgcttatcagccacaacaagctcaagtgtcttcttactaggactttctttactggttatgactcgatctccaaagtaaactttgtccggatcaatcaacttcaacacggtctgtgcgtaagtgaataaccccattgtgtaaacatgcatagtgaaatgctcgttggctcctaatagaaattcatgaagaaaaggtcgaagtttaatgatatactcattggaatggcctttgttgaatctccataaatctagccttgaatcgacttgttcgagtagatacttctcctttttagaaatttacgaaacaagagtcgaatggataagcgtgtggtccaaatcaaggactaggtgaagcttcttctccgtcttcttccccttcttcttctcatcgagattcaagtgttgtaatctcttgacagatttatcaagtatttattataagaaaaaggaaatatatatgtggcgatctcaaataaaccgacgtacattatattgatcaaaaataataataatcaaaattgtaatttccttttttccgaaatacaatcccatctcaaaatttggaaacatctctctatatataatagacgagtagtctcatcacccacattattcatcaatatccctctgttttctctcgagtttcttctagccctagtttcttaagtacgttttctctgcgttgtttttctctcaaacacacaatggatttttctgatgatctcccaccaccatgtgtgaacgatcatgtgaagagaagaagcaagaaaggaagaacgataagaacgaagcatcttgaagaactaattagcaccgccataagagccgctcatgttgcaagagacaaagggttttacatagtctctccggaagccatacaatgcgttgagatccttagacatatgcgaaccttacctctcaacgctcgtcttattagcaaaaccgacggtttacgcgttcttctctttctctctaagaacggtaaccctaaaatcaggtctgagtctaacgccgtcattgatcactggaaaagtatcctccaaagaaaagttcactaacggaagagaagagatcattcacgaggactacgtacgaaggtttacatcatcaatggacgagtatagactagagattcacgaggatttcatcatcaaccggagagtatagggttagggttttattttgtatttttgttttaattgtaagaaactaatatctttttgtttctaatttcgaagttttacatgtttctaataatcgaaagtagcgtaattgaaagcagagtactatatgtatcaaattgagaattatggggtaataaagagatgattgattaatacggggtcaaaaacataaaaagagtaaaacttgtcctggtttatctctcgtgcctcagctttttttttttttttttttgaatttgtatattttttttttgttttggttttatctccgacaaagaggcagtgagtaggggtagggctttccttttttcccgacgattcgttccctcgcgcttcgtcgtctgacatcagcgcacgttagccaccgtcgtcgatatcatacgcccaccaccgccgtaggtaattttgcgccccttcctacacgccgtttcgagctgatttaaaagcgaaaacgaaaccctaactcgtcgatttttccatcacttaagctctgcgtttgttcgacgctggttttatcaaggatcgaatctgagaattgattgtttaattttggtgtttttgattcaggggagattcttggattgattttccagtttttgatcaattcgtcactctagtagatctgaggcaatacactgcgaacaaatttgactgggagaagaatcagatctaggtttaaggtttgatgcgttggggatg

SEQ ID NO: 28803 - DNA, 3000 bp, Unknown
  misc_feature (1)..( 3000): 2750-1469P.txt file - cDNA_ID_2998758; gDNA_ID_2926220; Annot_ID_142402
atcctcccttgagccgagaagctaggagccaccgttaactccgccggaccaccaccaccaccaccaccaaactgatccggcaacttaaactcttgattcaccatcggcggtgaactctccgacacacgccacatcttcaccgatctatctaaactcccactatacacaatccaccgtctctcaccggaaaccgattcttgatctctctccaccgccaaacacttcaccggaccagcatgtccggtcaaaaccgaaagacaaacatgctcacctccaccttctggtctcctccacacacgtatccctaaatcagcagaaccactaaacatcaaattccccgccgcgacaagacaaagcacggcgagtttatgacctttcaaaacgccgccgtttttcatattattctcacgttcccaaaaattaacggttccgtcagacgaaccacaataaactaacgtcgcgctttgatctacagcgatcgccgtaacggcacagtcttgtttcaataacgtctcagagaagaaatgtttcgtatccttcgcttgatcttctcttctccaaaccttaaccgttccatcagctgaaccggtaaaaaccaaaccgtcaaaaccggaaacgacagcgtttaccgcatcttcatgagcgttcacagattccacacaccgcaaatccgaaactctccaaaccttaaacgttttatcccaagaaccagagtacaacaaccgtttatcttcgcttaacgcaagacaagaaatcgcgtctaaatgacgaaaccctaacgcagcactgctacgattacgtcgcgtgaagttgaagtaagaagaaggaacaatggagtttcttatataatcgagaaggttaggcattgtacctacacgacgatgaacgtttgattctttagatgcagctttccacacacggatcttaccatcttgatgaccggtaaagattttatctccagcaagaacaatggctttaaccaatccactattcgatttaaaactcgagaactcaacatggtttttccaaaccctaatgttcttggaatcagatcctgtgtagagtaaatctcctgatgtagctaatgaatagatatgaccttcttcgcgaacaagtgaccccaagagaatattaggagagtggttggttgatttttctttggttgtatccgtcgtaactttcaccgaatgatacggagaatctacggcggatggatcgacttgaacggaccatggtgatttggataatggtgaagaggagccttcggagggagagatatctacgtaggttatgtcgtaaatgtctggatctggaatagtttctactttcgttagttttgtaaatgcttggctatttacgtctctgcttgtacctttcttatgcattgaagacataagaagaagatgatggactttttttttgttttggttggatttataattagacagagttttaggttacggagaagaagaaaaaggttggagacgatggtgtctatatggaatttatggaatttttactttccatttatagtttattcgaaattggaaccgtttatttcggtacaagtacaacttattattaggtttgattaaataatttaatggtcctaaactcgtaagtaaattaaaacgaaaaccatctttccgttgcttgatagttcatacttcatacattttcttcttttgtttcgttgccattttatattaaaagttaaaaaggaaggaaaaaaaacaacaatttttatatctactcttatacatatataacgttcaaaatctgatagtagaataaacatgtattgtgatttttaatttttaaccatcataacattagaggctggaagaagcataacaataaagcaagaacaactaaaaacagaatgaatagcgaaaattaatggctgagcttcttcttcgatgcctgggtatagccaagatggaccatgaaactataattggttcggaatatttaattgttgactttttttttatatatatataattattggatagaaaaaaacccaacccatacctcaatctttattatgtggagtaacatatgacttgttggagtataattttggtggaaaaaatttgcagataaaccgttgccatttgacaaaagacacttctccaatttaatttgttgatttatatgttaaaaatttgaatttataacatgtaaattgatttatatattaacaggttttctcaacttattcccaatagaacactgatttggctatcgttttggttaatctttttagatgtttgagagattttgtgcaaactggtaataagttcttttttttttcttttccactttgtctttcattgataacattaagttcttacaaaaagttgatcagtggactttccacttaaacacataagaatatctaacaatttttcatagatgtctttcacataaaataatagtaaaagtaaagacatctcaaaaatagatgtctcaaatgtctctagaaagacaatttaaagacatctttacttctctctcttatttttttattcttttatatttaaaaatgggtatctaaagacatccacaaaagtaaccaaagtggttactctaaggcaactagagctattacaatactgaaacagaaactaaaacattgctggaattgaagttaagaaacataaacataagtaggagtatgtcctaaccaaaaaacatactcatctaataagttcaaattaagttaccgacgttaattttttttttctttttcttttgacaatatcctctacaaaaactacaggtagtctcgttagctaggaagaaaacggcagataagtaacttcttcatcgcctacacaagtctacaactgagttaccgacgtaagagactgacacgtgtccataaggtttcgttctccgtgacttcgtctttgtcctcttgctttcccgctcttatcaactcgtttaatggccgaatcgttcgatttcaatcacaacaaacactaaattcgcatg

SEQ ID NO: 28804 - DNA, 3003 bp, Unknown
  misc_feature (1)..( 3003): 2750-1469P.txt file - cDNA_ID_2998762; gDNA_ID_2926221; Annot_ID_142411
gaaaaaaaaagaatcctgattgcttttagtgtaaacgaacagaggaaaacaaaactcaattgagagttaatgatatcatatcagtgtcaactaatatagtaagttaagaaaaaaattcatataaaatctagttatagcattatcaaaacataaaatatttagtaagcattttatgtcaaaaataatatatactcctgagtccttgcgtaatcgaactctgaaaaaacccttgatgcattcgaaagcatgtgtcattttgttacatctcttggattatacgaaccactaaatactcttatgcagtcacattaatcagtaatcacgtattactttattttatcaagtagtattaacatagaattcttatatagttatatggcatgattgttttgaacatagaattcttagtaaaccacgcgctaatatatttggttctcaactatgattgctaaaagaatgcatgttgtttggtagatttgctcaatgaactaccacaatagtaacatttattcatattctaactatataaactaatggattgacccttttgaaatggactattttagttataatattcgattaattgacatgtaacatataatatgcagagaggataattgaaaactaattaaaaaaaaaagagtgttgctacttgttaatgacttcagcataatcttcacaactactaacgttgataaaaaacaccccataattacgtatgcgtttgattaatttttgctacctaacaaaattattttttcctaattaaattacacaaaaactggcttttgggtttctcaaatcattcatgacccatgccataaaattaaaatatactgtattatcataggctgattcaacataaattgactacttttctcatcttttttatttgcgaacaatttaacttattttatttggactaacccatttatattattctattgtgtaactattactcattagatctcatacttaatgaatttgtcaatctaggtttatactctatactaatattttaactaaaataaattgaagcattcgcaaagcatccatatgattcattcaccgccagaacatagaacctagttcatttattataacctaaagaaactttaattgtttttatgtgttcccaagaatattaaaatacagtacacaagtttgtcgacgagtctttgcgtgagttttaactaatcaaacaaagggggctgcctgaaagaattgaattcgatagttttggaattcaataaattgagtatgagccacgtggaattcttacactgacacaacaaaaactaaaataaaaaatatttattggcgccggatatgattgggaaacttcaaactatgcaaccatgtgttattggacccatttgcctctttaagaaaattttcaacatttaagcctaacactagttagattttttaattttaactaattacatttgcatgttaatccttccttaaatgctcatttactataaatttatttttggggatttggtacagagcagaaaatattaacaatgaaaagaaatcatgattcatttttgattatatcaattaaaaataagttgaaataacaattttaaatgtaaaaataaaaattaaaatctcccaacctttttttcatctcaaatatttaaatctatcttttacagtattgtcctagtaaatctgaaaagtcagaaagtcagaatattcaatctaatcacataattataaagtttttcatgccattcgattttgtttcttctattgcacaaattagtaaaacagaataaaaaatatctattaaacttaaaattttggaaataaatacacatcaatctatatattccacttcaattctatttaacatgaaaccaaaaccccaaaaaaacttgatcgatatagattccacttcaaatctatttatgataagaaaaataaattagaatcaaaattagattctacgccccctaattattaaatcaatagaatcaaggattatttttttatcaagttgattactattttccttagtagacacctctttggaaaatgttcttacaacattaaagaatgaatcaagtaataaaaaataaaagcgaagaactcgtgaccgttcatattaatgatccaacggttacaaaatctcatgacaaaatcactaaagcccagattttcatataaatattgagtggcattttgcgcgttttctcatttttctttttaattttttttaatttttctgggtttctttctcgaatcgaaaaagggaagaacagctttatttttattcgaatcattctcgatcctttttttttcatcatcagccaaaaaaattcagtctttttcagaagaagaaagttgcgaaaaagagaaagaaataaagagaaaaccaatttgaattatgtttatttccaacctaaattctcaatctttcttcccaaaactctaaaaattgtctatttttagtaaaaattcaattccgtcttcaagttgcagagattttagtaagtgaaaggtgagtttcttcaacttttgatctaacttcttcttcttcatttcaaccatttattttctcagatctaggtccattttattctcgattcatagccccccaaaaaaaaaactcctgctttgagttcattactaaatctccaagttggtctctttgttttcaaaaagcttttagctttgattttgataatgacttttagttactgtatctatctaatttaggaaaaatgaatttggacaattttggagtaacaacattttgtgttaattctttagaaatcacacattttgtcctctttgttgaaaagtctctgttgtttaattttcccgtcaatgtccagagaggtctcccaagatttacgcaactaaattaattgatatttttggagtgttaattaagtcattatggagtatttgattttgatttgttatggataagatttttgatttcctggtaacgtttctcttggcagttttttttgttgtttgaagatg

SEQ ID NO: 28805 - DNA, 3000 bp, Unknown
  misc_feature (1)..( 3000): 2750-1469P.txt file - cDNA_ID_2998766; gDNA_ID_2926221; Annot_ID_142412
tcactttctccatctctactcgcatcaaacccgcccctggtcacggccttgcttttgttgtcgtcccttccattgaaagtgacggtcctggacccgctggatacctcgggatattcaacaaaaccaacaatggcaaccccaaaaaccacatctttgctgtcgaattcgacgtttttcaggacaaaggttttggagacattaatgataaccatgtcgggattaatatcaactctgttacttccgttgttgctgagaaagctggttattgggttcagacaggaattgggaaaatgaaacactggtcgtttaaagagttcaagctgagtaatggagagaggtacaaggcttggattgagtatagaaactccaaggttacagttactctcgcgccagaaaccgttaagaaacctaagaagcctttgatcgttgcccatttagatctctctaaggtttttcttcaaaatatgtaccccggtttttctggtgccatgggccgtggcgttgaacgtcatgacatttggagttggaccttccagaacagtgccaagagaatctaaaccggttctgttcggttatgctttttctaatgtatcagaaagttgtaaccggaatgaataaaatagcaaattttgttgttttaattgtttgtatttgactatttacacagtatcctatcctgctaggacctgtgcacttgttgttatgttgattcttcattctaaaagattctaagtagagacctgacacacagaaacatcacaagactcgtttcaagaatcaaaaattgatgcaaagcagagtagttacttagagtagaatttcaatggaaacatctcataacattacacagatcagtgtttgactaagcagtgtgataaaaattcaaaacttcatgtcgatctgcggtgggaacagtctgccacggtgattgaatatcatgaaatccgaattatctggtaaaaacaccgccctgcaaattttttgaaagaaaccagttaacaggagatattcactttatctagcaaaagccaaactcaaaaccaattcaagaacctaatgtacaaaaaggtaggggagaggctgcgacatagaaggaaccaaagtgggtctaaagagccaatgaaacaaatataaactgattgaattagccaggagcagaactggttaaagctcttgaaacccataatcgtaactggaccaaatataaactagaaaatgtccctttgaatgtcctgcattttagaaaaccttagctgcacaaagtattaaagaaacatcaatgtttgacctagaacatctctagacgacagtttcttatcaataaacatgagtctttggtggtcattcaatcatcgggaaatataataactaccaaatttccatgtttcagattgataaacactgatgcacaacagagagttaaagagacatcaaaactagaccctcgaaacatctctagagcacaagttctttgaatcaattgattaacaacacatccgtaaaccttctcagtcaaaagaaaacatattcactagaaacacccatgattaaactgaataattgaaccaaatctagccagaagatgcttctataagacccgtagtaactctacaccaagttcaacaaagtacgaacagagaaaaattcaatagtaaaaacactcactagataacatgaattcagattgattaacactgatgcaaaacagagagttcgagagaaacatgatcacaaacctgttttcatcagaatccggatggatcgagagaaatttaccagggaaagtcaaagcagcccacatacacagagctagtccaatgatcaactccagaataaccttaaataaatccaatcatgattcatataaaagcataatcattgctgatataattcaaacacaattgaggaaaagagaaaccgttatcattatatactcacattaatcggtggtcgagaaaactcttcctccataatcttcaacaatcctctatctgaaataaacaagagaaacccaaatcaagatcctatctcgaaaattaaagtagatctgactcaattggaactggaattggattgggaagagtagacatacattggattgttgaataagcggcatgagaaagaataagaacgccgaaaactccaactaagaaccccaaattcatctttagaagttctcttttttaattttcttcttctctaagttgattcccgatctggattttctcgtcgagtattctccgtcgagaatcgaactagaatagaagacgatcagtggagtttaaaacggcatgtagttataatatcgcaaatctcaaagtgaaaacggcgcaacgtctaatatcgaagagactaacaacggcgcgtagttctagattgatgatatcctagattcctattaatcttttgtaacccaaacttttttttaagtaactaatatttttaattagatgaaagttcagttagtttgataacttttttacaacaataagggtttatcttttgggaaaataattattttttcgtataataaataattatgaatatttatttagaatttcatattgatgatatattcatatgcaaacaaaaatttctgcaattattgaattgaatcgtatgttgataacttcgtataaaaaaaacggaaatctattttagaacaaagaaatcaaatggtaagatattaaatttctatttataaaaaagtaagaaaaacatgtagcttgctttggtaccgctacctaagaaccttctattcctttcttgtgtttgctaaaaccagaaagtaaaactgttatcctcacctctcttttacttttattttcaactttcccccataacgtttttaataaacatttacgtaccctcgccacactattaaaataagtttaaaattacatcaaattttttaattcttcatataggtagatttttgttttgattctcgataaatcatataataatataaattaattgatatgatgttaagggaacatg

SEQ ID NO: 28806 - DNA, 3000 bp, Unknown; identical to SEQ ID NO: 28805
  misc_feature (1)..( 3000): 2750-1469P.txt file - cDNA_ID_2998766; gDNA_ID_2926221; Annot_ID_203294

SEQ ID NO: 28807 - DNA, 3000 bp, Unknown
  misc_feature (1)..( 3000): 2750-1469P.txt file - cDNA_ID_2998778; gDNA_ID_2926221; Annot_ID_142416
tttaagataagaaggttcatgccgtttcatacatcagcagacatttttttattttattttgttcctttatatattaaccaaatacttaaaacttgtttcttttagatagcatacacttaatatatattttcgtacatcgtaaacaataaacaaatgttgttcctttgtcgctgtcatatgaaaacaaaagacaatttgattcagggcaaataaataaacagaagctatgcatataggacaactgcaacatttgttactgtttgattaatgaatagaaaggaaaaatgatgtcataaacatgtataagcaattgcctaatctttgattttttttctactacatacgttctctaaataataacacatcaacgatattagcataaaaccacaaactagtatattacttttttatgggcaaaaaatattatattacatgtataatgtattgatattttcgatttttttttttgtcgtgatattttcgatttctattaacaaaacaagtaatacaaaatatcgtgatgcacaatccagtcctctattatctaatacacgaaattgaatgtactaacataatacatgatccctccagattttgtagaaaaataaaaactcgaatatttctatccacaaaggcgtatatacaagagttttatgtgagctccaccaaaaaacaacatatgaacgtaattaaaattgtatatttaaatttcgtccaaatcatttgctgatgcgaaaacctaatccagcacttataatggataataataataattatatattaataaagaagatatatccgtcagcaacattataaaaatgtagaataaagttgcatcaggatgacgaggagagtaaaggtgagaccatgaacttaacaaatgccaagtgtttctgactcagctttgaatgtgacgtacacaaattaccgctttttagtttttacatgcaattaccactaattgtttactaatttctgttataaacatatccgaatcagcaaaaaaaagaagagaatcctaatatcattaatatggcaaagtttagtagatgccgttcgaaaacttctacactgatacgatacatgtggttatgagtctttgacttgtgagatttttaggacgatatcatgaaactgtatgtgcataacaagcatgaatcatgatcagaaatgatgggtgatgatgatgtatgattaatgtgtagggtattatgttgacatgttataattagtaggaccggtccacctcaggcccacatggcaatttttgtctctgtttggattgcacggcacgagtctcccccacaagtacagctggaaaatagaatggtcttcttcttcttgtgtagttgtgttccaaaatgaataataaaaactcgctacatgagacaaatatatatattcctttcccatattttcactgatttggtctaaattctctattatttttgtggggtttaatatgaattcagattataaaaaatcatatacgtgaagtatatgtcttttttttcgtgttgaacaatatttgattattgcctaaaaattatttgtgaaattgaacttcacagcttacctaatgtttattttattttaagattggttatatttttgttattttcctaatttttataacatcattatatttatctgtttactttcttaatttataaattactactctcaaaacatgttattttgatttgttaatatccttttctttacaaacacatttattttctctatgagttttctgcagttaaaataaaaaaacttttcataggttaagctcctttttcaaaccaatctgataataaagaatgtcaaactccttgaaaagaattaggtaacaacttgtaattaaacaatgataatatttgtaagtaaattctgacttttcaaaatttgctcagtcgccgcagccacacgtgcaaccatgtttccaccttgtttcgtttcgtttcgttttacactcctcagaggagaggggctgagaagagtcctctctatgtacaaggaagccactaatcatagtccaagtctccatgaaacgtttttttgaattttgactatttctcaaaataagttggaaacttatttgactattccattttgtttcagtaaattgtcaaacactttgaacttacacttattaaatgttaggttgacttgattttttatatgatcaataaggctgacttgattttataaaataattctattaaagcttttccgttccaattttctatacatacttctactgtttttacatgttgaaattaacaaaaattccttaaaatttttctaaaaccgagggtaagttaaagaaaaaagaataaaaagggaatgagcgtatatgggccgctattggtttgactaggcttcattcttgtgggccggaagaagatttgagaaatgtcttgaaaactccacacagttctacaaatttttgcaaatgaccactaactaaagttattattgccttaaacaaacaatccttaccagtacacttatacaccaataaaaaaaatctcttttgttttagaacacaactacaaaaagtcaaaaactataacatgttgtctcagattcacctttactatttttctctcatacgttgcatgttgctatctttctcgtggttatttgagtaattggtattttcttgttaccactttgttcatatctagcaatcacacatatgacacatctacttgaaattaatgacagttacagttctaaagaagcaaaaactattgaaaacatgttttgtttcttcttattattatcaattgacgttttgttgatcactttgggccttgggctgccaaggaaagttatggatattttgataacatctgaggtaccatgtttaaaaattaaaatgaccgaacctgatgcaatcgaaccggttaattaaacagaaccggaatcgttaaggaaataacccaaaatctctgaaacacacgccacgagaacaattacttccaacggagaatg

SEQ ID NO: 28808 - DNA, 3000 bp, Unknown; identical to SEQ ID NO: 28807
  misc_feature (1)..( 3000): 2750-1469P.txt file - cDNA_ID_2998778; gDNA_ID_2926221; Annot_ID_203300

SEQ ID NO: 28809 - DNA, 3003 bp, Unknown
  misc_feature (1)..( 3003): 2750-1469P.txt file - cDNA_ID_2998785; gDNA_ID_2926221; Annot_ID_142421
ctattctattcttcttcaacactgcaaaacttgagataaaaatagagtctttcctcttgtttttctctttgttttgctgattgtatctcactaagctgaagaagcaaacaacaatagaaaagagatgcgagcaattcacatcgtgacgacgcgattgagctccagctttattaggcctgttcttcttgacttcgtttcttgttcgcctctacgccagttctctacccctaggcgctttatctgtgccgcgagcaaggtcaatggaggaggcaggtcaggttcgattgttgctccattggtagtgaatgaagaatttcagaacatcgatgtcaatcctcctaaaggaactcgtgatttccctcctgaggatatgcgactccgcaactggctcttcaaccacttcaaagaggtcagagaattacatgaactctatgttttgtttctgcaattcttcttttggttcgatgaaattttgaatactgtccgtaaagtttgacacttttatctgtttattttgctttgaaggtctcacggttatttgggtatgaggaagtggattttccagtactggagacggaggcattgttcatcagaaaagctggggaggagattagagaccaagtttgtctttctacgtttcgatttcattcgttttacttagcttcattcttaggatctttacttgcagtttaggtagaatttggggaagaatttagttccttagcttaaactcttgcaaccttgttgtgtagctttactgctttgaagataggggtaatcgccgtgtagcattgaggcctgagcttacaccttctttagcgaggcttgtcatacagaaagggtaactaatgcagaattttctctcaagccttgagaattgtccttattcttcaatgagcggtttatttatttttgtttgtaaaaattctgtatcaggtaaggatgtgagaatgttgattcccatattctttttggtccagaaaatctgtttcccttccattgaagtggtttgctgttgggcagtgttggagatatgagagaatgacacgaggaaggcgacgtgagcattaccagtggaatatggatattattggtgtgcctgaagttacagtatgtatctctcatacctttaatcactttaggccttctagttttttgttatatgaacctgatctgtgtttaaagtctctataagccggctaatttggttcacaaaccttttcttttaggctgaagcagaactaatttcatctataatgacattcttcaagcgaattggaatcactgcatcagatgtgggttttaaggtttcaagccgcaaggtatttttgcttacgttctcttttgatgtgatatgatcattttgtttcttggtttacactctagatacagaaccaagtaactcacttgcaatgctaaacatgagttgagattattttgcacgatctgcagcatctgaatatccactgtagctaacatctcccataacttcttccttgtacaggttttacaagaatttttaaaaaagtatggtgtacccgaagacctgtttggaagagtttgcttcattatagacaaggttagcaatctaaacatcaattaacagctgctttgttgccagaattgggacaagaagtagagaacatcgtgtgtgctttggacaaagatctccaaggagctgcaaccaccattgcaaccgctcttaaagacaaagggcaaaccgttgatttagtattggagagtaaaccgctgaaatgggtgttcaagagagcggctcgggtaaacgcaagaaggccggttctggttgggaagttggttcggtcagtgtcaaggttttgtcttcaggtgagcaatttcaagtcaaacttgatgacttggagtagtagtatctaaggcttgaacaaattgttcaattgtcctttttttcaaaagcaattgagttgagattggatttttattttgtcctcaaaggtttcattaagaattttattgatggatcttcaatactcgtttattcgtctaatagtgatttacaaaatatactttttgacttcgaatcagccacatgtggcatgtgatttttatttcaaaccgagaaatgctaaaaagaaaagaaaatgtgcctttcgtgaaccttaagctacattatcacataatcttcggaactagaaaaactcttttgctccagttttagtaatgaaagaggatgaacatgatatgtttatatttcctaaaagctcaaatcttatcaacactagaatgagtaaatttcatataatgaaaattcatatcgaatgtgattgactagtggtatcaaccacacatgtttttaactttttgacttgatcatccatctacattatgatgtatcaatgtatgttttttatatttgttttcatgcttattaaagccatataaacatattttggtagataattccagtatttagccaacaaaagaagaagacgaagataattttagtgtttagccaaaataaaaataaaaagataattccagtattatattctgattaacaaaagacctaaatttcactaaagagaattaatcttttggtaaaataaaaaaaaagtaaagaaaattatcttctttaactttttgtttttttttcacctatgagtcagtttggtccctctctctctctctcattgtggacatcttttcaccatcgcacaaataacaagcctcccaaccccgatcgacttatcctcctccttctccggcgaaatccattaactctccgccgcgaaaaccacctttccagagtagtatcacactaagaattctaatgttgatccgccattattgaagcttctaattctcgttaataaccaaaaacccaagtcgattttcaaggtcagtactcaaaatctgggttttcgtcaaaatcagaaactttccttgacaaattttaacaaatctctttctcgttttctattgaattctccagtagcgcggtagttagttttaggtggaagaagaatg

SEQ ID NO: 28810 - DNA, 3003 bp, Unknown
  misc_feature (1)..( 3003): 2750-1469P.txt file - cDNA_ID_2998789; gDNA_ID_2926221; Annot_ID_142422
aattctaatgttgatccgccattattgaagcttctaattctcgttaataaccaaaaacccaagtcgattttcaaggtcagtactcaaaatctgggttttcgtcaaaatcagaaactttccttgacaaattttaacaaatctctttctcgttttctattgaattctccagtagcgcggtagttagttttaggtggaagaagaatgacaactactgggtctaattctaatcacaaccaccatgaaagcaataataacaacaataaccctagtactaggtcttggggcacggcggtttcaggtcaatctgtgtctactagcggcagtatgggctctccgtcgagccggagtgagcaaaccatcaccgttgttacatctactagcgacactacttttcaacgcctgaataatttggacattcaaggtgatgatgctggttctcaaggagcttctgggtatgtaaaccacctcaattctgtgatttttatattaaaaggctttgatgtgtttattgtgatgtttggtttagcgatttttagggttttcattctattgcaatggctgcttttatgagcttaatgaatatatgaaactgaaccagtagatgtaagtatgatgtgtggatcatacttttacaagcttgaatttggctctcctgatatgtattagtctaaaatctactaataatctgcatatttgaatactcatctttcctatccttattgggacaaaagatactgtttaggccattgtctttgtgcgttaatttttgtgtggaagttgttacatgtgttctgtgtagtttagttgatcatataatctatttacagtgttaagaagaagaagaggggacagcgtgcggctggtccagataagactggaagaggactacgtcaatttagtatgaaaggtcttatctctttctctgcccctattatgctttcatctaaatgcctttcaagtttctagctatgaattgtgtggataatgcctcttaagattggttatacatttaactgatattatgttcgtctggccttcctttcagtttgtgaaaaggtggaaagcaaaggaaggacaacttacaatgaggtacggtagtttcctttttaaacaaaaagcttcacagtatttatgctttgcaagatccattcacttctgtttatgttatatgatgatactgatttattgtgcttaccagtgtgattaaacacttgtcaagatcacatatgggaatatcaatttgtctcatgattagtactgcaaacgtgtagctctgtaatacggtatctaacaggtgatagtactttcaggttgcagacgagcttgttgctgaatttgcacttccaaataacgatggaacatcccctgatcaggtatgcgtttcttcgatagtttctaccctggaacgtgtgcaatactcgttgtgaactctgatgaaattatatcatgtgaaaacgttttaccagcaacagtatgatgagaaaaacataagacgaagagtatatgatgctttaaacgtcctcatggctatggatataatatccaaggataaaaaagaaattcaatggagaggtcttcctcggacaagcttaagcgacattgaagaattaaaggtttcaaccacatattctatgtgcagatgttccatagcttgtttagagaattttcctgaatttgaattattttgttttgcagaacgaacgactctcacttaggaacagaattgagaagaaaactgcatattcccaagaactggaagaacaagtaatgaacatcatcgatactctcggcttatctgcttcctgttacttttatcatagattcttacatggtccttctatcatctctgtgtatgtctgaaagtatgtaggccttcagaatctgatacagagaaatgagcacttatatagctcaggaaatgctcccagtggcggtgttgctcttccttttatccttgtccaggtaaacttcaccaacagcttcgtatgatcttagattgatccacaaggaaacctcagaaaaatgaaaaaatcacctgattgttgttgtttctctgcaccagactcgtcctcacgcaacagtagaagtggagatatcagaagatatgcagctcgtgcattttgatttcaacaggtaaaatccaaacaccagatttgatctcttttcagctaatatatctatggaaccgattactgacactgtgacaactgttttcactatttgcagcactccatttgagctccacgacgacaattttgtcctcaagactatgaagttttgtgatcaaccgccgcaacaaccaaacggtcggaacaacagccagctggtttgtcacaatttcacgccagaaaaccctaacaaaggccccagcacaggtccaacaccgcagctggatatgtacgagactcatcttcaatcgcaacaacatcagcagcattctcagctacaaatcattcctatgcctgagactaacaacgttacttccagcgctgatactgctccagtgaaatccccgtctcttccagggataatgaactccagcatgaagccggagaattgaaacacgtatgaaggccccttgtacaatttctgtaaaactgtaaagtagctcttgaaaaactttacctggttttttgacgaatagtctgtttagcggtaaatgtaccggtggtttatcgaatctaggatccttgtcgggtttagcgattttaagaatctttgccataggaaaaaaaaaacactttgctctgtggtgtagaaatgaattttattaaccatttggattagtccatgttcggttctgttattcggaaacccggttatggacttcaattttggaaattacgaaactgaactaatcgatttccggttttgttgaaccgaaatccggttaaaatattaccatatcaatcatatcattagaaatgtagttctgtttcatgtaattcggtctgaatgttaataaatgctgggaacatcggagcttgagaaagtccggccatg

SEQ ID NO: 28811 - DNA, 3000 bp, Unknown; identical to SEQ ID NO: 27764
  misc_feature (1)..( 3000): 2750-1469P.txt file - cDNA_ID_2998800; gDNA_ID_2926221; Annot_ID_142425

SEQ ID NO: 28812 - DNA, 3000 bp, Unknown
  misc_feature (1)..( 3000): 2750-1469P.txt file - cDNA_ID_2998804; gDNA_ID_2926221; Annot_ID_142426
cgactcaaccaagaataaaaaatgagtaaagtcctttcacttactttggtggcgttgtcgtttttagcaactggcttgaaaggacaagctggaggaactctcgctggcttcctgtactcccatccgagccacgcgtacaatttagcctagtttattttttagcatgaacagacagtacttgagttaacaaatgttcacaagtaaatactacctgcaagattcactaaagcactgttttttttttcacttaaaaaagatacagtctaaagaaatcgatatgaaacaccaacagaactaagatctaaacattgctaacatgttcaactttccaagagccaacctcaagcaaataacaaaagctatatagctcttcgtttttcacttttacaagcaaagattatgatcatgtgctctctcgcttatcctgattatcatcttcactatcttcttccctttctaatctctaattttgttatttctttcaaataaagatatctcctttgagactaaacgaattccacactctttagaaccctaaaattcgaaatttggatcctgacatttaatttcccatgaaatctgatcattcttcccatcaaaattccaaggaaaaatcaaaacttcaaggaatattaagaaagcacgagtcaattaccatgaaataatcgatgattcgaggcattaaattgatgagcgggacgaggaacagaggcaccaaacacataacgcaaacctacaaaattcaggaatttcttcaaacaatctgaaatggaagccgcaagatagacaaacggaagctagatccataaaaaaaaaaacaagcgatatcgaacaaatcttaccatgttgaaattagggttcttgactcagggaattgggaatttcgaccaaaagatgaaaattggagagagatcacaaattatgattgtagttctctgaagtcgtcgttgcttttgctttatgactttaaaaatctacaaaagaaagcaaacactctgtatcagcgagagagttttgacggcgttaataaagtaacgtgcctcttccagagaagataccgaaaaatccattattattttgacggcgttaagatatcaacgtggctttgacgctccacaaacgtgcaataccataaaagcccttttagtattgttgttgcaagtttggtgtttgtgctccatgtaaaccaaacatactgataagagattatttatgataatcttcattcaactttagtacatgacaatgtggaacatcaattaggtcccaatatggtttagtagggtttaggcgcaatcgcccttgcaaggaacctctgcacagcggcagaccggttttccagaagcttcccaaccgttaaagccgcgttccaagatcatgatgtttttgattccagtatcttctttcttctcatcaagataattcacgagccttctcgcacaagtagggccacgaacctgcaggaagaattggtttcaaggctttagcaatcacttcatgttgagtgcaacgaagtactgatttatgttaggaacaaagaaatgagaactgcctcaaatcaaaggttgctaaaagactgagcttgatgatttggggagctaagctaatcgttgttctttgttctttcttttaagaatataaaataagttcctactccatgacatacataagaatatatggactagtaggcaaacttatcggaaaacacttggattttgcgacctcgaatccactttttgacacatgaaggacctattgtagaccataagagatataaatcttctaagaaaacccaattgatgccacttatctaacctatgaaacatgaatcaactatgtataacatagagatgtacatctccttctacgaatagccaattgatgccgcttatctaacctatgtgttgtttctcaaaaaagaggaaaagaagatcttatggggaagtgaaaagagtgtaaaacacacacctggctcaaggcacaatggaagacaagtgtgtctttgtccttgacattttgaacaagatgtgagatcttgtcatcaaacgagccactcgcatagtgtagcgatccagctatatgcccgtcataattcctctcttcatcccttaaaaacatacaattcctccaatgtgagctatacaataggttcataaaaagtctaaatttgtttaagccataactatgtatcagaagaacctatataagtattacaaaaagtctgtttctttctcagcccatctaaccacaaaacctttgttccaagctcatgaggtccctaatagttgtttttcgacagagattctacaaaatatccagttttagaaaacatgttcataattaattgatccccagagttcaaaagtaaagtaatctcttaaaacgcatatcagtattacatagtagagcaaaatcaaacctaagaacaataatcgggattgattcgaactaaaatttggtaaaggatcagattagtgactaaaatcgacggaaataaatcgattatgttatacctgacatcgatgatggcgatgttgggacgacgatgaagagggagaagctgagtagaggtgatgtaagagatgcttctcgccatcgccatttttttcttcttagtgaaaaaggaaaatatgcttctccccatatctctccaaacaccttttcttccctaaaagtcacgaacatttcattgaagactgcgaccaatttgacgtgacgcttacgtttagagattattaaagtttaaatattaaatgataacaacaagcggggatagctcagttgggagagcgtcagactgaagatctgaaggtcgcgtgttcgatccacgctcaccgcattgttataatattttatcttttaactatttttttttacttttaaatattatttttattaattccgggagtctctcttattcgatacctctgcgactctgccgagacgttttggccttcttctcttccgaaatctgatacagtaacagaaacgaacctaatg

SEQ ID NO: 28813 - DNA, 3003 bp, Unknown
  misc_feature (1)..( 3003): 2750-1469P.txt file - cDNA_ID_2998813; gDNA_ID_2926221; Annot_ID_142434
tctagggttagggctagacggtgtttaccagtgcaaaacgtgtgataaaagcttccattcgttccaagcgctaggagggcacagggctagtcacaagaagccaaaacttggagctagcgttttcaaatgcgtcgagaagaaaacggcgtctgcgtctacggttgaaacagtggaagctggagccgtaggaagctttctttccctacaagtgactagtagtgatggtagcaagaaaccggagaaaacacatgaatgttcaatctgcaaggccgagttttcttcaggacaagccttaggaggacatatgaggagacatagaggtttaacaataaacgcaaacgctacttcagcaatcaaaacagcgatatcatcatcaagtcatcatcaccatgaagaatctatacggccaaagaactttctccagttagatctgaatcttccagcacccgaagatgaacgatgctgcgagaaaccgaaattcgcgtttgcatccaaagatcagattcttctcttcacggccgcgtcaaattctttgattgattgtcatcactaattaagtagttctttgtaattacttttttattacattgatatgttaaatcattaacccttctcttattattgtccattcattcttgtaatctgacattgattgaattaacttcaaattatttcattctttgaaactactcattgctccataatttagcacatttctaataatcatcaatatatacacaatagtatataagtatgtgatacttaactttgggagaatgatgaaagatgctgaggatgttccttggagaacggaagaagcatgtgacgatgactttcgcataaagtcacttcgtttgttagccgccactaactcctttggatacacttcacttccgtttggggtttttcgttttttcagattcttttctgatataataatacatatatcattttcattagagtaaatcaaaagactacatctataataatctacaaagactcgttcaaaaatcggatctaaagcgtgttttgagagtccaatgttgaagtatacagtagatgtgatttgatccctagcttcgactatatactatcgaatttttttattatcgaatgtgtttttcactagaaaatacgataatatactgaccgatgtcttgagattttggacatatatcacaagacattcatgtagcaacaaacgaatcttcatgatcatgttatgtagtatgggaaactaacagtaaactgttacaaacttattgatatgatatatgctacaacatcttctagaaataggagctattactacgctacgtactgttaatggtataatggtatctctatatcgatcatgtcatgtctttatatagtttatgactcaatgactcatctatatctttcttttgaaaataagaacatgatatgtagagaaagtgcaacttcttactactaacaaaacgaatgaatattcctaacatttaaatagaaataaaggacatttgaaaacgattgataggaaaagtgatactgtgattaacgatgtcttctacaaatacattggattatatataatgccttttatctccactaaaaattgttgacagaaaaaccataatcgctccgatcgaaaagctcagaacataaaattgaaaacgagagtggtaccctcaaactgttttatccatttaaagtaatagcactacgtttagttcattttgaaaaaaaaacgtcggtgagacttgtaactaatgctgtccttgtcgcattttaatagatatacaattacaaaatgtctatctacatttgtaataaaacaaaacatcgagcccatgtagtgtaattgacaacgattactcattcacttgggtgggataaaataattatgtttcactattatgaattatcttgaaaataaattcttatactgcgtttatacatcattttacgcaaagaggcgtgacaaattcaatgttgaattcgtaagaatatgtttatcaatgtatatagatagtggattattaaaaaaataaacatcaaattaataaagacttaaatttgattaagagatatgtgtggatgaatatataatttgactttttcttgaaccatgccacatgtaacagagactctggcatgactggatactttgctggattacgctagtgtacgacgtatatacagcgaagcaaccgttttcacccacttactgcttgacagctcaccataaacgacattattctactagtgtactgtagaccaaccgcacttgatcatatcaaacctacctttacctcttccccctgaactttcctaaatgtcatacaatcaccccaatcatttatattactccattcactctatcatttataaattttgacttttgttcatttaaaccattaagcaatctctagtcctagataagtagaaacgagtatttaaaccagttcttaaagaaaaaagacaaatattatctggtttggtttgatattttttttgttttgtttggtttagtttgatttagtttcaattctaattgagtaatttataacaaatttacggaaattgagttatttatcatttttgtagttaaatggtttgatttacgttttgttgtgaagaaacaaaaaatctctcattttccatccaatttcttgtcggattctaggtgtaaaccggattagaaacctcttagttgagaacttaataagttcatcccacaatcaaattagttgtggggtcaattgtaactattgaaagtttcgaggctaaaaactataaaaacatgaaaataatatttttcagcagctaatcaacttgttttcttcagcgagcgacattttggaaggaagcattccattagcttttttgctgtctccagaaaataaattttcaatctttcgtcggaaaaaagaagaagaagaagcagagctgggtttagttttttcacgagaagcaaagagatcaataagtcagtgagcttttttctcgtttctgacgatg

SEQ ID NO: 28814 - DNA, 3003 bp, Unknown; identical to SEQ ID NO: 28813
  misc_feature (1)..( 3003): 2750-1469P.txt file - cDNA_ID_2998813; gDNA_ID_2926221; Annot_ID_203319

SEQ ID NO: 28815 - DNA, 3000 bp, Unknown
  misc_feature (1)..( 3000): 2750-1469P.txt file - cDNA_ID_2998828; gDNA_ID_2926222; Annot_ID_142442
gtttactttatagtcatcctttatacatgaagtaatccttttctaaccatgatatgcgtgtttttttgtttctaattttctttaatcattcttcttgagtttaatgggttaaacttttatgatatgatgcaggggaagtttgtatagattactccatcggccgaaccatcagcttgatgagaagaggagaatgcggatggctcttgatgtggtataaatgagttgcgttggttgaaaagaaggctctaaaagttactgctatatcgctaaaaattatctgagacttgctttgtttctgatggtattgcaggcaaagggaatgaactacttacacaccagccacccgactgttgtacatagggatttaaaatctccaaaccttcttgttgataaaaattgggttgtgaaggtttgtgattttggattgtcccgcatgaaacaccacacatatttgtcctcgaaatcaactgcaggaacggttagtttttatcttagatggaactattccttatttctcaatcatgaattgcaaagataaactgaacaacttacttgatacaatgtcctgttaatgagtctgcagcctgagtggatggctccagaagtgttgaggaatgaaccggctaatgagaagtgagtgaaatttaacactatgagaacctttttaaatgttagtacataaatattgactggtgtgcttgctcagatgtgacgtgtacagctttggtgtcatattgtgggaattagctacttcacgcgtcccctggaaaggtttgaacccgatgcaagtcgttggagctgtgggattccagaatcgacgccttgaaatcccagatgatatcgatctaactgtggcacagataatccgtgaatgttggcaaacgtaagttcattttcaaaactcaaatccttaaaatttagcaaaaagtaattcactactccttattagagctgtatgatacatgtatccttatgattagctttgtagtgtaaaccatcagtattgaaataggtaatcggtcatcatacattttaggtgaggttaagcttgtgattgttatgcagggaaccgcatttacggccatcgtttacacagctgatgcaaagtttgaagcggcttcagggtctaaacataagcaacagagcgaatacgagtgaaagtttgatgtaagatacgttagacagaagatgttgccttacctggtctggttcaaagagccaacgggtggggattgccattcttctttgcttttttttgttctttttgttattacggtcagacgagaggagacaaacaaaaaaagattgatgggttggggaaaagcttgtggagttcaatcgaagtgggagctcaacaagaaaagaaaaagccctattcttaaccctttgtaactattattattatcatcattgttgttgctacttgtaacgataaaattaggtgaatgaacaaaaaaaaaaaaaaagaatagaaatgaaatgaaatgaaatagtaatggtagatgaaaagaatacacagtaagcctatggagtccttttcttattttagtttgagatttgccccaaaatctgtaaaagtgtaaacatgtggggattgttgtaattcttgtaaaagttacagtcaaagtaaactataaaagtaaaaagaatgatgagacattctagggaattaagttttcttaatggatgccaaatttggtcaagattgataaaaagtctggaatgactttttgctggcagaaattagaagttgaagcttttttagaagaaagaagaatcattaacggttgatatgtaacacttaggaaatgtaacgtgttgtgagaattgcgattctcaccgttaatcgaggcccattgggtatattatctcacccaattacccaaacttatatcatttgaccatttttcgatatttattataaaattgtttatgcaaaatgaaataaaattcgttggtatatatatataaccgttttagaaattgattctggcggagaagaaagaaaaagcagagaaattgtcaaatattactcaataaaatattttatcgagttgtgtttcgtatgagaatacaaaatctatacatatagtgataacattaacataatgttaacatctatataatgtaaacttttctaaacatataaggaaataacttgtacaagaggtaatagtgagatctagaatattttttgggtttcacgtactgctccctaagatattttcaataggaatctccataaaaaaggttaagaggagaacaatccacatatacgagaagatgactcatcattttatcttctacaagatctgatcatagagattttcgcgaagttgccgtcaaaacccgtagtcaagctcatcgtcgtctcgaaactctggtcttctataatccgcagcaaatacttcattgatctgtacttgaaacaatctttgactcgtccgtgttttctcttcatattccaccagcgaattcatattcacactaatatatctggatggctccttctttattatcagttacgatcgcaaagaagacatcagcagaagagttgagattgaaggagttggagatgccaagtatgtgaaaagcttcttggattatgtaaagtctcctatacttctccaaaagaagtctattgtctagtttcttaaatctttatataattaaatagttctcgcactgctttaaactaaattttagttttctctaaaactaatttttttttatttggttatattaggagagaaccagcaaattcttattcaatttttttttgtctttcatcatgattactccaaagggtttttctttgtgaagaagattttatttctcatcaaatttgtgtataaaacgagaaagggtgtatttgttgtaagcaaaaagttatggggtagaattgaaaatagactgaaataatgagagccgtcttattttttaagtgatggttacaaaaccgaaattggaaaaaaaaaaaaagacacggaagctgcgatg

SEQ ID NO: 28816 - DNA, 3000 bp, Unknown
  misc_feature (1)..( 3000): 2750-1469P.txt file - cDNA_ID_2998830; gDNA_ID_2926222; Annot_ID_142443
agaaagcggaaagattagatttatccatcgtttatcccagtaaaaagctttgatttttccacatgtcttttttccccccttttttcgtattaaaagccctagatatatatatcaaaattgaaaattatctgaaatcgatttcgtgggtttcagttccggttcggttctctttcttaaaatattgatttctgtcactttccgcgatgaaaagttttcgaattttgcttcttttggctccaaagtttttatctttcaaatattttaaatctgggtacttttttgttttggttccttctttgtgaattgtatctagggctttgctccttttctaatccaagatctgttttcgttctcagatagtgtatgagctagttgtttgtaatttgacggctctcgggaactgatctatctccggtgtctctgctttgtcggtagctacaggagtgaagagagtttctacaaggtaaatttgaaaactttatcattgaaccttgtacttgtagatttatagtagtgtttgggtatgaatgtgaataatggtcagatattgaaattgtggagtagttgcattaggctctgagttctgttgtctaattcagttacaagttgatgttaatagggttttaatggaagatgatgactctccttcttctcgggatttggatgcacagaacccttatgatcgattgcttgctctagatacaagtaccgtagatccaaattgtaacttggattcggtttctgccatttatctagcgatgaagagctctaagctggaatgtgttgacgagcgtggtcaagattcccttattacttcggtatgcatggaggatgaagaggatgaggagctcgatgagtttgatccttatctgtttatcaagaacttgccgaacctgtcttctgttgtcccaactttcaggccggtcttgcttcctaaacaaacccgaagctgtcctcctatttctcttgtcctagaccttgatggtaaggctacttttcagttgattcgtttgtttaaaattgtatctctctttgcaggttttaatggcacacaaatcttagttttttctcaccaggttttaaggctactataacatatatgttttattttgcagaaactcttgtgcactcgactctagagccgtgtggtgaggtagatttcacattcccagtgaattttaatgaagaagagcatatggtgtatgtgcgatgccgtcctcacctcaaagagtttatggagagagtgtcccgactttttgagatcattatatttacagctagccaaagtatttatgctgagcaacttctgaacgtgcttgaccctaagagaaagctctttcgccatagagtgtaccgtgactcgtgtgttttctttgatggtaactacctcaaggatttgtcagtcctcgggcgtgatttatctcgtgttatcattgttgataactccccacaggtattatactcttattatccttctacacagtgagtaaacacgtttagttctccattcttatgctttatacctaaaccgatcgatagatgcttttatcagctataattgtaggatacacttctagtataggaaaactataataactatgaaaggtagtatgggcgaatccagtagaagttctttgtttgcaaaagctatctcattggttttgtagggttgatgaaaagaagttgattccagaaccgccattaagaattctctaagctcgatctaaggctgttgcacaatctcattggtgtttttctttttctgcaatgttttaggcatttggtttccaagtggaaaatggagtgccaatagagagctggtttaatgacccatcagataaagaactccttcacttgctgccatttcttgaaagcctaattggagttgaagatgtaaggccaatgatcgccaagaaattcaatctaagggagaagattgatgcagctgtagccgcacctgaatatcctgctgaggcgggagatcctttcgaaaggtaaagtctatcgccaaaacacttttaaaggaagaatctggcacaagagcagaggttggagaagatatataagtatatcaatgttgttttcttattagtttaaattaagaacttggtatacagagaaagacaggatatgcctgtaaaaacagtttaaggcacaataactgtataattgttttctcgtttatttactagtacacatagattaacatttcaagtttcaaattggcttttttttttgcctaaatcctttgaaatcagacaataaaaacagaacataaagtgagcttaaagttttttttagttttatttaagaaaagtccaacgaaaaatttgcatatgaatcccaatcaaaaatcagtagcatagtgcgtgatccaataaattcattttgtacagaatccaagaataatttgtttcctccaatcaccaaacgccattctattcgaccataagtcttatttatctcagttttcatggccgtataaaaatattcctaggcaccaagctataggtgcgtaacgtttctaatatacgattggttttggtattattgttggttccacgaacggataattatgaaacttgtttggacatttaaaaactaaatagtagcttcgtgtaatagtcaaagctattcttaccaagtaagtggaggaagcttgacgaagaagagtagtgcgcattttaaccgaatctacctttcgaagatgtcggcgcaggttaagctctactactatttttcttatttatttataaactgtggaaactatttttttttattattattttatttatcggatgtttacgaggtacgcattatttatttctctataattaattttgctttgtgacaatattcacaattattttttttaaagaaaaaactaccaaaaaaaaaaaaatagcgaaaggaagcttcatttgttagagagataaactggagatttttagagagagaaagaaatagagagagagatcagttcgtcgttgacgatcgatg

SEQ ID NO: 28817 - DNA, 3000 bp, Unknown
  misc_feature (1)..( 3000): 2750-1469P.txt file - cDNA_ID_2998834; gDNA_ID_2926222; Annot_ID_142444
tcacaatgtgcttgtcaatatatacaattaccgcatcactaatcaagaagcaatgaatgcataactgaaagaagattcatgttccgaagaaaagtaaagtgagaaaaacgaacaggcaaagtgtcccagacgattctgttgtcatcaggtttgagatgataaaaagcagaaccaaaagccaagcttgcaatgcctgcgtagaacagtgtccatccccagatctcaccatttaaactgcattacaacaactcaaattgttaaactaactcaaaataaaactcaaaaaagggaaagagaatgataccttatgttgaagaagcttcctccaatgcaaagaacaaaaccaagaactccaacgataagaaagggaaagttggtcatcacattcaatgtattaggcactcctgttcatcatcaaacccacacaaaacacctgtctctcgttattacacatgcacagagacagagagagataaaaaaaaaagaagagagagtgtgatatgatgatgatacccatgaaattgcgtttatcggcgaagatatgatggcgaaatgaatcgagaggaactttgggagtgatgaacatgatgattgaccaacagaggaacgatcccacaaccaaaattcgtttccttttccatctccctatctgttgattcgtcaaccacaccattaaaagttctctctataaaggtgaagactttaaaggtttgtattgtttgaagtggataaatcagttatctctgttgtgtctgattgattaatcttcttccagtttaagaaagaaaagggaagacagatttattgagagtcgcttttttcgattagaacaacgtgcggcggaatctctttttttctttttccttgagtctgacgggtacgacgacgacgatcgatctctaatgttgtcgtagttgacgaggaccgctctaaacgtctacgttttgtttctattctattttatttgtaaagtaaccccttacatttttatatcttatatatatcccaccccatgtttctgaaagtaatattttcactcctatatatatgtacaacgtttcaaaacttggcgggagtggttttagttaactgtttcctggttagtgtttctaggagaaggaaaagttaactaagaaaattgctaaattatatatccttgatgtgttgttgtagttcttagaagtaacccacatagatagccatgtatgaaacaaaaacaaaaatgggattaacatgagacaaagttcaaaagagaatgaactaagagtctaaatgctctttatgctacaaagtattcaagaaaacgaaagagtataagagaaagatggggaagaagatgaaacaatcatatgtattctcaaattacaaacatatattctaaagctcaaattgggaacgtaaatatatcaatgttgttttaagccatcatgtcctctctgaatcatccattgtgccatgcttgaatacaagtttgatgttgttcatttctttgaataatattggcaggttgagtgtttttcagtttgtgttggatcaaattgtcttttatttggatttcgtcgtaaacataatcagcagaacacgtcattcatgtcatacctcttaatcttttatgtgtttggtaataaatctgcataatcatgacatgaaacaacattccacaattctatatagcattctagctataaccaatgaaaaatagatcatcctatatatagtagtactaaacaaagattattctaaaccaacttaacttgtaacatcaaatctaatcaagtcacataatcttgtataatttcatttttcaaagaaaatattcaaaagtcttcaaaacgttttttttattccaataatccataacatgcatgttcaatttgtaaaaaacagaaggttcctttttaagaaaaagacacttctctagttctctacggcatcgttgtactatcctccaaccggagatgacgtcatcatttaccggcctaatactcttcgaatgtttggggtttagtttaacaaatcaaaaactatcgaggttactaatgaaatattaataaagtatgagggcatttaaatgaaatatttcattgcttatgtagactatagtcgtctgtcattcatttcgagcaaatattttactcttttatttcgaagagagagagagaagaagacggaagctagaagaaatcgtttttgatcggaggtacttttttccgacgaatatactctctctagggttttcttttttctctctctccctctccgtttcttcttcttagctcttcaatctcagctcgaatttctgggctactgaagtttaatctaggtgtgcgcttcgttgaagaaattttgaaatttgcagagaaatttgcggagaaagcggaaagattagatttatccatcgtttatcccagtaaaaagctttgatttttccacatgtcttttttccccccttttttcgtattaaaagccctagatatatatatcaaaattgaaaattatctgaaatcgatttcgtgggtttcagttccggttcggttctctttcttaaaatattgatttctgtcactttccgcgatgaaaagttttcgaattttgcttcttttggctccaaagtttttatctttcaaatattttaaatctgggtacttttttgttttggttccttctttgtgaattgtatctagggctttgctccttttctaatccaagatctgttttcgttctcagatagtgtatgagctagttgtttgtaatttgacggctctcgggaactgatctatctccggtgtctctgctttgtcggtagctacaggagtgaagagagtttctacaaggtaaatttgaaaactttatcattgaaccttgtacttgtagatttatagtagtgtttgggtatgaatgtgaataatggtcagatattgaaattgtggagtagttgcattaggctctgagttctgttgtctaattcagttacaagttgatgttaatagggttttaatg

SEQ ID NO: 28818 - DNA, 3000 bp, Unknown
  misc_feature (1)..( 3000): 2750-1469P.txt file - cDNA_ID_2998842; gDNA_ID_2926222; Annot_ID_142446
tctccagctttttagtactccattcgttacaagtattacatttatatttctgtatccattaaatataaattcaagtaagaaagttccaaacaaaacaaaaatccaagaaatttttttagaagccgtgaattctctggccttcttctacttgacaataccttatctctctgactcttctctgaaattttttaactaacaactgaagaaatctccttttggatcattccaaaagtttcacaaaatccagaagaaaaaaagaagaagattatatagaaaatttcaattgtgaaattatcaaaattccctctagaaactccatttccagaccttgacactaagatcagacttacacttagtttttttagaagtagctacaattggagttttaccttttggtatagttccttcaaatccttcacatgtcactttgatctctactccttcactcttcagcttccccattatcatcttcactttagttctcatctcgatctcatatcctacacgcgcgcgcgtcagatctgatctcagatgcttagcttcatccggatctaactcacgcgccgctgtagacgtagcgatcacgccgtgaaacgaagttttgttaccgttatcgctgaagaaagcaggaacagttccgttaccgagcatcgtaccggatttagctgaattaacggtgacggtgaaaggatcgtaagagaaagagaggtgttggtttggattctctgagattagagtgaagttgaagaaggaagagagatgagagacggaggaatcagaggaggttgttaggttcacgcggctgattcttattgacgggacggagaacgacggcggacgagggtggtagatcacgtacatcgcggtggcggcgattgcagtcatgagagctaagatcagaattatcagaatcgaccagaaacagcaacaacagcaaattcgtcggcagcttggtcgagattggtggtgatgacggcgactgtaaggctgtggacggtaaaccggacggttagctggaatgtagacttgaggtttctgattagccattccgtttgttgttccgttgctggttacagtcgccggagctggaggaggtggtatggaaccaactggtggagctccattagtggcggttggtggtttggaagctgggaagactcggtcagtcatcttcttcttctccggttgtttctttctctctggtcagatctgagctcacaaaagagagagagatagtgagagagaaagagacaatacagagtttttgtggaatcttaatagcttttttttctgagtttatttatttattgctttttaataatttgtttttttttcggttttcagtttttcttagatttttgtgaatgttcatgacttccatgccaagtctgtggaatctttttattgggtggtaaaataattaatgtaagctgatttattacttacaaagtggccccatttatttctgaaaaaattatttacacgtgtagtattttagtaacgagtaatactaagatgtgtcctgtgtactcaaatttttcttgttttcagaatttagtaattcacaatagagtataatgtaatcaaatgaagaagaagaatgggcaaaaaagagtaacaattaaagatgtaattaaatatcaaaatgacggaaataataatccaccgacacatatagtgatagtggtagtagttcactaaagtgtgcacgcaattgaaataagtttgaatttaagtcagtgcaggttaaaaaaagaggaaataattaaatgagtgcagatattggagtattaatagattagggatccgaaattaaaaatataattagaataatctcgatttggttcagacttcagagagtaaatcccaagtcaataattatttcatcggcaatgctgctctgctttgaattttgttaataacctttgcttccgagctctcaattcccaagatttagcgtgattaataattcaagagctctctaactatgtagtatagttaccaattatcacccggtcaagtgtccacaccataaagtctttaaaaaaataaaaataaataacactcaagatcgatcacatttcattaaaagataactgcattacagagaagcattgtcggaaacatccacaagtggttccaaccagcaaggtacataaacatcaacaatggaaacataaagggcaaaacattgagcctacttcaccaaaccataaaagtgtctagacatcccaataacttatggtaaagtttgtttttaacgtcttacagtcaaacacctaaatatacatcccacaaccatcgacatgaatgcaattacatacatagtcagagattatatagtatgacgagagaagcaaagttgtaagaataaaacaaatcctaacttacaaaggaggcagagcacaaataaccagaagcaatggttgccaaacaaaacaaatcctaactaagaacattccttgctctttgtaatagatatagataattaagagagtatgataagcataacttcaacaaatgtggattctaaaacataacttctccacaacgtgcacggctagatagagcacttcatcgttagcattcaacaaaatgttttacattatcctctgaatatccgcataatacgaacaaatagaagtattggtaggtgatgagaaatggcaaatttttatagatagggctagatttccatgactgctttaggtgaccccttaagcatcaagattattacaacacacaactaacacaaccgaacaaaacaaacactagcagaaactatcccccaaggacaaaaaccatatccaaaagaagttaaaatcgactttgttctttcttcttttaaccatcggttcgactataaccaccggttcgatattgtcggatatctaaaaccggacccgacaggaactactcttaaacttgttgactttttttttctaaacccttcagtgttactgtaacagtcgcacacctaacaaaaatcctccagccatg

SEQ ID NO: 28819 - DNA, 3003 bp, Unknown
  misc_feature (1)..( 3003): 2750-1469P.txt file - cDNA_ID_2998850; gDNA_ID_2926222; Annot_ID_142448
ccaatatctgcactcatttaattatttcctctttttttaacctgcactgacttaaattcaaacttatttcaattgcgtgcacactttagtgaactactaccactatcactatatgtgtcggtggattattatttccgtcattttgatatttaattacatctttaattgttactcttttttgcccattcttcttcttcatttgattacattatactctattgtgaattactaaattctgaaaacaagaaaaatttgagtacacaggacacatcttagtattactcgttactaaaatactacacgtgtaaataattttttcagaaataaatggggccactttgtaagtaataaatcagcttacattaattattttaccacccaataaaaagattccacagacttggcatggaagtcatgaacattcacaaaaatctaagaaaaactgaaaaccgaaaaaaaaacaaattattaaaaagcaataaataaataaactcagaaaaaaaagctattaagattccacaaaaactctgtattgtctctttctctctcactatctctctctcttttgtgagctcagatctgaccagagagaaagaaacaaccggagaagaagaagatgactgaccgagtcttcccagcttccaaaccaccaaccgccactaatggagctccaccagttggttccataccacctcctccagctccggcgactgtaaccagcaacggaacaacaaacggaatggctaatcagaaacctcaagtctacattccagctaaccgtccggtttaccgtccacagccttacagtcgccgtcatcaccaccaatctcgaccaagctgccgacgaatttgctgttgttgctgtttctggtcgattctgataattctgatcttagctctcatgactgcaatcgccgccaccgcgatgtacgtgatctaccaccctcgtccgccgtcgttctccgtcccgtcaataagaatcagccgcgtgaacctaacaacctcctctgattcctccgtctctcatctctcttccttcttcaacttcactctaatctcagagaatccaaaccaacacctctctttctcttacgatcctttcaccgtcaccgttaattcagctaaatccggtacgatgctcggtaacggaactgttcctgctttcttcagcgataacggtaacaaaacttcgtttcacggcgtgatcgctacgtctacagcggcgcgtgagttagatccggatgaagctaagcatctgagatcagatctgacgcgcgcgcgtgtaggatatgagatcgagatgagaactaaagtgaagatgataatggggaagctgaagagtgaaggagtagagatcaaagtgacatgtgaaggatttgaaggaactataccaaaaggtaaaactccaattgtagctacttctaaaaaaactaagtgtaagtctgatcttagtgtcaaggtctggaaatggagtttctagagggaattttgataatttcacaattgaaattttctatataatcttcttctttttttcttctggattttgtgaaacttttggaatgatccaaaaggagatttcttcagttgttagttaaaaaatttcagagaagagtcagagagataaggtattgtcaagtagaagaaggccagagaattcacggcttctaaaaaaatttcttggatttttgttttgtttggaactttcttacttgaatttatatttaatggatacagaaatataaatgtaatacttgtaacgaatggagtactaaaaagctggagattgcagtgactgcgtgatagtgagcattaaagtgagatcgtagtagtaataaacagaaccttaaaaatggaaaagatgcgtggggtttgtgaggagaacaatgaagaacacgagagatgtgttaaatgttagatgttgaaccatctatcgcattatacaacaccatttaagagaaacgtgaatcgtctttagtactctataaagcaagcatatattctagcagttgcatgttataaaattaatacagatcgatcactcaattcatgaatatggtttgatataaacattaaattaaatgtcatgctgtcataaaagatgaattatatggttcatttatctaagaaactttttattaactaagtaagtaaaagtttgaagaggtcatttgcaagtgactccgaccagggatagactcctgaaatcttatccaactatggacgacgacttcatgtcggtgtgtccaaaaatgaggaaaaggaatctgcccaagggacaaatggcattacccgaaacggcaaagaagaaccgcaggaaaaaaagttgacaataacgtatgaggtgtgactgaaaaagaaaaacttgtagtttggtttatgacgtaaatgaataatttggaaatgacaataagtcatcatatctaatttagtgcatgacctccaacgtcggcatatatttgagtcggtgaccggatatccagtacaaagtaaagtacaaaccaaaaagaaagacaagacaataaaatgggtaaagaagacttgcatacacggacgtgatagaagaagacatgcatagtataattctgactttctgagacctttaatgaaaatatttggcaatgtatttcaagaataactatggcatatctcttagattttgtgaaaatagcccataatcgaagaagatgatagtaaaaaaccgaggcccaaatagaacccatttacccaaaatatcaaaaagattagtcgtttggcaatgaaattagaagcccaacacatgtcctaagcctttttcacttttcttcactgtttggttttccgacatcattaacttcgcgggggcaagcgactaacagaagaaaaaaagcgactaacagaagaaaaaaacgaaaaggattattccgccgtagaatccatattctctccctcatcactttgataaacaagagtctcatttttcgcttttccaaagggaacaacttcttcggattattatctatg

SEQ ID NO: 28820 - DNA, 3000 bp, Unknown
  misc_feature (1)..( 3000): 2750-1469P.txt file - cDNA_ID_2998852; gDNA_ID_2926222; Annot_ID_142449
aaatattacatggttttactgcatttacctcaagatttttatctgaatctattaaattatattttataaaatatgggattcctaacaaaacactatgagaaaacttacttgggcagcagtgatgcctgagatttcaaaggtagagccggttttgaattcatagcaatcatcaaggctaacacttttggtccggagattgttgatttcttcaattggccattgcatcagcttctttccacttgtgtccatccaaatttccctgggaagagtctaagccaaaaacaaacccagttcatccaatttcttacaagtaatcatactctactagtactttaaataaactatatatctctatttaccataaggccagcccatcctttcttaaaatcatcttctttgctatcagtctctatgacccatccccagttgatcctcctatttttaacactatcgaagaacgcctttgaggcataaaacgttccatgatcatatctcaaatctgcactagtgttagtgaactcataatccgctgaaaagtcttcagtctcagaagagtatttaccaatgacatagcaatcattgcctccaaaactcgccttcaagacatgcctcacactagcattgtttaccgaagtgtcaacaccttctttaccagtgatagaaaccgggaaaaaatcagggcattcccacattccggttccttctgactcaagtaaaggcaccggatactttgtccactggacaaaatcatcgcttcggtacaaaatcgccattcctttctcagtatctttctccttagctcctatgagcactctccatttcccatcttgccctttccacgcctccgtgggatcacggaaacaattaaaagggacattacttggcggaaccatcacaggattgtactttggcttaacccactcacgaagcaaagggtcagaaacgtcctttggttcggcaacaactgtgacttgctgtttgttgttgacgtcgagtccagtgtacaaaattacaggtctgccatcagggaggatcgtggcggatcctgaccagcagctgttgatgtcaaaggactcagaagggacaagggctggttcgagctggatccaattgaccatgtcttgtgaaacagagtgtccccatatgattcttgtcctactgaattcgggagccaaagggttattctggtagaacaaatggtagaatcctttgtaatacattggcgctgaaacaacattataaatatacgtatttcattatataaaacaactttggagttccttgtgtcacaagttagcaatttgtagagtatttaattaccgtttggatcttgagatttccaaaatgcatcagaggaccagaagtgacataaaattaagacaatcgttagttttcagtatcatatagtagaaattaataacctgattcaatagataaattgcaataaacagaaattaaccatttttttgttttggttttatgaactaataatataagagatctttgccaacatgatcttttcttttttgttcacaaccaacatgatatatatatatatatatatgaatataaataggaggaaaaagaaagaaatagaaccgttgagccaatttctctgaggttggaaatggaaggacgtccggttaagcacagcggtttgaagaagattctgttccattacatcagccatcgatgatcggtcttactctgcaacgattacgaaattgatgtgtgtatgtgttgctttaatttctttataaatgctctcgagatcttgccaagatcaaatgattatagagtcatcagaaaaattcatcgtacttatactgccattggagttgacattgacaaattcttcttattttgtcttaagctcgaagtatcgtggaagaaacccactgatagttgttaattagctctactgaatttttattataattattaattaagctttgcagtcgccagtctttgttaatactaatagtctaatacattacaggtaaggtctttggattattcactaaatgtgagttctattatcattgcggaaacttcatcaagtggtgttaattatattttagtcaatgtggtccttagtcattgtttatgaaaatacttatcctttctttagtatatgatagacctgtatatggatggtctttgtttgaggaaaagaccctttcaagttgtaataatctaatctttaaagtttgtattaaagagaatgagacggcatcgatcgtatggctcaatccttaagtcgttgaaagcaccaagtaatcacaccaataacaacaatatggggttcatgattagtaccaagtaattacaccaataataatagtagggtgtttttaacaaatagtatcatattattttgtctgatagctagctatttttacttgatatcatattatttgccatttgatatcatagctattttactttatgcgtttgattaacaaatagtcatgcttttaatcaacttggtcgatggtctttgtttatgtaaggaatttcctttcaatatgcaatcatttaaggccttcaaatttgtgattataacaaagagatatcatttgtgtcatgttttgacacaattttttcattacactgaaagggaaagtattattttgaaacttatacattttttttttttgataaaataatccttttctaacttcagatcaaaataacatgaaccgtcgaataattattttttattacacaaaaagtgaaagtgttatttttgacaaaatatttcatttataacctcaaatcaaaatgatcaagtactaaaaacgaaaaaaaataaaaaacaaattgtgataaaatcccaagagtcactttctatattcgacacattaatattgattttcttcctaatccaaattacgttgaccatatcatacattaattatttactagttggaattatataatatgaaaaaattccgagtcactttaagcttttcgaggtatctcctccgcgcgacgatg

SEQ ID NO: 28821 - DNA, 3003 bp, Unknown
  misc_feature (1)..( 3003): 2750-1469P.txt file - cDNA_ID_2998860; gDNA_ID_2926222; Annot_ID_142453
tccgagtccaaagccttctatgcttgatcttaatttgccttccataaccattccattcctcaaggaagatgtgactctcactagaaccgtcaccaacgtcggacccgttgactctgtctacaaactcatcgttgaacctcctttgggtgtcaaaatctctgttacacccaacacactgctctttaactccaatgtaaagatactcagctataaggtcactgtctccacaactcacaaatccaactcgatttactattttgggagcttgacttggactgatggatctcacaaagtcactatcccattatctgtcaggacacaaatgttgatgtacttcgaccagtgagtttgcatttttttcccaattaccatgtctttacttaacccagagcggtggtgtgtaaaaaattcaataattgtgggggaataacatatactatctaaaaaccatcatatactgcaacctattgttttctgccacttaaagaaaaacatggattcaaagttgaaattctaaacaaatagaaacacacaaaaccaaaattttgtgtttggatgttcttgataagcattacattatttttatatatctatatatatattaatatatgcgtttgcaataggtaacaaaatgtatcttataatttgctctcttttttttaatcattttttcattataatttccggttgtccaattttatttgtagggattattagaaattttcgaaattttcgggatatccgtgaagttgggccgaagcccattcgtctctacgtgtcaaaatgaagtgatttggtttttcttaataaataatgaagtgaagtgaatttcgatgaagaaagaaagacatgttataaatgctgactttttttatttcatacatttttaagcctcgatcgagcggaatacaggtacagagaggacaatcaattttaggtaagccatgttggggacatcacttttcaaattgtcttggaaaataaattcaaatattaaaaggttaatgtctttttctatataacagcataatccatatatatatatatatatatatatatatatatatatttttttttttttcgcaatgcattaatgaaataattgcattagaaatgaatcattcatgttacttttatttttatatcataaagaatcccatcgaattttagatatcgtaagtaaaagatacggccgtgaatgatacaaaacagaaaaaataaataaagatatatattggtgcatgcatttgggtgcttgcattggttttgtatacaaaattggcccggtcaatggtaatgaagacatgtatcatataaaattgttgtagatatatctaagattatttatttatgttggcatgtttaaagaatgataaacctacaaactcttggtaagaaataaaattattaactttcgaaaagaagaagaggctggtaactgaatgcattataaaattaaaatttcggccgccagtgactttttagtcttcatcaaaagtgtgaatacttagttctggtcacgcatgactcatagagtgaaaaaacaaatacgtacgggagacctgatactaagtttattttataagaaatgaaaaccaaattctgaaaatttgctacttaacttctctttttcccaacaatgcaaaattgaatatgaatggtgagataacaacactattaatacaatcattaggttatatatgcatgacatttatactattttaatttgtttatgtttatacgattatatattcgatgtttcggaagtgatgtgtcttatatgtttttaatttttctggtttttttcttcatatcgggttattatgggaaagataactggttgctatatcgatgtattgaaaataacctaaaaactaaatttagaataataagtaacgttgttttcgaatgatttccaaaaaatcggaatggaaataagaattaacttctcaacaacatgactctaagatctcaccaaaaataacaacatgactctaagaataagaatatcaatgcatcgttatatatatcagccagcaccaccataccatgaatgcatgatcaactataagtttataacagttcacatatccattaatctaaaagactaaaaccaagaatggatcaaggtagttccgtttaatttattgcctcaaccattaataccctcaagaaagcaaacacgttaaagaatttgatatatagtgatcaaacgagaaaaaaaaatggataccttatattacatagttgacaaaaaaaaagttggatataaaaatacaaaaggagacagattggcgttggacgagggaaggagctgtgggaggctcatgtgggcttcctctgttcgccatataactaatttcgattttagtgtatacgtatgcaattttttgtcacctatggccgttgtccctggatgatgaccatggcctacaagataaacaaagaaaaaaaaagatctgcagtgaataataaaagattcaaagtgttcaggtaatttggttgagtatgtgatgaaaattgtctaatggtttcaagaaaaaaaaatcaagtttttatttgaattttggatttttgaggaaaaaacatgtaaatacgctaaatgcaccaaagtgatgtttttcaacatcttgttaactgttattcggtagattaatttaaagtattttttttatgaaactccgatcgattaaccgccaaaataactttttatttacctccaagataccataatcattatccaccacattttcttaataattattattaagctctataattctgtaaaaaacccatttaaatacaaaagccgatttcttccaatctcaagttagagttttttctccattttgtttgcattctatatagtatcgtcacacaaaggtttcgtcttgtcactttactttgtttgcccccctttggttttttgtgcttcccttctcttttttttttgtttgacgacctgagggaataccttgatttgtagatttttatccattaatg

SEQ ID NO: 28822 - DNA, 3000 bp, Unknown
  misc_feature (1)..( 3000): 2750-1469P.txt file - cDNA_ID_2998864; gDNA_ID_2926222; Annot_ID_142454
aaaaggcctaagagaccattcgctgcatccagatgtcttaaaacttgtcaatttgtatgttacacatttacttttttcagttttcggttttggaccttagctatgataaatatttcggtctttttttttataatactatttatcaatttactttctgatacattaattatagaaaactatcaactactttttcatttgggaaaatgatagctcgtggaaaatgaagccattgattaaaagttgtgcagtatataatatggtcttaaatgttagttggtagtcacattcccaggaaaatgtgtgactactgaatacaaacatcacgcctatatttgttgttcaataaagaaaaaagaaaaaaagaacatcacgcctatcaattaatttttggattcgtgaacattatcacacacaacttgcccgttgaccgctaatgcagatcaacggtcaacggtcaattacacacaaaaaaaacaaacttctacttcatatttatttccattattcttaatttgtctgaaatttcacactctagtaaattttcttaattttattatcttctgtttcttaattattaaaattttccaaacgcgttagcgttataataatatctgttacattttttcttatttgctttttcttatctccatttgctttatttgttttctctcttttaaattacagaaaacaaatgaaaataattcatataacgtggagcaacaaattgagaccagctcaaaagacacgtccttttttgcgttactattattctcctcctttctctccaattattctctgagctgtaataacataaacaaaaaaaagattctctcgatcaaacttgccggcgtccatggaagatttcggccgtcaacgaccatacggagacggagggatgcagatccagccttaccacggtaatcaaggcggtgatttcaggagctatagcgcatcgtacgggacgagggagaacaatatatacgatgtgaaaaaggagaaatcgatagcaagatccaagtcttggggaataacggatccggagctccagaggaagaaacgggtcgcgagttataagatgtatggtgttgaaggcaaagtcaaaggctcttttagaaacagtttcagatggcttaagcagaggtacacacaggtcgtctatggttggtggtgattcttttttcatctttttctataatttttacttttttactttgtttttcttcttcttgagctttgttttgaattttgattttctcaagtaattatgattgtgctctctctctctctttcttatgtatctttgtgtttgtgtgttgtaatcttgaatgtaactgtggtggcttcatcgcaacaaaattatatatgatcatttattagtttcaaaaagtatgaatcttttgtactcagaaattaggttcgatggagaatcttcttgtttgatgctctttgctaagattattagttttctaaagtcttgttcaaaatagattgtgaaacggtctcttgtttcctccatccaatatcatgccatgatccatacttgcttggtttatcatctctattgtatacaattaggttttgacatggttgagtttttgtgattggcttgttacatctggtagttaattatgttcacatcattttggtgatcatccattcgaatcagaagctctgcttttattgaacaagagcagtttattttttgcgtgtttgaatgattcttaagtaccattttagaggcaatccaacatgtttcttagatctcaagttctgtttctgttagatcttgagatcttataaagcatgtttctgttagtatgatctcgagtaaaaagttggcttttgaaaagctgacaataactcggtttatttggggaccatttctctatttgtatgtgtcattcttatttagcttactttgtcgattttgacttttgatctgagactgcacttggaagactataatcttaattaactaagattaggtgaaatttttcactgattagttctttgaacaatatcacaaacttgtggcagacgcagactcatactatttccatatcacaactgtttcaagtctcttcaatatcatcaacaaaacgaattagataaccaaagcaatcaacgaaattatatatcgcctcctcgactatccagttttcggttaattttgagggcagaggagaggactgctaaatgcgttggcatggacgacttagctaaagcatgcttagcaacgttttcatgttgaacttgttgaagttgggttatttaatcaaatgaagcattctaaccaaaatatatatatatttaaatacccatcgggttcgtaaatgcatataccattaattttatactcgattcatatttcaagttgtgaagaagctgcctaaaagggtgtttgaggtttccaagttttaattatgatagctgctaaaatggttgaaccataaatattatcatattggtcttttgcaagagaatagccgaaacatgttttaaggtttagattgtttgtatacacatttacatttatatgtagcatgtatatttcataacgtaacattttttttcttttgctaggttttacacttgacatttgtagttacatttgcaaaactgttttttaattctttttgaagtattttgtacttttaaaatgtgaaaaaaatggacatgtgatgtaaacgccattagctgtgtctttttgccagcttttatttattttcttttgtattcaacaatataataaatttaaattttttaaagtcaattaaagtatagagatttttatttttttgaacacgaaagcatagagattaattttgtttttttaccatagaatacaattgctataaaaaaggaaattactatatacccacgacctgtcaaaagttaaaaaaacggaagtaaataataataacgtaagacatcggcaaaaatcattcctccattaaaaagcttcttccttcgtttctcgtcggcgttttgagagacatg

SEQ ID NO: 28823 - DNA, 3000 bp, Unknown
  misc_feature (1)..( 3000): 2750-1469P.txt file - cDNA_ID_2998868; gDNA_ID_2926222; Annot_ID_142456
tttggtacagaacgatgtccgttacagaaaatactctatagatgagattgaagtggctactgagaggtttgcaaacaacagaaaaataggagaaggcggatatggaccagtctatcatggcacacttgatcacactcctgttgccataaaagtcttgagacctgatgctgctcaaggaaagaaacagtttcaacaagaagtcgaggttctaagtagcataagacatcctcacatggttcttcttcttggtgcgtgtccagaatatgggtgtttggtgtatgagttcatggacaatgggagcttagaggatagactctttcgtagaggaaactcgcctccactttcatggaggaaaaggtttcaaatagctgcagagatcgctaccgcactctccttccttcaccaagcaaagccagagcctctggttcatcgtgacctaaaacctgccaatatacttctagataaaaactacgtgagcaagatcagtgacgttggattagctcggttagtacctgcgtcagtggctaacacagtgacgcaataccacatgacatctgcagcaggaacgttctgttacatagaccccgagtaccagcaaacgggcaagttaaccacgaaatcagacatattctcattagggataatgctgcttcagatcatcactgccaagagtccaatgggtttggctcatcatgtgtcgagggcaatcgacaaaggaactttcaaggatatgcttgacccggtcgtgccagattggcctgtcgaagaagcattaaattttgctaagttgtgtctaagatgtgcagagctaaggaagagagatagaccagatcttggaaaagaaatagttccagagcttctccgattaagaaacttggggaaggacaatgaaccaggtatattactatacatataaaaccctaaacaaagtcttgaatctatcaagtaatactaacttaattgcttacactttcattaggatgccataaataacaaccgggtctgaagatcatcatatacttattaaatattttcaagacttttgtgaggaactgaatagagagattgcttgcttctcaaggaagaaagtaagaaagtggtaagtgaagtgccatgaagagattactaactaaaatctaatccttgtttatattatatctctgtaacatattacttccacctttctagctttccgatgaaaagtattgaacaaaatgcaatggcttattgttaatgttctcgttgcatgaaacattgtcattatgttcctttgtaagttttaattctaatttttgagagtatgtgatattgatatagatttttgtgtgtggataggttagcgtttaaaaaaaaaaaaaaactcaaaagagttcaactcaatttgggcttcaacatataaaatcacccggttacaactaaaagtactacttttttcttggtatcaatgttaagctaaaagtactacttggttaccaaagaacagagaaattataaaactaaaacaaaaatttaagaaaaagataaactaatcaaaacaatggtgacctttataaactgggaattgatacaaagccacctttgaaagcaaagtataaaaagaaaaatgagtacataccgaaaaattttggagagtgtgacactttttagttctagaatcagttgtattgcttcataacataaactatttttgagtatgagtcgagaaaggaatatcataagtcatttatcaaaatgttgaaaaagctatgtttgcatctttaccctaagataaataaaaacatctaaagcttaacattgtctttttgatattctcaattataatattaactttccagcaaaacacaatccatcaagaaagcatcttagtatcaagccaccttatgatttataaatgtccaaccaactcagctaagcaatgaacattttactccaaacaccatcatcatcatgggcctcatcgtcatcatcattgcattggtcatggtcatggtagttgcatcatcaccgtccgatcaaacaaatgtcctcactcctctttgcatcagcgaatgctccacgtgtcccaccatttgctctcctccgccctctaaaccctctccctccatgtcaccacctccgtctccctcattgccgttatcctcttcgccaccgcctcctccgccacacaaacactctccaccaccgctttcacaatcgctttcaccaccgccgttaattaccgtcatccatccaccaccaccacggttttactatttcgagtccacaccacctcctccaccgctatctcccgatggaaaaggttcaccaccatcagtaccatcgtcaccaccgtcgccaaagggacagtcacaagggcagcagcaacctccttatccatttccttatttctatttctacacggcatcaaatgcaactcttctcttttcttcttcattcttgattgctcttgttgtatcttctctatctatttttcttaacggttcgttagtgtaaaagactcttctatattttgtatacttattaatattgtttattcatttttttttggtgtaatataagatttactttttcatcaatggacatcgaacggcaaaacctacccttaacctattttgtccaagctaaccaaaacctacccttaacctattttatttttttggccaaattaaaccctagattaatctagctaatgcaatttacatgtaacataaaaaaaaaggtgaaatgcatgacagtaatcattttgccgggtacgttggtttattttcctaaccgaaccgaagtctaatggaaccgagtttcggttaaaatcaacttggtttactccttagttcgaagagaaaataaaattgaaagagaaatttcagatccaaagcaggaaaacaaatcacagaaacattttgatgttaagtttttgaaaaaatcgcgagtttctggatctgtatactttcttagaggagattttgatagcatcgtttacaggagtaagatccgggaatg

SEQ ID NO: 28824 - DNA, 3000 bp, Unknown
  misc_feature (1)..( 3000): 2750-1469P.txt file - cDNA_ID_2998872; gDNA_ID_2926222; Annot_ID_142458
tgctttttctgtaccgctgtctaaatatttgtccaaaaaaatactaaagaatgtaacaagaataaaaatgagtaataaataacaagaatttattaaaaaggaaaaaagagtacaatagctctctagtaaagtcaacttgcgtgttcacactcgtcccacaagtttcgtcttctcatccccaaaaaaaatttcttcagatttcttatttatgaaccctcaaaaaaattaatcttcttctacactccaaaaattcaagacctttcagagacaaaaacgtgaaacaacacaacttcgatgaaagccgccgttttccgtaacgaagacggagacgaggaggaggaagaagaagaagaagaagaagtctgtaatgttttcgacggcggcgaggtagagtctaagagaaacaacgaaaccaaaaacctcaaaggatttttcacttctttgcttttgatggaggagcacgagaagcaagaccaggaagctcgtaacgctgcttctcgccgtgaaatgtctgattttcaatctaattaccggaaaagagctagaactatgtccgattactactccgatctcaacgattactacgctgatgctgaggaaagtggagatatcaatctgaagaagtcacgcgtctcacgcgccgtcgcttccgttgctgttgctgctgcttcggagattgaggcggagagcagtgagataaccggatccggatcggttcgtggtaccggttcgggtcagcaaagacggttatgggttaaagatcggagcagagcttggtgggaagagtgtagccgattggattatccagaagaagatttcaaaaaagcgtttcgaatgtctaaatcaacgtttgagttaatctgcgatgagcttaattcagcggttgctaaagaagacaccgcgttaagaaacgcgattccagtgcgtcagcgagtcgcggtttgtatatggagattagccaccggtgagccacttcgtcttgtctccaagaagtttggtttaggaatctcaacttgtcacaagcttgttcttgaggtatgtaaagctattaaggacgttttaatgcctaagtatcttcaatggccagatgatgaatctcttagaaacattagagaacgtttcgaatcggtttcgggtattccaaacgttgttggctctatgtatactactcacattccgattatagctcctaagattagtgtagcctcttatttcaataagaggcatactgagaggaaccagaagacgtcgtattcgattacaattcaagccgttgtgaacccgaaaggtgtttttactgacttgtgcatcggatggcccgggtcaatgccggatgataaggtgttagagaagtcattgttgtatcaaagagctaacaatggaggtttgttgaaggggatgtgggttgctggtggaccgggtcatccgttgttggactgggttttggttccgtatacgcaacagaacttgacgtggacgcagcatgcgtttaatgagaagatgagcgaagtgcagggagtggctaaggaagcgtttgggaggttgaaagggcggtgggcgtgtctgcagaaacggactgaagtgaagctgcaggatttgcctaccgttttgggtgcttgttgtgtgcttcacaacatatgtgaaatgagagaggagaagatggagccagagctgatggttgaagtgattgatgatgaggttttgcctgaaaacgtattgagatcggttaatgcgatgaaggctagagatactatctcacataatctattgcatcacggcctcgcgggtacttctttcctataaaggataatggaaatgttcttttaatttccttctatatgataaactaaacttactttgattctttggtttatgcataatgtattattgtacctttagatcacagatgttatatgaggcaatagaagaaaattaaattatatacacatactatacatttatttccagtctcttttgatgagtgttagacatgaatgtataataagctcaatgagattttcattctctggtgtggactgtgagatgagacaacaacaaggttagtttttaacacttgtgctatgttgttgctttaaaaaacgacatgtttggatgctaattcagtagaaaacgacacacatgtcatcttcttcctagtgtttaggttaccgtcactggtttgcagtctagtggctcttacttagcgtgcgagtcaccaataggagccacttcttttcttttcggacccactgatcagatgtaaaccgacatacgatagaagatttatatcttctcattttcaaatcttgatggtgttataatttcttagaaccaaaccaaatttacataaatgttttaacttcattttcatttctattttaatgaattttgtttgaatatttgtttatttatttttacttcatcttttgttcccattattcatgaatatcatgtaatccatgatccatccatatagaaaaaaataagtttatgtttttttggtgatttaccgtttaatgtgacctatttttgggaaaaggatacaaatgttttgtcatattacttgtatccaatccaaacttgaaatgaagaagcaaatctttatatatgaagaaaaaaaagatttgcatgtaatattctagaaaaaataatctcttgttactaaaaaccccacaaaaaaaaggatgaagaaatagagaatctccttaaaaaaaggcagtttaaaaaacaatggttaatataaatcttgattcccgcttttttctctgactttgctctaagggaaaaaaagaagttagttattcgtcttctttcggagcaacaaacattgaaacaggaagaagagaggagagaaagttaaagaccagaagaagaaacctttcacaataataaatcttctatcttctatcttcttctctcctctcttcttgttcccagacacaactagagaggtctggtaacacctgttcttattcatttcaacatagatcggtaataatg

SEQ ID NO: 28825 - DNA, 3000 bp, Unknown
  misc_feature (1)..( 3000): 2750-1469P.txt file - cDNA_ID_2998888; gDNA_ID_2926223; Annot_ID_142467
ccattgcttatcattttctctgtttctttattcatttgtgttttcgttttacattctttctaatgttttttatttaacatcgagtcttatgttgctcgatatatatatatccatctgattgcaaatgatgagttaaatcaccattgataaaagaagctcaattgagcagtgttggaaatctaaaacttccatgactctgatgcaaatttggatcaagaaaaatcatatccttgatctttttgtttctgttctttctcagattttgttaataatcactgaattttgcttttcaaatgtatttttctgtttaatcttaataattctctgcgtatttctcactagcgttcttaaatctattttttctattaatctttagtgatttttactaacaaggctgcctaaaaataaaattgaatttgatcaagtgcaaattgtactgtacaatatgtaacgaatttgatcactatataagtcacaatgatgagaaagtgaaccaaaaagcttcattcatatacaccaagacgaaaacatgaagaagatggaatcaatcagaagtggttttggtgccccatagccgttaaagtgttgatatcattacaaatctcataactaaacaaaaaaaattaaccaacaatttctaagaatcgatgttttacgatgcatcgttatcgttgtctccatcgaaatattcatcatccctctggatctgcttatcccgtgaacgctctgaaacattccatatataacattagtcactaagaaaacaaagggactaaagtagagccttgaaggtggttatcgatacttacgatccacacgtacatccggattttgttcgtcttcatcaaaatccggtatgtagaaatccggtggaacctaagagattcaagtaaaaaaactgatcagtgttagattgataaaagcatcaatttgtcctatgatgatctgagtttacctcctgcatctgtacgcttggagcgtgttgaatgtatcgcaaattctccaaaatctgcactttgatggaactgatgtatgatttggtattaagattctcctgttttcatttcaaacacaaaaaatgattctcaatctctctttagattttgttaaagcaatgaggaactataagttacataagagctccttacaatgtgaccacccggtatcttcaaagaaaaatccggcgcaaaatactttatgtagtcgttttcagaaatctctgcagaaacaactaacccctgagctccaaagactgcaacattaaactttctctgacaaaatattgaaacaaacttttaataaccattaggaagttctgtatccaaaagaatgccagtctcaacggtccaacaacgagctacattctcctttgtgtatcctccacctcctgtaacctaataaacaatcggaaaaaaactgacttattcgtagaggaacttaattacaaaaagtcgtactagatataagtcaagagagattagataccagtaagggaagattgaacttcttcacgaatttaacacattcagcatgtcctgtgaaaagcatagagaaagccatttcaaaacccgattcgcaaagaaattagcaaacgggagatttttgattacaagaagaaaaagcaccatcaatagagagattaaagcatcctagtcgataatatgagtttgaatgtttgtagaggatatattaaaggcttataatgtgtggaaagccagaggcagataagaaggtaccgttagtgtttttttggtttttgctggactttggaactctttttaggagatttttcagagcattttcattgaatttttaggtctagctaatgtgagtatgaatgtttgatgtttgcagaggatatattgaaggcttataatgtgtggaaagcgagagggaatcccacccgatgcagataagaaggtaccgttgttgtttgttgttgtttgctggactttggaactctttttagaacactttcattgagttttcaggttaagctaatgtgttcgtattgcaagaaacacaatgcaagtttgttcctgatccatatgatggtggagctcaaggttttgagaaggtaattaccattagagactaagccagttgtggattagtaactttttggtttaggcagatgctacctataaaatttcagctatgttgtcttttcaaaatggttgatttggtttataagactttactatggcattagcataccattgttgtcactcccaaattgccttccgttcgagaattttgcaagggggaatgcttatatttcctgtttgatctattttgttaggacaaaagtcacttcgaaagttgaatcttgatctgttacttgtctacctgtttctttcataggtactggacttgctagaagatgcttgtgagtctttgctggacagtattataacagaaaaatgatgtgaagcttgaaacttgctgatataaatcttgttaaactgaactctttacacgattgaatgatatgaactctttacaagattgaatgatattaactcttttgttttatcattattattattaggagagaaatagaaagaaaaaaatatatattgtgtggacgtaactttgtttgagacagtgaatggtggagcatagggacagtaattttgtcgtttgcaatattttccacaaaatctcactatattttccaggaaacatccatggagtttagagtcgtcaacgatctatatcttcagtcacacaaatcgtttcaactacaaaaattccactaaacccgtgtgattcttcaactctctagagatttctcatcctttcatgtatcggtgagattttccaactatttttaagttttgcttaaggttttatcactgtggaatcgaattgattggactggctcttgatgattatgctgatattgatgctttgattagtgttttgagctcatttcttgattatgtgttcttgattttatattaatttcttgattcttcgataatcaaagttctcatg

SEQ ID NO: 28826 - DNA, 3000 bp, Unknown
  misc_feature (1)..( 3000): 2750-1469P.txt file - cDNA_ID_2998896; gDNA_ID_2926223; Annot_ID_142471
acccaaagaaaccatcatttttcgcccaaaacaataaacatttttgaccattcatctccttttttttttaacatcttcctttactttattaagattgaaacagagattacatagttattttttagacatacacataaaccaaaaatgattaacgtttttaaaaaaatacaatcaaacaactgaattacacactgttttctttcgtaagctttacacgctaatagatgatcaaatctattatcttacaactgaattacatactgttttctttcgtaagctttacacgctaataaatgatcaaatctattatcttccttggagatatctccaaccggactgcaaaacaccaaatactgtatagtgttcataatactccaatcgaacggtataagcaacaccaaatatttttttttagtgttttgtgaacagtattacatcatatttggtgtaatactgtagttcacaaaacactaaaaaaaataatagtattttattcatgtttttgatttagtattatatttaaattgttgtttttcactaaaagacaaatacactatcattatttttgggtgattttatttttattaatatgaacttttatttataagtagtatgatatgaaatagtaaattcagacaaaaacatttaattaaaaaatacaaacaaaatatttttcttgtagtttcaatttatcgattgcaattttatattaattaagttaaaataatttagttataaaataagttgtgtatatcaaactataacaaaaataaagaaaatattttgtttaataatataataataaaaagtaatacttttagtgtgaaatttggtgttattgttggagatgataaaacaattgaaacaccaaaacaccatatttggtgttaaaatttggtgttttggtgtgttgtggttggagatgctcttatccgtcttcttcctttatccaacatgatcatcttgtttggctatcgtcttttgacgaaactccaataatcgttaaaatgatccttggttgcgatccatcttttacatagtttcccatcaaaacatctccaacaacaggagatggaatctttcttggctatagcttgtgcccataatggctgaaatggttaataccatcttctgaatctcgttccatgtagatattcccaaaggtccgataattgatgagcgttcataatccttaatcaataataatatccaaggaaaaggtttgcagagatatattcataacatcaaagataacatgttctctacagtctccaccatatccttagacactgccacgaaccggtgctatgaaccggtgaatgcatgaaacatcactccaattcgccttcactgtcaatcccaatacccagatcaaatatacaaattacatcactgtatagtaccacttggcagagggaaatgacaactatcgaaaacgccacttcattcttgggccaatgacttgtacattttataaacgatcaagtcaaatatatcacaatcaaacacgaataaaagccatatttcctcataaaataactaaaagtcacattttactcataaattaactaacctattcatgttatttctacgttgactcaaactaactttatccaagaacaagatgaacgataatcaggaactcaagattcatgtttttaatacatgacttaaattaagaaaatttttactgtaaaaacctaagacattcaaccaaatatgatcaaagtagggattaaaatgagaaatttgaaaactacatgaagccacaaatgtcatattctcaacttggccgatctaccaatctagagactgtggatcgtttatgaaatttcctccgatctttgacctcccatcctccgtgcacaacttctttatctagaacgtgggacgaagcaaatgaatatcacaaaatattgcaaagcggagaggaagagtaggatcaggcccggcccaaggctaaagctcatgaagctgatgctttaggcatcacagatatattgtaaaagttgaggacatcattccaaatttaacttgtggcatagtggtacaactgtactaaaacgtccacgagatgactggttcgtgttctttattttcctttttttggatttttcatttaagttttgtttgttagtgggcttaaaaaaaattttgctttaggcatggaaattgtttgggccggcccttagtaggatgttagccaaaaaaagaaaagaaattaagcttaatgaaaaatatgatacacactagaattggattctcaacccttaggccttggtgcatggctggcttagaataatttcaaacctaaaaaaagaaaaaatatatttaggtttatctacaaagacaatatataattaaattgtataaaagtttttgaatgattttattttaaagtttggcatttttatagtggaaagggtttggagttaactagtattacaccacaactatggtcctaaaagcaatactagtgttctcggttgatagttttaagtcagggcccggatttgcctaagtgaattgccatgagagcaacccaaatggagcactaattttgaacactcgttttacagctttttttttaccgcaccattaattatttacgaaaccgcctaagcaacactaaacaattctgaaccgatgaagactgatgtgaatatctatactaagataactattgatttgagtgaatatgtgttcaattctttaaattgtcctttctttctctggccccctggctttctccttcaaagtagtagtccgaatattccagtgattcttgaaatattctattaaaaagattcataatcgaaccaataagggaaaaccaattatgtttatataaaataaaataatactattcaaccgtttaataattagaataatgattctactaacaattccagctagatctaccttccctccttgtcctaatgcttaacatattcttcttgatcttcttcgtttttcttcttcacaaggtcaacaacaatg

SEQ ID NO: 28827 - DNA, 3003 bp, Unknown
  misc_feature (1)..( 3003): 2750-1469P.txt file - cDNA_ID_2998899; gDNA_ID_2926223; Annot_ID_142474
acttcattctagtaaagtatagtatatagctaaagatttgtctgactaatttagcgatgaaaaaacactctagatttgtagctaattcatagcaaatacattgccatttagcaacaaattaaatccaataaggaaattattggtatggcaatggatggtgataaggaaatctttgccgattagcaacgatttagagtcctagccaactgtcactatagggtaaggtttggtgacaaagttgttgtgactacttctttacatgagttcttaaaacgtttggacacaactacgatggagaatcatttatatttaaagagatttatgggtagctatattgcatgaatatgtcatgcataacgttgtgttttttctggcgaaacatcatcaagcatggtaggaaataaaagaaatataaagaattgttgtcctattccagttgaagttgatcaggttgacaatagtgttgatgcgaaaacaaccatctcacgaatttctttaaccaatcatttaatcaatctgctttggactctagccaaaaataataacggtgagcttttcaaattgcatttgcattgcatatgtttgttgtgtttttatattttttgacttatagctctgaatggtcgttgttgtgatatcccaactttagagtgggaactggtcgtgattatgatcccattagtagagttgatactggtccgattggaacatccggtataacacccgtgcttcatatgctcataaggttttatggctcatgtccaaaaaataattggacccttttttgtatatatctctttgccccttttacatggataccattttgatcttacaaggtgaatatataatgggaatgaaaaggagagcataaagaagagtataacttgtgaataatagtagagagagagagaggttgagaggtttaatttggacttaatttataattcgtattcactttgatacaaaatgagggaaatcaattttgaataaaaatggagcatttattggtatggccgtacgatgttacaagccgcgtaaaatgttttttgataagtcacaaaacactgtcgtaacaatttgataaaatcaaactgaccaccgttgattacgtaggagagccacatgggctcctttgaaacttataccacatgcaaaggaataaaagtcctttagtcaaatatacacatgtattatgcacaaaatttatatcaatcagaattcaatatgtactattgagtattggagcatgagtttttttttgttcttttactgttgttgcatattgacctatattgttgacccatattatctactatttatagatctaccaacattaggaaaatggaattaaagttattagttttctctatattttaatgaataaatagaaacacataaccccgcttctaagaataataactatttgttggcctatattcgtccatatatttcatatgtacatatctgtatgtcaaagtagttgtaaaaaaaaaagctaacgtatcattctctaaaccaacacagaaattagttttacaatttgataatccttggaataagaaatttaaacatttgttccttaagaaactcagtttctttccatgagttatatgcttttaatttataaggtaacgaatatataatctcttacgaaagaaaaaatcctaaaacagtttcagacttactaaatttaataaggagtgcttatattactcttacactaaattttcttaatcgaccgacttagagagaaaaacttacaaaaattgaaaattttcatacagattaattgtattaataataaaattttattcaaaagaataatcactaattctaaccaccggtattaattaaaaagatagtcaaaatttggtagtactatgctgatgatacccatttactaaactcaccattcaaattttgttctttccttttatattaattaaccacacttgttcagctttttcattctgatccaatttttccttatgtaccgtccatcatattacaaccattcggaccttatacatatatagttcttcttattatagaataaattactttcacagtttcacgttaaaccaaaacaaaatgtacaaatactcgtaaaacatttaattgatcaagcataaattcgtaaactgtttttttttcttttgatgaaaatagtgtaaggcaagtttaatacattaaatattacgcatagtcggtgattcgtctatacatataaaagacttggagccgaacaaatagattgtgttgttttcaaacaaattgcccaaaatcttgcaagtagaaaacaaaactgtaccgagtcaaaatctgtcgtcagccggctatcaagaacttttcttttacaagccccttcttagttagctcaagctggcatatctataaatttatgatgtatgattttatttttgttatatatatattgtacggattaaaaatgtacggatttaaatctagaaaataaaaataatctcgttatgaacatttaattaactgataaacattctcagtgttttcttctttcagattttattcagtttttataaccatactttaaattaaaccttacaaagagtttgatacaaacaaagccaaaactagctttgcaaaaaaaccaagtttttcaatgcactaaaaaatatctgccaaaacaccatggagctccgataaaagggtcttcgacttgattgatgtaaccaggatcaaagttgttttttgcactttaaattgtttgaaactagtaactaatataaataaaagacttctcgctaaattatggcaaattttcttcttaatatattaaattctgatcatataaggtcagaggacattggacagatattggttttgtttattttgttaggcttattggaggagggtacaatagactttcttgcaacgtccttagctgctataaatactcttatactacaatgggtatatttgcctcattaataacttcttccgaattagaccaaagtccagacaatg

SEQ ID NO: 28828 - DNA, 3000 bp, Unknown
  misc_feature (1)..( 3000): 2750-1469P.txt file - cDNA_ID_2998909; gDNA_ID_2926223; Annot_ID_142479
gatttataatactattttaactagaaatacgtaaataaaaatggtttatcagttttattcgatttaaaattaaatcaaaccgttcagttgaaggaaaaacattgatgaaagttcgatttgaatcggtttatgttcactccggttaaaatgcataccctaatctcttggtcaatatattacattccttaaaatatcccgtcaaagtaagagatttaataggttcattcctaaacaaaattagtcaaatatttgaccacaaacatggtagtcaataaaagcaaattagattaataatggtgccaaataagttggcaagagtctgatatgcagtggcagaaccataaattatctcatatatatgtatgtatttacttgttcaattctaagtatcacactcaaacaagtatatgaaaaggtacggtatcaggattcctagactatccacaagatattttttctttgtagctagctaacaatattctattttttttacttatcattcttttcttttttttcctcaggttagtaaaagtttcataagtcgcgggtggaagattttttctgttgttgatgaagttttgacaaaagcattttgcatgtttggtaggaaagcctttacatgcatccaaaggagagtatgagaattagacaacttctcgataatttcccaaacttggtaactctctctctctccctcgatattttttctgccaaacactttcgaagtaagatacttataaaatatggaataaagattagtcgcattactgttatgaatttttatatttacattagtagtaaatctcataatttttatttgctattttgtaaagagctttgtgatatattggtattgatcaatgtatacattggatgcaaaacataacaaataagtgtttgagaagacacttaaggttgttatggttaggaattttcatagtcatttgaacaagttagatgtaacaatacctcaatagatttaactcgttcaagccaccactaaagtttctaactaccacaacattaagtgttttcctagccacttatatgttatgttttgcaaccaatatgtttgaggatatattgatgcgaacatatgccctctctttattttataaacattaattcaagattatgcgttttattattaaaaaatatgactactctttattgcatacattgaaagctttactaggaaagggcgttgagaaaaaatattgaaagtgaaagtcttcaaattaaggagattattgataagaatcctaattccatcgaaatccttcgtatgcatctttgttctcaaaaccaaatcttatgtttattcaagatgcagctaagagtagaacgttaaggtcctagctactcgaagattgttaaggttacgagaaataactgcatcgtttgtttgtgttgattgatttggttcatcatattctccctttgctccaaaatccaagtatacttcttttatgatcatatttatttttttaaaataaattctctagtatcaagagaatgaatgtgatcataaaagaactgtacctgaatttttggacagaagacgaatatgatgaaccaagtaaattatcccaaataaccaataaaattatttctagttaccttaacggtcttcaagaaactaagacctttacggtctataattatatgcttcatgtatatttaagtgtttacatccttacgttacattttataataaggattataggactttatttaaatttgaaatgatgtatgttaagaaatagtttagaactttagatagtatataatcatgttggttattaaactcaaattatttggattcttcagtaacaaaattttggtagttatcaccacgtcagttgcaaacaaaatggcctcatgacgaagcagcaagtaagtttttacatgtccttttaacggactatttgtacataatagaagttgaaacatagactgctttcaagtttcaccaaaattgagtttaggtattacgttgaatctgacaaatggtttaaggctaaacccctattaggacaaacactgaaactgaggttgaccaagaaacatctcgaggataagagtccatagtcaaataagaacaaacagtaatggataaagtaagtgataaggaggccgattaggagcagctgctattttttgttgtaaaaactttggttattatgattttaattgtaaaaaattggctgtagagattttgactatggagaatttaattattaaaatctgattagtaacaaaaaaaaactgtaacaacttattttattattattaaatatttttttataaatataatttatgctaaatatgaatttatttgaaaaattagtgactaaaataaatttattatgaaaattacaaaattcataaataaaaaaaattattttacaaattcactattttaaatactccatctgtttcacaatataagttgttttagctaaaagcacacaaattaagaatatttacttttaaaaagttctaccaatcataaaagagagtgcataatatagataatcataaaatattaaaataatatataatttgtattgaaacttgaaaacaacttatattgtgaaacaaaaaatttgatctaaaataacttatattatgaaacggaaggagtattcaaattggatcaaaaataaaataaaagtctatttaattaatcaaaattatttgataataaaatataaattatttatatatttatttattattctctctcaagataaaactcgatttattacttttatgaattaggagctgaaaattctgcaaaatacccaattgggtcaggctcataaatttatatatgggcttaaaaataaggcccaatagatatatttagttcatgaatctacttctcttctctatttatttcactcactgtctctctctgacaattcgaagttgtagcaaaccttgctttcaatcgacgaaggagttttgagttgaggaagtgagtagaaatcaatg

SEQ ID NO: 28829 - DNA, 3000 bp, Unknown
  misc_feature (1)..( 3000): 2750-1469P.txt file - cDNA_ID_2998926; gDNA_ID_2926224; Annot_ID_142486
gagatcaaggagttgcgtttgcttgatgcatcaaacgaggagactacttccctcttacacaacgctcgctatctgattcagaatcctagcattgagcaatgaggtaaacagtctaaaaccctatcaagaagtactatcagccattactaagaatagattatcttctgtcgtccagtggtgtaagaagtcatatatataactttagatcaacatatggttggtttgagaatttagatttcttcagtttcaaaaactttatgatgttttgaaggaaacatagaaatagcttatcatgaacctttctcagctaattaaaaccagaattgtgtttgcttctttattagattttggagtgaatatagaaaatgactcatatctctagttcgatcaaaaaccagtaactcttcattctcttttgcaattcttaaatgtttttctcagttcttgtttcaactcaatctcccaaaaactctcatgctgaacgtaaccctatcttttaaaaaatattattataaaattgttttcttataactataaatattattttaaatgtgtatgtttaactgaaaaaatagatgaactgaagtagtaacaaaagttgaatagtggtgaaattaaattctctgaggtgatatagatggacatggactaatctatatatgaagttgtaaactgttaattcaattaaattcactgggaagaaaaaggtatggcgttatcatgggttcaggtttaggtgttagccaatataggaatcttctaccgttgctctgttacaaaacgacaagacttaaatgtcgggtcgttaccaaactcactggctcatctaaatatctttaaaacgctaacggccctgaccttatttccatgccccacttacatttcagataatgccaaatggatttttcggttcaattttggtttagttatcttttttttcccccggtttaattaacttataaatttcacttgctagaatgcaaagaccaactcaaagttgaccgacggggagagaaattttcataatagcttataattattttttattttattggcaacgacaaagtttgaattatacattaggtggaatgtccatatccccaattcaactaccgactttggatatacagatacctattaatattataagttatcagaggcatatctttatataaacagttatacataggactttgatatgttggacatatgattagctaaaataaattatcaaattccaacggctagttctcacttattttatatgaaaataattttagggatgttatactaacgaaacagagaagacgccacatggagtgattggacatatatatgctttttttttttttttttttttttcttaaccacaaaaattacaggaagactggtacaagctggccaccgataaggaaccttttgggtttatctccgaaaaaagtcaatgatttcaggcagataatacttaatccagtggacaaaaattatatactctttcaatcatcgttctagttcactgtatgtcaatccatataatttgggaaattgcttttgtggtggatatacacgatcatagagcaaaatacagtctgctaatagctgttgcataaaacgagtttttccaaagcattatttatggtttgtgtcactaggtattatgagtcaaatattttctttgttcatccatcggagattaacttagtagtgtgggtggatctgaacataaaatatgatatggtgtacaagtacaatgaccaactaattttcatgatttatcaaatccagaaagtattaagtatcgtatatggtggcttgttaacgagtatattttaaaatgataaaggctgtctcactggtggacatattttgttcacatgttttgtcggttgtagtaatgtaagcgtgtattaaaacacacatactttatacggattatgcagatgaattaattcgataaacaattggtatttgacgacaaaaaatacgatcttaaatcttaattcgattaataacagatatttaacggcaaaaatatagtgttatattttaacccgcctaaagacaaaaattaaagacgaataaaaactttttattgcaacaattttgttttattaggtgaaattaaagaccaatcttaccggataaagttataaattaatttaaaatttatatggtcactgttttatcgatcctcataacttgttcattaaattatctagtttcaaaaaaggtacaaaatccaatacattttccagtttacacgttatccatattttaagaaaatttcaaacatttttagagaaaacaccaatataccatgtcaactatgtatactatttttgaaatgcaccaaataataataaatctaaagatactatactataaaaagaaaaattaacaaaacagtgtttatgaaacttaagaaataaaactcatcactaaaaaaaaaaagtgaaaagaatagagtaaaagagagacgaagttggtaaattaagaagaagaaaaggaaaaaaagaagagtagaatggggcccacaaaagaggcccaattaagtggcatcacgcacaaacacacaccgtcacaaatactcttcttcacacagctttgaatccatctgtcttctcctctctctctcttctccatttgcaattatgataatgtgaaagcaattcgaagaagaaaagttatcttcgcacctcagcaaagatccaatcgattcgattcttaagctttttcgtcttctccgataaggtcactacttagaagccgcgttgtggtttagttgactcctccaggttttatcttcaagctttttcgtctatcagatctggtgtcactgtcttctcataggtacgattcattctctccctgattcagtatcaattggtgaattttagctctagatttcgagatctgtcgtaatttagctactgagatcagtagattcagtttccttgtggaataatttgtttcttctctgtgaaggattacatagagatg

SEQ ID NO: 28830 - DNA, 3003 bp, Unknown
  misc_feature (1)..( 3003): 2750-1469P.txt file - cDNA_ID_2998934; gDNA_ID_2926224; Annot_ID_142490
agcaacaatggcattacttcagtagaatgtatcattctcttgtgttcaatagatcccgccgctatattagatagcacccaagcagcttcctacagaatcgagtatagtgatgaaagcttcatataattgtaaaaaattaaaaccacaacgggaatgtgatactgaccttctttaaaacacggtgctcgcttcttaagcactttgcaagcacaccaatgatgctttctgaaatttagtttgcaatataagtatcttgaatatataggattaaggtgatgatgtttaacccggaaaagataatagatactagccttcagtgttctgttcacggataagaattgttaatactgctttgggatcaacagcgacaaaattgcctaaacttcggagaacctggattcacatttttgttttagagataatcaagaatgcaacatttgaaaattaaggaccacgtagtgagtattctgattctaatcattcatgctaatatgagtataaatgacatcgatgggacttggaactggaagcaattgaatagcataatctgaggtaatattttaactagaatcctgtttcttttggacgataaggtctatctgaaagttaccgggatgagaagttgtaggctacttgaggttgctaatctgtcaataagtagttgaagaatgcctcccttcaagagcatacttgtagcgatatctgagagggcagataggtaaacaatgatccatgcaatttccgtggcagtttcctcatccctgaatccaacaatcaataatattttgatcaaattattcaccaaaattgaacaatagaatatcaatggcataaaacagacccctataaatctaaagaatcactaaaaagcaagacaccacaacacgctaagaaattgttgaaattcagagagatgtaactttgctcacgttttcttcaagtgtcgaagaattgcatccagtatcccatcaattttaacaagttgtgctgctgcctttgactcaggtccctgtattaaggtataatgaaaatagtttgtaacaaaggcttgtaaattataaccaaggtgataatatccgtgccaggtttttccccaccttaatcagatttgacaatgcccatgcagctgttctcactgttgaacccttgtcgggaaaaatcatacgtgctagaggtggcaaagccccttgagacaaaagaacatttctcaaatcttctccttcaccggcaacattaccaattgcccatgcgcactgctcagccaccggtgcggagctcttttctgaatataaacttggaatcatatgaaatctaatccaacaaaaacaatagagtaataacagacttggttggccagtacaacaaacctccaaggtgagcaatgagtaacggcaatgcaggtaatagagcttttgtttcttcaggttttccagcagcaatgttggtaagacaccaagctgactcaagtaactgcagttagacagaactgtgatcaaaagattacaactctccttaatatatcttctttcaatgcatgagttacttgtcaaaatctacagtaaagtgccggacgaatatataagcaaataaatgcaagaacaaaggtatagtattaaagcatatataaggcaaatgtaacctgttcgtcgggggagccaaatgaaagacactgcacaagtaaaggtattgcaccagcacggagcgcagcttcaacaggagggaactcagattttgataataaacgcctgagttcccgaagagcagtcaccctcttctgcattgcaccttttcccctgaaaattgagataagaagtagatatcagaaaaaaatcacgaacaatacctgaaacagtgaagaaaacgaaaagaatgacaaacaaaaattgacagattcacttactggtattgaacagcggacttgagctcttccacagatttactggcttgagcctccaatataggctgctcttcatcaaccatcatctcattctcaacaagagcatcctcaacatcgccattagtacccaccctacaaagccgctttgccctaaccagtaattcccttctttccttcgccactgtaacagcttgttttcgtcttctttgtcccgcaacatttccaactacacaccaccatttccagaattacaatcaaatccatgccaccaattgtaaatttatatggttctgaactaatcaatatacatgaaaaaccaatactaaaaggaatgaagcatctaaatttgttcctaccctaatcaccaactaacctaattatctcgagaagcaaacaaaaacactacactaacactactcaggtgccaaaatcaagttgagggtttacagtaaaagtcagaaggaaaatcacctgaagactttattgggtcccttcgattagaggcggagccatcatccgccattgaagaagcttgagcacagcaagtttcttcgagagtagggtttttgattcggtaatttcaccggagtaagaataggatttcgccgaaaacgaattggttaatttggatccgttccctcgcgcccgcccagcaaaaaaaagaaacacgaaaattttgccgactcatatttgcatataatttcatattagtccctagtatttccaagtatacaataaatagcccatttaactttattaccaatttccgaatggatcaacgatcgtggtttcacgaagtctttgacattcgcctatgttgcaaactaaaataatgacatggcgactcatcattggttctttacgtacaccgtaatctaatgtgacgcatgtggtaataactcttgtgtcataatacacgtgtcacgcatccacatgatcctcttccctgaacatgatgagttcacaccggctggctttttctcacccacttttccgtcactttctcggttcattttctcgagaaaataaagaagacgaagacgaaacctgaaaccaaagccaaattctctcgattaacagaaattcctttggatctatcgtcaatg

SEQ ID NO: 28831 - DNA, 3003 bp, Unknown
  misc_feature (1)..( 3003): 2750-1469P.txt file - cDNA_ID_2998946; gDNA_ID_2926224; Annot_ID_142497
agaaaaaaacaaatcaatcgtcaatgaacccatgcttgttctacttctaacaaaactttcgttatgattttggctaactatgtacatgtttttattttattttttgaacaaagatgtacatgttttactaggtgaagtttattactagactatcatttcatcgcttctgaatttatttattagtgaaaatagaggttagatttagtgccaatatattgttcgatatcacattttgacttctctcgggtgtacactaaattacgtttaattcttcgtattacttttcttggctttaattttgtttacgagtaatttgtacttccaagttttgtaaaatctttatataaaaagtagtggaaaaataaatacaaattacaaaaaggcttttttgagttcctaaaactttttgggagtcaaagatggtgctctctttaaacaacgggaactttttgcatcgacctatatgctttgttcttgggacacagaacattttcctttgccaaatacaatttcttgggtggataaaattttccttttatattaaaataggagttgaaactatgtccaattaaattaatatgtagatccgaaacatagctagtacatatcaacgtagattttttataaaataagtaataaataaagagctactgtttcttagtctcaaaataccttataaaaagatattgttttgttttataaagaataaaatgaaatttgttaagaagatatatatatatatatatatctcaattagtctatatatagggagtatatatatatatagttattgattactgcttctaaaatatgcaacaattatattggtacgtatataaattgtttttttttaaaaaataaataaattcaatttgtagaaaaaaaaaacttattacaaataacataaaacaataaaatgccgaaactaagaaaccctttaaagttatgaccgtaatagttaaatgttgtatctacaatcctttgaaactatatctatgtgaatgaagattttagttgaataaagaataaatccaaaaatatcatcaaattatgcatcaacattaagggtgtcaaaatggatcaaaattcatggatcaagtcaactcaactcaatccgtaaactctaatgagttcaaaattttgactcaaatgagttgatgagtcaaatgagttgatgagtcaattggtttgatgagtaaaatgagttgatgagtcaattggtttgatgagtaaaatgagttgatgagtcaattggtttgatgagtaaaatgagttgggttgtaatggttaatggtttcaatggtttacccaattaacccatcaagttttgtaaaattgaattaaaccaactaaaatctctaaaccaatgccaatttaagtttaaccaacacaactaaaccgatttaataaaattaatatttttctaaatttcttaaatatacaagcgatgaaattgagaaaaaagtaaactcgtaattttccaccaaaaaacataaacccgtgattttcctgccaaaaatttaaacccgtgatttttcccccaaaaacgtaacccgagatttttctgccaaaaatataaacccgtgatttttctgtcaaaaacttaaacccgtgattttcccgccaaaaacgtaaacccgagatttttccgccaaaaacgtaaatccataatttttccgccaaaaacgtaaactcataattttcccgccaaaaaacataaacccgtaattttcccgccaaaaacgtaaacccatgatttttccgccaaaaacgtaaacccgtgattttcccgccaaaaacgtaaatccgtgattttcccgccaaaaacgtaaacctaagattttcccgccaaaaacgtaaactcgtaattttcccgccaaaaacgtaaatcttttaaacaccgtgattttcccgccaaaaatgtaaatccgtgattttcccgccaaaaacgtaaacccgagattttcccgccaaaaatgtaaacccgtaattttccgccaaaaacgtaaacccgtgattttcccgccaaaaacgtaaatccgtaaaaagtggaatccgtaaatatcctaagtttgatgataatgaattaataatgataattatttattattgttttataatagtaattaattaaattattatttaaatgggttaatccatttaacaactcaacccatcaaattaaatgagttatgggttgacctaacccatttaacaaaatgagttgggtcaacccataactcatttaaccctaaactcatttgattatgagttgagttgagttgggttacccattttaacacccctaattaacatacactaattgatgatatatatttttcaaataacaatatcatctaaaatataatttagattacatcccttaaatatttataccttctcccaacttataaacacaccatagatgtacacatgcacgtgtgtctatctaaactgcaagaaaggaagagactggccttttcgaagaaaataattatttacaaaaaatcactttcccttttagaaaataatttactagtcgactacaaaaaaaagggtagatctctatatgtacatctcccagatctctcaacattatttatacaattttttcttttattcctgcaagagtttttttttgtttataacaacaaatcctctttcaatataatctttatatatacgtatactttcgtgccttgaaattttcttcctcatcttctttggtcttttcttgtcatttggcataaccaaagagtcaagcacattcaaacattctcaagccctaaaacccaaaaaaaacttatatgctcttgttcttgttcttcttctcccctcagcatattaaaccctaattaactatctcttttgtttgtatactgttataaacctcctgatcatcttcttgttttcttgcaagattttataaaaaaaaaacaaaacccagctgttcttgttcttgttctttagctccgatccgttttaaattaaaacacagatatg

SEQ ID NO: 28832 - DNA, 3000 bp, Unknown; identical to SEQ ID NO: 718
  misc_feature (1)..( 3000): 2750-1469P.txt file - cDNA_ID_2998950; gDNA_ID_2926224; Annot_ID_142500

SEQ ID NO: 28833 - DNA, 3003 bp, Unknown
  misc_feature (1)..( 3003): 2750-1469P.txt file - cDNA_ID_2998964; gDNA_ID_2926225; Annot_ID_142513
taatgatctattacttgttctcttgtacaacacatttgagaacagaaccgtgaaggctcatcttttttcttcttcttttggttaaggttattgattcctacgttgctgatcagagagttggctacgcagagccagcttcaggagtggagctttacctttgcccaacacgtggggagactctagatttgctaaacaaagtcatctctcaagaacagctcgatgaggtcaagtctttggatattggattggttggagttgttgtgtggagacgagccgtcgttcccaagcccggttccggttcaaaacgtcagcattctttttcttcttctattggttctaaaacctctgttttgcctgtaaacaagaagcagagagtgcatgttacagagaaacctcttgttgttgcatcaatgagaaatcaccatcatggttatgtgaaacatgatactgctgctgatgatgatgtgccgcctggatttggtcctgtggcttcaagagacgaagatgatttaccggaatttaactttaattcctcggttgtgccagtttcttctcctcagccattaccagctcaatctaagtctttggatcaagtaagaaagctcatacacaagtatggaaaatctgcaagcacttatgatgatgatgacgatgaggacgacatacctgaatggcagccacacgtccctagccaccagcttccaccaccgccgcctccacctctcggcttcagacccgaggtatttagaccgcctcaagatggttggtatgataatcaaaacggaggatcagggcaacactatgagcggaaccagtcaagaaacagaggattttaatatctctgttgagtgttctctgtaattgtagttttttggtttcctagtctctctttagtttttcgttttcaaaaaatttgtagccatcgtagaatgcaaatgttcgaagagtcccaacttttcaaataaaacatttcagagtttcctcaagaaaacgaaaatcagtattgctctgcttttaaagacaagtttgattgtggaatcttgctaaaatgtcaaaatcttgtttgaacatcaaatttaatccggaaatcagcaagtaatttcttctatctaggtttcaccatgaatctaaaaggattattgaaaatgaggctaacgagagtaagattttttgatgggccgctcggctcagagttcaagcctgcaggaaaatttgctctaaacggatgaagatttcagtttatttcggtttacaagttaataataaggttataacttataaagattctcctttgtcaaagttactggtactagttttaaaaggatgattacatatacaccataataaacatatcaatatcatattattcataggaaaatccaatccacagatggagctgcaaaataaaaaaaggggtcaaaaaagaccagactaatctaatctgcccaaacaacacaccactcagatttgaacttccaaaactatacattttccaactactcacatatcatcatttctcttagataccatcaacttcattgatacaatacccccattactgtacttattatgggtatgcaaaccaaaacaaaagaaaaagaagaagaagcaaaacttcacaactaaaggattcatgagatcaggccgatacaggtgcattagggataaccgatgatgtggatgcagcgacttcagtagattttgatgttgaaggccctgactcagagatatccccaatatcaagtgtctctggcaggttttcttcagattcagtgctgtatatctatatagaaaaagagtgatcaaaatcatcacttaagatcattacatcaaacaaaaaataaacgtgagtaatgaatatacctcaagctgattcagcatctcaatggttgcttcaagatcaccgccattagcgaggtaaacatcagtgatagactcttgtgagagaccagagaaagtgacaagaaggtattcaatatccatgtctatatccatctccaaatccaaatcatcatccctgatctgcttataagccatttcagaggatttcttcggcattgacacttcaaccgtgggggactttgctgcaaacaccaaaccatcatcaccgccaccataatccactcttttggagattggtacatacgatgctgcatgtggattcaatgcaaatgctcctggcttcattgctttgtcttgctgataaagttactgctaaatttagaagttaattaagagtcagagacagaaaagaaatacaaaacaatgatatattgattagaaccaaacatgtcgtatgcagcaaaatctaacaatctcaaatttggtctaacgaggtatgatgaaacaacctttaatgatttcaacaaaaaaaaataaaaaggatatgaagagacctaactcctaagccaacgtttcgatggcgtaacacagagtatataaggaatctaaaggaaataaattgaagatattaaaataaagaaatgtggttacattagaatctggctcgcgttgttactgcatggaaaaatcgatgtcggaaaatacagaaaacagggcaaaagtaaaagattcttgacaaagaagaaatgatgcgaagaagagtggattatatgcaaaacaaaatgaaaagaaggaataatgtttgttgaccttgtcaacgatcgacgtaaaaggagaagaagaaacgaaacattaggagagaagaaaatgagcttaccaaacaaaaactagcgttgaagatcgctcgaataaattgtagagacagagacctaaatgatgcgattaatgtggcaaacccatgtatttatggaattattatcgtataggttagtgtccgtttacatgaaggacaccaaacatcacgatggggttcgtttggatacccggttatatttatctttaaccgggatactaatatacgtgattgaaattaattcggtttaataaaccgattgataaccaccggtttaaaaagtatcaaaacgaaggagtgaatggatg

SEQ ID NO: 28834 - DNA, 3000 bp, Unknown
  misc_feature (1)..( 3000): 2750-1469P.txt file - cDNA_ID_2998972; gDNA_ID_2926225; Annot_ID_142516
tccaaaacataaggagcatcactcatgtcctgtgcatactcacccaacatccatataagagccgccttggctttcggttcctggatatttttgctgctgatacccccaacaacagaaatgcagtcatggctccattgtggatacttccttagaaggtcctttacaagaacctagaagaggaaccagacaagtggaattgttatgaaaatgtaaacaatataagtatcaatgtgatggccaatcatctccgtgaatagttcaaatgatagtttaccaaagtttcagcggtcacatagtccttttccatctccagaaattgaagaagtctatcaacaatcgcatttacatcatactgttgcaaagcaatctttccaactgctcgaattgactctctcgcaattgcaatatcaacgtttgcagcatactcacacagttccgtcactgaaaagaaaaaagtacgaattagtccaatcaaagagccggaaaagaaaggttttctagcttcagattccatattgacatagtttgaaatcattaccgatttcgtaagtgttgctctcgtttgcaacagcagtcaacatctcaagcttcaactttttgacatatgatggttcattgtactggcagtagaaatgcttatagtctgcagcaaagatgaatggcgcacgaacaaccaaaagatgaaggtggctcaagattgcatacgattgctctggacttccagaactgacaagagttagaagtggggatttaatacgctcatatacctatacaagatcatttggcattagttagacagtgatcatcttaaatgataacaaatcaatgatgactatgattgttaagattagattttaagcttccagactatgtttccaaaagtaatataaataatgcttcactatgtggacaatgcagagactattttacaaatttgttcatgaaattccgcacataactaatttcattaggaataattttcgatgattaaagatagaggaggtggactttaaacctgttgatgaacatcagtcatggagagagttaattgtaaaaacactttgactgttgccaagacaacagctccattggcatgctgcagtctgtcttccaacagattcataatgtcaaaaatatcattactatctgacggcacatattttactgccaactcaagtataagacattgtgcccattcattgaattccttgatcctgcagtgaaacaccacaatggtaaataccactacaacaacaagttatactgatagacagttgaaggaggagcttaagtacataccgattcaagaaataatatataactggcttgctgagcaaggactccttttcccggcatgcttcctcagagtggcttgcttctaaactccaaatttcttgaagtgcagacaggcaattggcaactacctgacaatatattttatatcaaaacattaataattatacaaaacaagtaatatgctagggagtcaagtccaattccatccaacaaaacattatacatacaaaacaaaattaacctgagcatctgaatcatgaagcatcaaacttttcaacgttgcaggaaaatcggcatcaatgcatgttgagggtgagatgtgataaagctttagtactccagtaacagcgatagttctaacatagctattattgtccttgagcccgctccccaagggaccaaccagatactccacaaggtttggcactcgtaaagaacacaagctcctcaatgcaagcccacggatcatagggtcctcatctttgcaatccctttgcagaaaattaatcgtcaaaagagaaagatcaggattgccctttgcatagtttccaacgtaaagataacacatcttcttcaggacaatgtctgatgttgccgagcacatgaccatctctccaaatacagatgagacgtcaatgccaatagtcatgtacgatattactttcttgtagaggtcacgtttggaatcatcaactcctggagctctgcttccagctagctggcgaagctgggttttcagatctgacacttcgcttttcctgataaataacaatttctattttcaattcatgcttcatttgaccaaatagagatcagatattatcgaccatactcactgcatttaggaatcagattctaagtggggaaaattcaaactaaatggcttcttctgattccacattagctttttgacataacttagctcggactggtaaaactaggcactaaaactagatctgctaaatgagagcttctgaatttctggatttcgtataggaataatacagatcataaaattcgagaagtaatgagctgacggaccacgcatgaaaagagatgatcgaatcataaagattgatcccagctaattatctaaaaaatgtaaggtgaattcagtgctattgatcgagagaggatggatagaagcataagttaccctgaaggttgggacggtgacggataacgctgtgaagcggccggaggagccatggttaataagattgcgattcagatatgataaattattacgccgtgagatccaccggagtatgaaccacgatatgtcaccgatcggagagaatcccaccgtgatcagaagcacggggtgataaatttgagagagattttggttcactggtcgaagtctcgtccgtgcttggagaggtggaaggagatgccaacgacccgattttgctatatactccttatactttttgttttctttctaatttacccatttactctctaattagaagatagtggcgaaatgatacaatcgttaaaatagagcgggcaaattgtaatataaggaaagttcatcgtccagattaccaccatcaaaacgtagcgttttgatgtggatattgtttccccgacctcctccgcatccgtaagttcagtcctacatccatggctgctcacagaatctaaagagaactaaaaagctcataagactattacttagaagagaatcgatcagatatg

SEQ ID NO: 28835 - DNA, 3000 bp, Unknown; identical to SEQ ID NO: 28834
  misc_feature (1)..( 3000): 2750-1469P.txt file - cDNA_ID_2998972; gDNA_ID_2926225; Annot_ID_203465

SEQ ID NO: 28836 - DNA, 3000 bp, Unknown
  misc_feature (1)..( 3000): 2750-1469P.txt file - cDNA_ID_2998974; gDNA_ID_2926225; Annot_ID_142520
acaaaataattctcgtttttaatctttaaatcattgtttttttttgtttttctttaattacattttttttggttgcaaaataaactattactacatttagtttgtggtaaagattttttgctgatagtcttagctgagattttacgaatggaaaattttctggaattgcatagtttctttctagttttttccttttttttttttttttctcacaacaccttaagcgtccacgagcagctttaccttacacaaatgacaagtctatgctaatcataaccgaagtgtgtaatatattgatttgtattaatagtcatatcataactaatgttcaaaaccgacattgtatgtgaactagagatgattaacaaaaatatcttattgttagacattaatatatactataagaaattaaactactattttcatatatatacaccgcaaactaactttgataattcgtatttggtgctgcatacataaagaagcatttcaaaattgtttacattatggataataaatcgttaacatgaaattctaagcaaaaatatttaactaaatatagagataattttaaaaatttaagaattaccctttttgtgttgttttcagattaccatactctaaaactttcacaagcatttggtatagaaaaaccaatattttctcctattagttattcttttcaaaacagaacaaaatgtaatatttctagaaaatgctccattattttataggtcaaacatagattgccaaattaaatttggaaaaaaaaatcttttgctgtcatttcttatgagcttatataaatcttaaaattttgaaaagacaaaaaaaaaaaaaacacagataaaacaaggtgttactaattactgttaccactttggacgacctcgtaagtcgtatctatataaacactcgaattttgtgaaataatgaagggagactattagagctcaaacacgacataatatgaaatatgtaccgtttgcaatattattacatcacaaaattccaacagtttcatttgtcgtgtaagcaattaagttttctggtatcattttcagcatttatggtttcgtttttcttatgatcaaaagagtgtcaaatctaacgtaacgatccatataatctcttcggtcgaaaactaaaatatgacaaaagtttaaaactacatcgttactgagttgcaatataaaatacaaagttaagaaattctattgtatatatctaaatacactaaactatctatcaaatagaattattgattcatttcaacttttttgcggtttcagaatattccataaattccactgcaacaaaaacaacatgcaaataattaatttcttctccatggtcgaactcaaattaaaattttgtctacccctctcaaaaacatatatggaccaaccatttattctgtagaaacattaaattaacttattttatccattaaagtatcagttataaagcaaagcatcccaaaactcatcagaaaccggccactaaaaaacaaaggtatatgagacataattggcgtcttgaataatctcttcacagcaaccagtttttacaacaaatcccaagctcaacgaagccatcgacgatccaagtaattggttctctattcttatatcgggtcagaatccatttgccggacccaaccaaccacccccactatgggataggaaggacgtacaaaaacatttagacgataaaaagtggatttcgcatatcaacccaggacgtgttacaattttgatgggttaacttaacctggccgtggatcagtaaaccagccctcgaaccatcaacacctgataagtcaagtaactgagtaagtactttcgaggatacaaatttctttcttggagaagataggagaacgtcctcgtatcaacgaaaaaatatgaagattataatttgccggatttttaaattaatcgaatgctttgcttttcagcaataatctggttttggactaaaatgatcttggattggaaattgtgtggtgaagtaagaagctctaatcttggagctcatcttattgccaagagcgtgacaatggaggatcgccgccaatcgtatgtagcaagcggatttcctttttggctgaaacatctttttgagaaagaaagaagtattgcttagtgtaatattcaacgtggttgatctagaatgattgtccttgatcctaactttttgtatatttggttacaatcttgaatataaaatatatctttcagtgaaaaaaaaaaaaaagagactaaaatgatccattatccaaaattgtaaatcatataaaagtaatttaaaataaagattaaattatactaataaactagaataatcaacataagcttgatatggggactagaccaaacaaacttctatcatcgtaagttcgtaaccacaagtaaccatcatcaatcagatatttaatatatttcatgttacactaagtattaaatcacatattcatcctcttcaacaaaggtcgttgacaaaatcaaaaacaactatacgttgatcatattaataatctctagcattttggttgtttgttattttttattaataacagataaataaataatttcacatttaaccaaaaaaaaatactagcagctaaacaatgagcattgtaaaatctcccaaacaatcaaagagtttttctctatataacattattggtagtgtaaaaaatgtaaaatttatgttagattttcaacaattaaaatgcgaatataaaccctatttttggagtattttaattccctgttttcccggctttttcatggataatcttacaaagactttttaatatcttgatgatgatgatgatgatgatgcttcaggcacgcaactttatgccaagcttacgtggcaaatttggatagccaaaaataaattagaagaccaaattgatataaagaaagagatcttcgtattcaactatttcttcattcgtaaacaaacacacacgaagcaaaaacaaaaatg

SEQ ID NO: 28837 - DNA, 3000 bp, Unknown; identical to SEQ ID NO: 28836
  misc_feature (1)..( 3000): 2750-1469P.txt file - cDNA_ID_2998974; gDNA_ID_2926225; Annot_ID_203469

SEQ ID NO: 28838 - DNA, 3003 bp, Unknown
  misc_feature (1)..( 3003): 2750-1469P.txt file - cDNA_ID_2998976; gDNA_ID_2926225; Annot_ID_142521
acgttttggtatatacatcacaatttgtcaaacccgtaattaattgcgccaaacaagaaaaaatgatcttatggggcaaaagtaaatcacatatatggcagtgggaagaaaaaaggagattatatttttcccctaaaatagactaaagtaacaaacctaaatttctctggaaagaattatatcataaaacctcgaagccgacaaaaactaagaaaaaaaaaaacaatttaccgaagaaagaatattattaaaaaatacaggaacaaggagagagaaatgtgttataaaggataaagcccactaaaggtcattcacttatctaactgtatactattattttcttcgaggcaatatataaaatttacttgatctagtaatttattttcactaaggtttagtattcttatacatttgtataatagttaacacaacttaacgatacttacttctaatatgtatcaacacgtacgtacagagccacgtaaagaaaaaaaacacacacacaatcgctgtcgaacagttaaatcccgaatctagatttgtattagttatctaatcgtattattgttaattccgaaagtagagtcaacatccaattaattgctttatcaaatatcgaatatgcaaaaggtctaaagaaaaacaaagtttttttttgttgttaaactttgcttacatcataggtatcccattaggttggtgtaccatgtgatgattctaccaccgaaaaaacagaagccaatattaaaaaatacatctatatagtacatgtacaataacaataattaaggattattgtattatattttaagaaaaaaactaaatagggttatgtgaaccagactttttttaacacttttactgtggtaaactttggaaagggaaaaaagagtgttagggttaatatatgtatatataattcatttattggggaaatgggctcatctagggtaacatcacctacccatacaattttatcatgcttttagggcttttatttatctcactggtccctcaattcctccactctctcttcccttcgcgtgaacaacacgctccaatgtctccccttcgtatgtgccgacgctccttacctctccgcgccacggacgaaacgtgcccacacgcgaaaagtaaacgccgtgacatccacgcgcctagggttttcttttcatcaggacacaagtgaaaaatgggttgtgataagaaccgcacattgcggccacgtggttaattctcattggtttcttgtgccccatcctatcacacacaaaaacgtctaatacgatttaaataaaaatcgggttctttcctaatataaagaaaaacactgagatcttttacttaatcttgttgtttaatttctggatactgttcccctaagccagctattttctactaatgctcagatttctttcttaactaaacatatgcataaaattttctccttttattcacttttgacagatacagagatacaaagaacagatacagagatgtacaaatacagatacgtgtacacaatagaagtaaaaagatacgtaactttgtttcgtgtaattggaaataggcagaccagatggtgacatggcattgtcatgttccatagatgagttgttctttttttaatataaaattattacaataaattaataaaaagattattttattgaaattaaaacccttatatcgacgcaaagccaaacaaaaaaaaaaccctcatttcaaggataagagagctccactttctctctcctctcctttctccaacagtctctctctacaagccataggaaaaaaaaaaaagtccccctttctctctccctcccctttcgtcttagggtttctcgaaaattcgcagtcaaattctactcatctcccgacgaatccatccttcaagctcatctaatcttcttctccgtagctttctcaatctaccgatatagtttttatcccttgccgcttaagatcgagctcgaatctcgcaaccccttttaatccctaatttctggtcggattaacccaggtgcgttgtttccgacatgaatctcagatgtgtttcgatttaaggtttgagctaaggtttgatcttgttgggttgagatttggtctgacttgtagctgacttcgtgtcttttaagcttcactgttcatttatacgtctatcttcctcggaaactcttgatgttcttactttttttttttttttttttttttggggtttcgtcttcacggactattcacgtgcggatagatctgacccgtattaattggtgggtcttggttaatctttgttaatcacatacggttaatttaagtggtttattatcttttaattttgttctaattttgattttaaaccctaaattacgctgattaataatttgacctttcttgggttttgtaattccgaaattatattgaatctggtccgatcttcttttttcttttgctggtcatgtagataaggttacagctttggggtttctcgtctgtctgaaaaaccctaattttaggtcgtctaagtttaggtttacttacatgttaattgttaaatgtataaaattcacttgcacgattaattttttgttatattagcgtaattgaattgagatgctagtatagaatttcattcttgattttatgtagaccttagggtttaatttttttttatttgccgtgtaattgtgaagtttgatgttggttatgaatgttattttatgtgggatattcatgtgaaatgctttaacactatgttatagattagttatatttattgcttgaataaatttagagttatatttggtgtcgtatatatggaaagttaagatttatgtcttgatatacaacaataatgtgatcattaagcacaattatacgatgtgttatataacttgttttgatgtgttgcttttgtagctctagttgcggagagagtataatggtgtatgaaagttaatcatcactgaggcatagtatctatctccttcaagcaaatcaatg

SEQ ID NO: 28839 - DNA, 3000 bp, Unknown
  misc_feature (1)..( 3000): 2750-1469P.txt file - cDNA_ID_2998980; gDNA_ID_2926225; Annot_ID_142524
tttcttggtcatctcctttttgctcttccttggtctttacgatcttgttatcgtcccattactttcttgggctctaagagaaccctttcgattgggagttatggtgagaatgtgggctgggtatgtaatatcggttttgtgcatctccgctcttgcggctacggagtacgcgaggagaaaaacagcggtaagtatccaatccggattattgttcgattcttgtttggtttttacatttttttttgtaatgtgaagctcatacgtctgttttattttgtttgtgattgattacttcactagagagacgagagtggtaccaagttgtcggcgatgtggctattaccgtacatgatattaggaggcattgcggaagcacttaatacaatagcacagaacgagttcttctactcagaacttcccaaaaccatgtcaagcgtcgccaccacactctccagtctcaacatggccgcagcaagcctcatctcctcctggatcatcaccatcgttgacgttaccacttacgggagctggatcacagagaatatagacgagggacacttggactattactactggctcttggtgggattatctttgctgaatgttttgtattttgtgtggtgtaagaaatcttatggtaaatgtagtatataaatataacaagtgttgagaaaattttataattcataaaatttgattacacttcaaaaatccttttgtttttggactttaaaatttttgaggactactagtctggactaataccacaaggttgaatgaaaccaaagtattctaaagcagaaaataatttgcttttagtttattacgttctgttttaacaatatgttttagttattcctctattgaaggggaattcgtgggtgcatttcttccattattccgctcaaaaaggttttacgttagtgtgttgtgctttggtactatctttttttctttttttgggtgtgtaaattgctactaccttttgttttatacaaatgccacaatcaatgaatgaattaggaagtaaaactatatatcaattggaatgccgctgagaaagattgagacaaatggcttcattcctaacacattcacaacattgcaaaaaagaaaagaaaaaggagccttaaatgttggaacgttaaatgttgtgttcttgacgaatctttgaaaggtttgggaagatcctaaacttcaccaaggaagctgaatgggtttacgcatactacacaaatgctgctccgttccgtacagctaactaaaccaactgatttatgaaagtcaacaggatcggatgttagagtcaattccattgtactatgtcttttggcttcgtcttgctgaaagaaactacacaacacgaacacatctgtcatatgtgtaataaaatagataaaaaaaaatgctggttttatttttcagaaatctaacaattttgtttctattttggttgggaataacaattgtatttttttttttttttttgacaagagtgttacttcatatatgagccattacaaaagtagacaaagccacagtaagcaaaagcctatcaactagtacagaacaagattactaagacaaagcttgacaatcttttgagtatacctttgcctacttcggccagcagtcatgactcttatacttgggaagtagacaacctctcttccgacaattctcaatgaagttaacttggaactacttcaggtcccgtgaagaggaaaaaccttgggttcctacggtttggtttaagaatgctgttccaaaacatgctttcaccttttggattgctaatcttgataggcttcctgttaaatcaaggctccatgattggggaatgcaaatctctcctctttgtggagtttgtaacactgatgtggaatccagagatccctccttcttcactgcaactttgcagaggagatttggtattctatgatgagaagactaggtcaatctccatgtatctttgccgactggtcctctcttatttcttggctgctgtcaacgactcccaatctctcttcaaacttgaagcgaattgctgtacaagcaactatctacttgttatggaaagaaaaaaacataaggtaccatgataatgtctctgttacttctgcgatggtctttacccaattcgacaaaagcatcaaagacatacttctagcaagacgtttccgcctcggctgcacaagtgtactctccctatggtattcccatgcttaacaaactcaactagtttcagtttctctgtaacaattatctcaggcttttttatttggatagttttgataaatattgttgcgtttcatatacaatattgagaattaagaattcactaaaaatcttaattaactatttcacagatatacaattgtaaattcttaattaaaaaatgtttttgataaatgttgttgcgtttcatacgtggcatttaatcattggcttgatgccaacaaacataaaataaaataaaatattcgcttgttctgcagaagaagaccttaaagcacctcgacgattatcttccacaccaaaagtctctctttcatctccagatctgctgctgaagataaattagtcagcaatcgtcatagctatggcgattagggtttttcttacccttctcctcttcttatcatctgcaattctatctttctctctttatgaagatcaagccggcctcactgattggtacttcatcctatttcttctgtctctctggaaaaaataaaattagttgacaaagtttcgaatcttactacttttcgatttcgaagtctaactagagctttcaccaatctgactaatccgaattcgcagtgtatctagaatctgtgatttagtgttcttagatctcattagctagataattgttgtagtgatatctagtggatttgagatgcgatcggggtcaagctatgatttgatgagttctaaggaattaggattgaatcaactagaatctatagaaattagaagtgtttttgattgatg

SEQ ID NO: 28840 - DNA, 3003 bp, Unknown
  misc_feature (1)..( 3003): 2750-1469P.txt file - cDNA_ID_2998988; gDNA_ID_2926225; Annot_ID_142526
attataaaattttctcaacacttgttatatttatatactacatttaccataagatttcttacaccacacaaaatacaaaacattcagcaaagataatcccaccaagagccagtagtaatagtccaagtgtccctcgtctatattctctgtgatccagctcccgtaagtggtaacgtcaacgatggtgatgatccaggaggagatgaggcttgctgcggccatgttgagactggagagtgtggtggcgacgcttgacatggttttgggaagttctgagtagaagaactcgttctgtgctattgtattaagtgcttccgcaatgcctcctaatatcatgtacggtaatagccacatcgccgacaacttggtaccactctcgtctctctagtgaagtaatcaatcacaaacaaaataaaacagacgtatgagcttcacattacaaaaaaaaatgtaaaaaccaaacaagaatcgaacaataatccggattggatacttaccgctgtttttctcctcgcgtactccgtagccgcaagagcggagatgcacaaaaccgatattacatacccagcccacattctcaccataactcccaatcgaaagggttctcttagagcccaagaaagtaatgggacgataacaagatcgtaaagaccaaggaagagcaaaaaggagatgaccaagaaaatgccgtaagagcctggaggaatctcgaaaccctgaatgaaggtgtggcgatccatggtcttagcttgaaggactatgaaggagacttggcaagccgtgacaagtgacaagatgatccctgttgaccaaattggtatgacattgatgagagatttaagatcttctacttgttgcaccctacatagcttccatggattccttgagttccctgttagggctaggtcttgcttcgaattagttgtgacgcaagctttattcaaatacctatattagacaatatttatgcatcaggtttcgttacacaatcatatttttgggaacgaataatcaacaagaagagaaatactattgcaacttgcaactatatataccagcttaaaaaatccagttatagctaaatttgtatttagtaaaatatctttgaccatacaatttgatttacaaagacctatagaataaataatatacctcaatttctggctaggaattgaaaatgaagaccccgtttcgtgatgatacgatataatatgctcttccgatgacaaatcaacgtgtcggtttctgaaaccttacatagtacggagacgccgcgaagaacaaagcgaccgatagagccatggcagcgacagaaactccaaaaccgatctgccaaccatacgttgtctgaacgaagacgagcaaagactgagaaagaaagcatgcgaccatgacggagaagtagtaccagttgaagagcgtttctagggatgatgtggtgacacgtgatgtctgattaggttggagctggtcggcagcgaaggctaagcaggaggatctaacgccgccggcaccaatggcggtgagggcaaaaaaggaatatagaagaacacttttgagcagtgtggtgggttggcacacgtttgttaatttatcgcattctggtcgaattattgttgtcagccataacaaaaccattccctgttactcacaagcaatattaaattaaatacaactaataaagcaaaagttacataaataaaataatagccacggaaaatataggatgattacatattttttgaaaattctacaaatgattattattaatgtatagtataattacatgcatcattagaatatatagttatttgtttttttttatcaatgataatatggactaggacttttgcaacaattgtgttaagacgcaaggttctccagttttcatatataatttcttatctttctccaatttcatttcttgttctgattttgtgaggttatgacatcaaatatgtaccgtaaggctgatggaggatccaaacccgatcagaggaaaccgaccggtgtaagaatcagcgataaaagcaccaacaagagggaagaaattggtggcggcagaccagaggaaaaggatgttggccgcttccgctgttcccatgccgtattccaccgtcaagaagagtatcatgttcggtaccaaaccaaaatatgcaagtttctccaaagcctgacttgctatccaaaaccatttaattaccaagaattaaaaaaaaaatacgtaaatctatctatttttatgaatacggagtttatatcatatataagaatacaagaattgattatacctagaatgaaaggaatggtcggaataccgcgcttcagaagagttcttccgacgagaagagcttcttgatccattttcagtctctttctcttgaaggtttttttactcttggtggttttgataatatatgccttatgttatgacgttgttcccatgtcgcgatcagattagcgatcagaaaaatcattttaacgatatctaattgaaaacaaaagtaagtatcctacctaacctaaacaaggtccatggaaatatttttaaagttttattataaggaataagaaattaaagttttgttctcctttttcgtttgtttgcggcatgaatcttatagaaaagaactaagatatatgctttctccacgaaaatcataattttatttatttatccaacattcataggctcatttacgaataaagacttgagagaacaacgacacaataacagatttcttttcaaaatcatgtttactattttttcgttgaataaaactgtttactaaagactaattatgggtcggataatttattaatgggcctatttaaacttataggcccatgtaaataaagtagaaaacaggctacatcttgagtttgctgctaagactgagactgaagatattttaacttttttaagcacagagtgctgatgatcggtgaagccttattttagaaagcaactgaggacgaaccttatccgtcacagtggcaatg

SEQ ID NO: 28841 - DNA, 3003 bp, Unknown; identical to SEQ ID NO: 28840
  misc_feature (1)..( 3003): 2750-1469P.txt file - cDNA_ID_2998988; gDNA_ID_2926225; Annot_ID_203474

SEQ ID NO: 28842 - DNA, 3000 bp, Unknown
  misc_feature (1)..( 3000): 2750-1469P.txt file - cDNA_ID_2999002; gDNA_ID_2926226; Annot_ID_142534
tacaaatcacaaattatgtttaaatatattaatccaagatctaccacaggtaattccctcgattttttttaatataatacaataagaatatttaaaaataacaaaaagaatatttaatataaatgaagttatctggtagaacgagtttgggttgatattcatacgggacgataatctacgagtgaaatcttagaattaataattataacacaattatacaatcttaaacactaaacaaaagaaacaatatttacaaaacaactataactgaaaattcgaatttttagttacaaaaaaatcgaccaacggtgtaccgcaaagtaaatttcacaatatatcatctagttgatcaaagtctaaacaaaaacaattaatttgtatatatatcaaactaacaaaaatacacagattttccaaatatctatatattattccgcaaactgaaacaaaactaacattcgatttactatgcaaaatacaattgaaatataaataatataaattaataaaacaaattagctattgtatcataaataacattaaacacattataatttatacattccaatattttttattaaaaatgtattccaatacatttcttaaaatatgaaaccccgcacgtatgtgcgggtcagaatctagttatgaattaagatagatacgaacaattaactaatgtgaacactaatctacacatttaaataaatcaatattttgggtgacaagaaaatatgttatatcatatttttcaccagtataatatataaatttttaaaaagaaaggtaatttatattacctcaagaagagccgacaacatgtaccgattcgaaccactaaggaacacaatgaattggtaaaaagctttaaatatttctagaactacatatatttttgatcagaaaactataataatatgaggtttagaagtaagaccaatgatgataaacataatattattttttagttatttgtttaacaaaaatttgtgcctagaaaatttaaataaattaccaacaaagtgtgtacttaaaattaataatccctttattattaaaagggaagtacaaattgaaattttgtctaatttggcctcaattttgatttcaattttggattttgttctttgctattcaaaatcattaagggtaatttggtcttaacaatctcctaaactttatatgatccgattcaatttaaaccgttcaataaaattaattcccttcaatctaaaccgttcaacaaaaataagaaatctatatcgtttttgaaatcaaaatatgatcacaatccatccctaaaaacactatattcaatcatgaagtcaataatcaataatatccaaatcatatattacaattcttcactaatcattagaaatttatatttataagtttaagatatcaaatttattcatatatttagtataagaaccaaataaaccgattgcccgcggtaaaccgcgggttaaaacctagtttattagtattaaaattgtcactatggtttaggatcttgtggcttccttttaacttttaaggtgaccggagagtaggagaaagtgtgtgaggacgagagaaagagattgcttgagctttgggaggatataggagaaggagtagtaagatgatgactcagtgagtttgtaaaatgtgactcgctatatgggatggagttttaaccatagtaaatcaaagaaagtgagtcgaagaatgagtgccttgattgagttcgttgcagggctggctcgagagatcttgaacacgttttacgctatttggattctcgcactctttggagacagattttgatcggaatagtcattgttattctcctatgagattagtgtttggtgtgtcaaatttaaatatgagtatcattatcatatgaaatatgtttttttggtaaagctaaaacgaatcacattaatatttaaggtctcacaattatgttagcacattaattattaaatattgttattaaaatagttggtaggaaatcgatcaaattttttttttcacttataccacagtttcctacgaaattctttaccaatttgttttgtaggaaaagtctcacgaaagttttaaccatttttgcttttcttcaaacaaatttcgtaagaaaattgtaagcacagctctttccttactgtttcctacgattggccattagtaaatgcaatgttttaggacatatcagcaacaacctcgaaaagttttgttccttgtactcagtgatgatataagttgttttgtggtagtagtgaagctattagcttaagtatgcttttaaacacaaatacattacatgattaattacatgtcaaatcttaaaaaaaatttaatgaacttgcactgttacatctcaaaacctccgacacattcacattaattattgtactcaaatgaagtgtgaatattcaatggcctcgtctcgtctccggctactatcaatgggttgagacttgactttaaaattctcaaacgctttaattaatgatattattataagactggcctaatattttgaccaaacttaatatataatgactcaaataattcctagttggtcttaaacaatcaatactttgttgtccgaaaatcgttaaaccaataattcaactaccattttaataggtgaagtagttctctttttgttgctaattgaatggaatggtatctatttgattactatatatatataaaccacataatgccactttgtgactaataagcaataataatttaggcattaaaaataacaactagcaataatcatcacgcgataagatttaactattgatatcttaaagaaattttagttgtatggtgtgctgagtagatgatgaagccacttcaacaactggttgtaaaatatattttcaagaacttcatatacgcacttcgatagagatcacaacaattcataaaccaaaaaaaaagacaagaaaaacaacacaaaaacaagacatcaaaagcttcgcctaaggagccatg

SEQ ID NO: 28843 - DNA, 3003 bp, Unknown
  misc_feature (1)..( 3003): 2750-1469P.txt file - cDNA_ID_2999032; gDNA_ID_2926226; Annot_ID_142547
agtagtagagcttttagggctatggctaagcctgttgttggtgttgacaaataccttctcaaacaaggcatcgtcgacgttgaataccaaaggttcgatgcttgaaacacttgacttattggtttttttatagtcacttgatgtactaataagaaggtttgggaaatgaaaaacagagttccttgcaattacggtaaaaggaatttgaacgtgagagtggaagaagcaagcaaaaagccaaattacttggcgataaagctattgtaccaaggaggtcaaaccgaagtggtaggtatcgacattgctccagtaggttcgtcacaatggagttacatgagtagaagccacggagccgtttgggcgaccgataaagtaccaacgggagctctacagttcaagttcacggtgacaggcggctacgatggcaaaacggtttggtcaaagagggttcttccggcgaattggaactctgggaggatttatgatgccggcgttcagatcaccgacattgctcaagaaggttgtgatacatgcggtcacatatggaactgactcattacaattctccttatttaggcaaacaacaaacaaacaccctttataggatatatacatgtatgtgtaacagagttcattatttaatgagttgaagaattcacaacaggagtggcttatataatctggattaaacaaaagaactagagagtaaaggtcatgctaaaagctagagtccatgtcaccaaaaaaaacaagaaaaacaaaaaatgtcacttatcattgcaagcaagaatccgacaagaaaaaaaaaacatatcttagagatgtctaacaattggaaaacaataatgtatggaaaggtttaagataggtcaaagaagaaactgttgtgtctttatataaattagtaaggaaacatagtcaaaaaggtttcgtggtgtagttggttatcacgtcagtctaacacactgaaggtctccggttcgaacccgggcgaagccatttattaattttgatttttttttgataaatttccggttcaaatatgcgttgaacgtagagatttgattgaatctgaaatctaaaaatcgcaggcttaagttagtacttgaatcattgttatattcgcagttatcttgagattttcgtactgtacatttcaatattttatccatcttgatacatttacatatgttgtgatttataattagctagaaaatcccctcacaaataactatttaactaaatggaaatcaatcaaagataatgtctcattctcatctataaagtcttaagcatctcttcagtgaaatttctaaagttaaagctggtgatatatacatctatcctataggtttcaagttttttagtatgtcaagcaatgcaaccgctgcaatataagtgcaactattttgaaaataaaacatttctaatgtcatttgaagtggcttgaatgaacccaactacacgatggactcacttaaacaatactcacctcactggactcctttaaagcccgcaccactaaaaaaaatatactcttcttgttactagacattagcctataccaaatcccattagccttaattttcgatatgcatcattaataaaagtcagtggttgataaagaaatcttacacacaaaaaaaacttatatattgtatatcccgacaatgaaaaaaaagagatatagaggggagtattatgaagatatcttcacatgtagtaatcaatgccgtatgagtcgttctcacatggatgttttaaggtaccaatctttgaatattttgaagatttcaataactcaaaatcaacaaaatctaacatacaaacttttgacatgtccgaattaatactaacacatgtatcgatagagtttagtgataaatcacttagccctaatgctctacatctaattattaaatgtgtagactttcatttttataagctggtttgttagtggaaatgagttgttatgaactaaatcctagctaatccctagggaaaaaaaacttgggtagatttttcattttaattaacgaacgatacaaagacgtgtgtagagtctatagacgaagtgatgaaaagggtttaggcaaaaagagaaagatagaaagaaagtgaaattggttttggaatttgttcttatctttcccctacttcccaaagcaatcccgtttttcaggtttgtctctattattaaaattcattcttaacttgatatggtaagacgtgtttatagatacacttactgattttataataaaaatgcaaggatttttgaaatctgttaaaatcaaatctttatcaaaatgtaataaaatcaataaacgaggaataccatatttcaaaagtattaagcgaataaaaacacgattttatttttaaaaactttggtatcaacgttatgataacacatgattatgtttagatttttaaatcaattaaaatccgataactctcactaatatttttcttttatatgttttagttggcacaaattaaaaaaaaaatctatcccaaattttttaaatatatgtattattattggttaggttttaaaaaagaacaaatatgggttatttcgtttattaattagtttcgacactctaacaaatgttttgtcccttacctaaagagaagaccgtcatgaacaaagcaaagaaaagagtcggtgtaacgccacatcatcccatgactcatattggtaaaactatcttctctctttcacacttcttctttttactttggactaatgatttaatcaaagatgtcattttaacatatatgtataaaacgcgtaattgggaagatacacacacacacataccagctatgacgtgacagtgtgtgttagatattgagatgatgagctggcatcaacctctctatagtctctatataatccattctttgtcctctcttctctttacatgtaaattcacatatctctctctcttatttgatcataaagatattattgcttcttcaagtaaacaaaaaatg

SEQ ID NO: 28844 - DNA, 3003 bp, Unknown; identical to SEQ ID NO: 28843
  misc_feature (1)..( 3003): 2750-1469P.txt file - cDNA_ID_2999032; gDNA_ID_2926226; Annot_ID_203509

SEQ ID NO: 28845 - DNA, 3000 bp, Unknown
  misc_feature (1)..( 3000): 2750-1469P.txt file - cDNA_ID_2999036; gDNA_ID_2926226; Annot_ID_142551
agcttgcgaaacatgctgtttctgaaggaactaaggcggtgactaagtttactagctcttgaattgtggatcttgttgaaatcgatgtttgtaaaattagggttttttagatttgatggttgttgttgactctttgatcgatttctgtttcgttttcttgttgcgatgttaatcaaatcggatccgatttctttcttaaatcaaatctatcaagtaaaatcttttgctgaaacgtctgctaaattatctcttcttcactgcaaatgaatcggttgttgaattagcctctcgcagcatttaaaaacgtcgtcgtttcgttgggtatctgtgtttcttctgaaaacggcgtcgtccgctcgagcatttaacctagaaaagctttatttttgagtcatttccgaaatccgtttggattactgttaaagatggctaagagaatctcagctcaactcttcgtaagcagtacgagaatggtttcttctttctgattttagtctcttgctctttttacttgctctggtttctgaaattgttctcttgcagggttatctgcttataccacagatcaatctctgaggcaattgttctctccttttggtcaaatcaaagaaggtaaaaacctgaaattgaatttgtttaaggctcggttatgaactaaatttgtgtttgtggggttgtttagctcggcttattagagattcagaaacacagagacctaaaggattcggctttatcaccttcgattctgaagatgatgcacgaaaggcattgaaaagcttagatgggaaggtgagtaaaaaaatacaattgaatttctccattaacaacacttcaataggtttctagctttcttgtttaatgtacgctaataagagattagcttaagaaatttgttctgtaatgaatcattaacatatccataagttccatagggctctaaattcattgtagaaatgccaattagggtctgaagctatatcgattttgttcctctcattgtgactaataacgttgttttgcttctttagaaatgtattgaagttgtattgggttattttgtttgtgtcagattgtagatggtagactaatatttgttgaagtagccaagaacgcagaggaagtgagagcgggtattaacagtaataaagccgaggaccgcgggtaattcaggcatctcacactcactgttgtcatcatgtagatttgtctacaaaattgatctaagatcatgagttccatgttacaaactctaaagctgtatgcaatttgtagtctagtgactagactctagtctagtttgtagaaaaatctttgacactgtctgtactcttgagctgattctgggcctcttttcttaaaataacattattgggcctattgagttaacgggcttcaatgttatatgcggccaggctctagagtcacatgccggtaggaaacctgtcgcacaaagcaaactcctaactctccacgtgtctataaacgattggttgtaaccagcgtcactcagctggttcccatcaccgctataatcaaagtttcagcggaaaattggagctaaaagagccccattgattcatgtacctttcatttagtttcgatatttcaaaagataattagcatgttcttttagttcacgctgcggcagcggtagcaacggtaacgtctgagtaaaacgacgtattatgaaaaataacaatttaaaacgacaccaaaacttgaaaataacagatttagatgattcgctgatgacggacgatgagtcgcaacagcatcaaatgagtcgctcaaatttaacagcggcaccttaatcttcatcgatgttcatcggctgtgacagtttttctcattttcttctttctgcataattgattttcttcttttctcccgttgccgctgcgttaaacaaaagatcgtggctaataaatatattcgacgccaatcttagtggcatttctttttctatgtaggaaaagaatagtattatttccctttttctttgttacattaaggacataccaactagaatattaaaaatttgaaaccgatacatgaggtaccaagttcattcaagatactcctatatgttaataaattatgaagagtggccatcttcttaaatcgtttagacaacaatatttttgaaaacggtcaattaaagaagaacccaaaaccttgcgaactattttataatgtagtttatggtcaactgcaaagtctgcaatgcataattatgcagtagattatgatttagaacaaaataacaataattactaccttttgacccaaaaaaaattaacaataattttatattttaattttgtacatttttgagtgatttgctttttgaacttgtgatgttaaaaatatattataaaatagatatgtgttttaccatttatttaatcagtatttgaatttttttcctatcatcgtttttcataaatcttagttatcttttttttggagacgccgaacttattgtgaaaatgaagtatattttttgtagttgttgtggtgttacacatcaatattttttacttcttaaaagttgaatcaagttctcaaaccaacaaactttttatcgaatcaatggtacgacgaaattcaaaaatgttattacttactaattttatagatagtttaaaaatataaattaaaaattcagtttatttatataacaagaaaaatcagtgttattattgaaacacctaccaaaataatgaatcaaaaacataaaattaattatagtattgaattcataattcaacaatattattgaaaatttgaaatacataccaaataataatagttttttttcgtctctataatatggtggactcccgaataaagttgaagaaagaaagagaaaagaaattgagaagaaaaaagaaaaaaaggtgaccgtattctccgtcgattgtagccgcccgaagaaatatcttctcctctctcgtttaaccacgaatttgctctgatattagtgtttctctagccatg

SEQ ID NO: 28846 - DNA, 3000 bp, Unknown; identical to SEQ ID NO: 28845
  misc_feature (1)..( 3000): 2750-1469P.txt file - cDNA_ID_2999036; gDNA_ID_2926226; Annot_ID_203513

SEQ ID NO: 28847 - DNA, 1723 bp, Unknown
  misc_feature (1)..( 1723): 2750-1469P.txt file - cDNA_ID_2999039; gDNA_ID_2926226; Annot_ID_142552
atcataacctgcctctttcctctcttctctgcattgtacatactcttaagaccatcattgagcacactgattctcaccattcttcaaaatttcaaaaactgcaaaaacataaatcaacagcttcacgaatcttattgacatgtacataaaaacatctacagagggaacgaattcgattccctaaaaattacacactctgaaaatgacattggaatctagattctctggagaaacatcaaattggggagattaactaagccggtgttccaacaaaacaataaagcagttcatcggattagaggagagatggagattccggcgattactaacctgaaacctaagtagtagccgccgctccgacgtctcttgctcgcttggccttgaaaaagagattaaacagaagacggaactatttttagggttttcgcttttatcgctttcacgggacagattcatgtataactaagcccattataaatacataactaggcccattattgatacataattaggcccatttgtaaccaaacatggactttgtatcaacattgatggcattctcttaactgattcacgtctaggactaacagattattatttaggtattaagcccattttagcccgttaaaagataaaactcgaaattaattttgattcgctgcttaatggcccatttaaaaaggtgagagatgcttagccgttcactgccaacgacggatttattctaatctaacggtacgtaatatattccacgtcatcaatcctcgtgaaacgagaattaaccaatctgtatctaattcatggtcatatatatacatgagctaccgaatcgtctaaacaacaaacacaaaacttgatctcacgactccatcttctaaaattcagaatctttctttgaaacttttttcgtgtgaagaaaatggcaccaaaggcagagaagaagccggcagagaagaaaccagtagaggagaaatcaaaagccgagaaagctcctgcagagaagaaaccaaaagccggcaagaaactcccgaaggaagccggtgccggcggcgataagaagaagaagatgaagaagaagagtgttgagacgtacaagatctacatcttcaaggttctgaaacaagttcatccagatattggtatttcaagcaaagctatggggattatgaacagtttcatcaacgacatctttgagaaattggcatcggaatcgtcgaagctcgcgaggtataataagaagccgacgattacttctcgggagattcagactgctgttagacttgttcttcctggtgagcttgcgaaacatgctgtttctgaaggaactaaggcggtgactaagtttactagctcttgaattgtggatcttgttgaaatcgatgtttgtaaaattagggttttttagatttgatggttgttgttgactctttgatcgatttctgtttcgttttcttgttgcgatgttaatcaaatcggatccgatttctttcttaaatcaaatctatcaagtaaaatcttttgctgaaacgtctgctaaattatctcttcttcactgcaaatgaatcggttgttgaattagcctctcgcagcatttaaaaacgtcgtcgtttcgttgggtatctgtgtttcttctgaaaacggcgtcgtccgctcgagcatttaacctagaaaagctttatttttgagtcatttccgaaatccgtttggattactgttaaagatg

SEQ ID NO: 28848 - DNA, 2360 bp, Unknown
  misc_feature (1)..( 2360): 2750-1469P.txt file - cDNA_ID_2999044; gDNA_ID_2926227; Annot_ID_142555
gaattcttcaatgagcttaatccgattgtcaatactaatagcagataaacatgacatatatcaggagatgagagaatcatgcgtacagattcacacaaggttttttttaacaagaaagaatatacagatatacagatagagaagagaaaagaagaaagaagaccttgagggagtatcgacgatggtgataggtatatagtcagggaaagcgtcggcagggagagtaatcggaggaaggacgcgagggacattatccgggaaagtctcggaggcgacggcagagatcaggctggatttaccggttcctttgtcgccagcgacggcgactctaaggcttgtacggcctccggcggaggactttccaccgagcatcatcggagagatttagagaggaaggaaattggcggttattgtttcggagatgagattgatcgatctaccaacgatgtaacttgccggccgaggatggatgctccatatatctaaccgggttgacccgacacgtgatccgcaaagctcttattattactgtagtatctctatcttcgccatcacggatttctcataattgggccttcctattttcagtttctagaacccaccacaagtgattatgtagctcagtagcttttcattctacgccgtcgtttttagttttagaattttaatagatgaatgacaattttccttaccatttttaaaaaaatcagttttctcattatgctaatatgatcttttattgccatttatctccatattttatattgatagattacacactggcttgtagatattgaggaacataaataattaagcagagcataaacaatggagctcaatttggcctgtgttactaaactggtaacttcatttaaacttccttcaacgactttgtttattctttgcgcttgggaattagccagccaaatttatgtttccttattattttttaaattttcgttttcttttcatctttcttgtggtcaataatttactttttattctttacacacaatattatttatatattttcttataattaccacataaattaaacaagtgccaatcagtatataacattctatagaaaatgatttactgttacaggttagaaacttttaataataagatcgaatattaaactgatacgaccaacaacaactaacacgaaatgactcataaaagaagaattttttttaatcaagatttatttattaccaacaaaacccaagacaaacaagaaaataaaaaccaattacatcgtatctctcattgattttattatccttgtcgggattttatttgaaaggggggataaattaaaaaaggacatcatcaaagcagtacgtaaaagtccgaacgatattacaaaaagaaacacaagatttgctaataaaatgagcttcaacacacgtgtctcccgcagaggctttgttaaattctcactcaccatattcaggcgcccgacgggggagggacggtggcatcgtcggaatcggatttgtccttggaggagctcagcttcttgaacaatggcttaaacacgagctctatcgccagccatcccaccgccaacactcccacaacaaccgtcgctgtctgtttcttgcctgttggtttctccaattttgggaaattgacttctcctcctgacttctccaccattgctgctgcttcttcttcttccttatttttcttcttcacttacacaccgtttgtcttcagactgaattatcttcaactactttaaaagaaactaaaaacagcgatacatttcaaaatatctcgactggtcacgttatagaccgtcgatggaataattgacggtcaaattttggtgagaacctttcctaaatttgggcctaatatgggctgaattgggtttcttactagaaaacaaatcttggtgtcgtgaataagacaagtttggatgattccttctaatatctaaatgaatctcaatcgaccaaggaagataagacgcaaatatagtggacctctcatcatgacacacacatcctttaattggattttgattaaaatattctattcattcatctccccaatatttttccagaaaaaaaaaagcaacgggggcctttctataaaatgagcaaaagaaagcccaaatagatcctgtccggaatagtaaaacgaggaaagcccaaacatagcatgtccggaagaatcgaggtcacgtgcaatacacgtgtcaattaaagcaggagttattgtcgctgaatcatatcaatggcgtgtgaagtgtttatcaatatgcctaggaagaagaaagagtgtaacaaacaaacaaaaaagttagtgaactactaaacaacactcacaccaaaaagacgacgatg

SEQ ID NO: 28849 - DNA, 2360 bp, Unknown; identical to SEQ ID NO: 28848
  misc_feature (1)..( 2360): 2750-1469P.txt file - cDNA_ID_2999044; gDNA_ID_2926227; Annot_ID_203535

SEQ ID NO: 28850 - DNA, 3003 bp, Unknown
  misc_feature (1)..( 3003): 2750-1469P.txt file - cDNA_ID_2999044; gDNA_ID_2926259; Annot_ID_204687
cctgcggaggcggggtttcaaacattgtttttcttgatcaaacaagggaaatgttggatgaaggaccgcttttgatgcaaaatagaaaacatcagggacctgaaagaaaagaatccagatattttagtggcatacaataaggatcactctaggcatggttcagttttgcttggtctttcagcattatctgttctaaaggttcctagtatctatacggaacattttctctcttagccaaaagataatctttaaactgtagcagaagatatttcggtcagagaacaaaagcaagaagatacctgtataagggtcaatgcagaacactcaatgcaggtttctatctctcggtactccttcatgattggtgacataatatcctctagtctggcgggagatcgttcatcacgtaaatcaagcttgcagcccaccacaatcacaggtgctttgatctagatacattacatacatatataattataacttgaaaacatacttgtaggagaatgcgaagatacgatatttcagcaataaataaataagaaacctctaaacgccggagctcagggagccaataagaactcaagcgatcaagagttgaaggctgatcacaagcataagtgagaaggaccacatcagccttcctgaattcttcaatgagcttaatccgattgtcaatactaatagcagataaacatgacatatatcaggagatgagagaatcatgcgtacagattcacacaaggttttttttaacaagaaagaatatacagatatacagatagagaagagaaaagaagaaagaagaccttgagggagtatcgacgatggtgataggtatatagtcagggaaagcgtcggcagggagagtaatcggaggaaggacgcgagggacattatccgggaaagtctcggaggcgacggcagagatcaggctggatttaccggttcctttgtcgccagcgacggcgactctaaggcttgtacggcctccggcggaggactttccaccgagcatcatcggagagatttagagaggaaggaaattggcggttattgtttcggagatgagattgatcgatctaccaacgatgtaacttgccggccgaggatggatgctccatatatctaaccgggttgacccgacacgtgatccgcaaagctcttattattactgtagtatctctatcttcgccatcacggatttctcataattgggccttcctattttcagtttctagaacccaccacaagtgattatgtagctcagtagcttttcattctacgccgtcgtttttagttttagaattttaatagatgaatgacaattttccttaccatttttaaaaaaatcagttttctcattatgctaatatgatcttttattgccatttatctccatattttatattgatagattacacactggcttgtagatattgaggaacataaataattaagcagagcataaacaatggagctcaatttggcctgtgttactaaactggtaacttcatttaaacttccttcaacgactttgtttattctttgcgcttgggaattagccagccaaatttatgtttccttattattttttaaattttcgttttcttttcatctttcttgtggtcaataatttactttttattctttacacacaatattatttatatattttcttataattaccacataaattaaacaagtgccaatcagtatataacattctatagaaaatgatttactgttacaggttagaaacttttaataataagatcgaatattaaactgatacgaccaacaacaactaacacgaaatgactcataaaagaagaattttttttaatcaagatttatttattaccaacaaaacccaagacaaacaagaaaataaaaaccaattacatcgtatctctcattgattttattatccttgtcgggattttatttgaaaggggggataaattaaaaaaggacatcatcaaagcagtacgtaaaagtccgaacgatattacaaaaagaaacacaagatttgctaataaaatgagcttcaacacacgtgtctcccgcagaggctttgttaaattctcactcaccatattcaggcgcccgacgggggagggacggtggcatcgtcggaatcggatttgtccttggaggagctcagcttcttgaacaatggcttaaacacgagctctatcgccagccatcccaccgccaacactcccacaacaaccgtcgctgtctgtttcttgcctgttggtttctccaattttgggaaattgacttctcctcctgacttctccaccattgctgctgcttcttcttcttccttatttttcttcttcacttacacaccgtttgtcttcagactgaattatcttcaactactttaaaagaaactaaaaacagcgatacatttcaaaatatctcgactggtcacgttatagaccgtcgatggaataattgacggtcaaattttggtgagaacctttcctaaatttgggcctaatatgggctgaattgggtttcttactagaaaacaaatcttggtgtcgtgaataagacaagtttggatgattccttctaatatctaaatgaatctcaatcgaccaaggaagataagacgcaaatatagtggacctctcatcatgacacacacatcctttaattggattttgattaaaatattctattcattcatctccccaatatttttccagaaaaaaaaaagcaacgggggcctttctataaaatgagcaaaagaaagcccaaatagatcctgtccggaatagtaaaacgaggaaagcccaaacatagcatgtccggaagaatcgaggtcacgtgcaatacacgtgtcaattaaagcaggagttattgtcgctgaatcatatcaatggcgtgtgaagtgtttatcaatatgcctaggaagaagaaagagtgtaacaaacaaacaaaaaagttagtgaactactaaacaacactcacaccaaaaagacgacgatg

SEQ ID NO: 28851 - DNA, 3000 bp, Unknown
  misc_feature (1)..( 3000): 2750-1469P.txt file - cDNA_ID_2999046; gDNA_ID_2926227; Annot_ID_142556
tgttgatacgacaaaaaagcgagagagagaattatttgatggttaagtgtggctgactaaactttgatttgattggtaatgacagaaactaattgatgtatacatgaagaagatagaggagctctacaaacagaaagaaaaggtaacagttttgtgtcaatgtttctagtctacttttgtatctgatccatcttgtggattgattagccattaattactacacacatatatgaatccacaggaattgatgaaggtgtgaccataatggttgttaggggaggagacgtaattcaacaatctggtaaaatcccgcaatttccaatgccttcgtttcttttactatttgccctgatgtttccttggggtacaagcatgtcttttgggaattgagagcaactttgtttaaattttcggttgcaaaatttttagaagaagcctctgatattttgtttcttttattaaaggatccctctttgtacagcaaaactcttgttaattttggttcatcaccccaattatcaaatcttatttttggcttattgtgtttggaactgaaaatttaaaagtacgtattacaatattagattaagatattctttgtattataatctgataaaataggttattggagccacttcaaatgcgtttatcttattataatcacacctcgccgcattgagaaatccgtcaaacccaaaatatgtttgtctatgtttgcaaagcatcgaaagttgggatcagtgggttaaaattgattaaaaatacaaatcatcgaattattttaattgtctattaaactgtatagtacacgtttttccctccgtagctggcgaatttgacttctctgaacctacaaaaattttataatgataaaaattctatttttttcatctttaaaacgctattacttcatacaggtttaattttctaaacataaatcgctacttcattcaacttatccttccaaatctttcaaattgagaaaaaaatgtgacaatttcacgttttatctatatagcaaacggatgcggatctcgatttaaaaactaaaaagtcccaaaatgacaattagtttattcgtggttgttacttgtaacttgtaacttgtaagacatgcatgcatcaatattcaatagtggtgtgttatttaatactccatatagatatttagtctctactaatattctaaagtgttgttattattattaattaagtgatcccataaaccgagggttaacccatgatgattattttaattagtaggcttcatgggagagtatattttaatttgtctagtcacaataagaaaacattttatgtcactaattattatactggtaatctttatacaaaaaagcatcgatatactactgactattctagtactatatgacaagtggctgagatgttggattccttacatcggaactccaactaaactttcgttaatttgtgcttcaaagtttcattacaataaggtttttatttatttattgatttgtgtttatataatataggatagggtcaaaaacattataaaagcactttaaaaatagtctatgaagattattgtacttactttggttctcccttcatttaactgcataaaacaccgttcgtcagtcaacacttcaaagataaattaactcatactagttgatatatacatataccatcatgtagctttagtcactagtcgaatattttagttaatcttgatatgtttgtttcattcgcattatcttcgtcaattattttattcattcatattttttataaaatagtttaatcttggtacataatttaagttaaagctcgctttgataggattttaagtcgtttgaacccagtcatacacaaaagtggaatacaaaataagaaaaatggttaagtagttcatgacgttatattggtgtgcccaacggtaatctgatgatgatgagccatgatcccatgagagagcgaatcaccgtggatctgtagcttattcgacacgtggcactatgaatggtgaaaagagtgagcctcgcgagtgtacgtattctctatactcgccgtgtgcccgtggcgcagtgacaagttagtcatccaaatatactaacataatttgtacttttactaaatgatcactcttccaaattttttgtttactagtatttaataacatgttttgacaataatatcgttgtaaatcagctttatttttgtttttatataaatttgagtgcagttgttttcaaattgcatatcagttataaaaagacactgtaaaataagcagtcccaaaattttcagtgacaatggtacgtgggtgtcgttcccacgcatatagaccgcgcgtggttagtagtacaacttgctaacattcatataaaattacaaaaaattgttcttttaaaatgtgcactctttttttatatattagatttgttcatacggtcatggagtgaaataatattaaaaatacagcaatgaacatattatattcatatgtttttgggtgggcacaagaaatcaataattattatatatgatagacttgtattaaaaaaaatgtagtcatagaatatatgaataagataataattatagtatgtgatattaaaaaaagggaaacagataataataatatatgtgactaaacattgagcagtggctttattccataagaaagtgacgtttctgccatgctggcatttcgagatcgcagccgtccaaatcacggtaagatccaacggctaacattaagacattctggtcatttgaagatcttgaaccgtcgtctctcttacatccttttttccaggggtaggttttttctgtgcacaaaacatttgaggagaaggagacgacgagagctctgaaactgaaatacagagaaggaagcttcaaaactttgaaggagtggaatctgattttactcagttgatgggagcttagtctttctagcttgcattaatggataaacccagggaagctcgaagatcaacgacaaacatg

SEQ ID NO: 28852 - DNA, 3000 bp, Unknown
  misc_feature (1)..( 3000): 2750-1469P.txt file - cDNA_ID_2999050; gDNA_ID_2926227; Annot_ID_142557
ttgatccaagggaatagcaaatacagtactagtattaaaaaaaatggttagagaagctgctagctagcaagtcagtgataaataagtaaagactatcattcattaaccattattaattcctcaactaaagtcattagaaaaaaagaaaggctaattaattaactcgaagatgctggctggggttaaaaaattaacccaggggtttggttacaaacttcttacatcacggacggggagggttataataataaaggaaacttaacggccgtcagcgagagggttaacggcagattccttgcaaggacttggaggtagacttgactttcctgacgcaacaagacgttgcacgaaaccctctattctttctccgttactctccgttagtatccgttttaccccaaacggcgccgtttccacacctctctctttcagcaactcctccgctccgccgctcgtcaaaccgttcgcctgcatgcatccaccacattttaatatattcgagacattttgatcggtgatctctgtggtgacgagaaaagttgagaatacgtacctggattctaacgtaatcagtacggttccagcagaaagcgttccccagcatctgatcgacggtatcggaaacgccgtcaaccactatgtccaccacacttgacgttgaatagtctccgttacgacggagtttcctccctggtgatgatgacatggtcgacggaccgtttcccaacgacagtacaagcaagtcatctacgccgtttactgacgggaaatctcgtttgttgtgtagcacgtgcgtgacggcagctgctgttggattgttcatcaccaaaccgccgtctacggctgagcatgaggttttcccgtccaccgacactacactgaacggcttgaagaggcttggtgttgctgacgtggcacggcagactttccacagctcgaagtcgaagctcggagactcagacgcgccggcgcgtgagaaaacgaaaggagcagaggttttgaggtcgtagcaaggaacaaggagaggcttacacgtgtccttcatcgtcaacaccttaccgtcctctctcctaaacgccgtctccaaaaccctctccatgctcttccccgagtatctcttgttcctcctgaaaactccggtgtacctgatctcgaagagctccgagttcttctccgcgacaaacttaaccgcgtctctggcagtgaacatcggcctgccggagccgtcgtcggcgacaaggagggcggcgagaatgcctccgatgccagttccggcgacaatgtcgaagaaatcagagatgtgagcgtgagggtcgccggtttgaaggcggatctggtgctcgaggtggagaatagaagcagcggcgacaatgccagtggtaccgccaccgtcgatgctaaggatacgagtcttccgggaggagtcgcagtgagagagccatttctgttcaagctttgtgaaaatgtcaagagtaaccttgctgagatccatctccataagaaaagaacaaaattatacacaactagggaaggataaaggcaaaaacaaacaacgtaaagagtatatcacggtttggagcagagaggctttaattgggggaatgcgcgcgctctctctctctctctcacagtgacgataacgagtaaatacagaggagagactatgcgtttgagtcgtctctctccaagagtgagtggatttgaacaaggaagaagaaagggtttatgagtgattcagagataattccggaatggtgagtgggtggtggtagttatatactcccactgacgacgatgcactgttttgttttctttttctatttatttcccatcgtttacatattttacaatgatattagtatttgttttttcttcttcttttaaatggtgtaatttctctgaagaaaattacaaatataattaacacaaattgaaaaagggcatactataatttttggtaacaaattattatctcacaaataactaaatctcgtcaagtcaatttttattttttaattagccgatgtgaataatcctttttttttgacatatttttttcttttgtttgggcagctaatatttgttgcttgataaaaaaaattatatgttctactaaacaaaaaatgcgacacgagatagttttcttattttttttcccaaacttgtatattatacatgtataattaatctatttttaaaagccttaaactattgctagacacataaatataagtaattcacgaattaaaagaacataaatcaaagtatacttgacaggaaaaaaaatcaaagtataatcagaattttactaaacaaaaaaacattgatggggtggtaggactgttctcgcacgtgtgagtaggcatgtcagtatgaaggtcaaggagtaagcgcgaacctcggctgccttaccggctcggctcccgctaatcacattgttgcctcttcttactaatctactagtatctttttatttaatgctaattaactcttctttatatatctcctatccatcataaatgaaggacgtggaatcgacgacgaaccggcaaaagtatataaatagtttatgaatgatgatatcaatgcaccatttcatttaatatatatttttgaataccctttgacaatttaccctttgatttggaccatgacataaatatgttagaatttaaaccttttagttttacttttcttctggtacaaatcagaccattgatcaccgtaccttcttcgacccaatacaaattttgttggctcaaacccatttcaatatgggctaccatgtaaatagcaaatgggatattacggcccattaaggcccacagaaaagatatatctgaagggattatagttagctgtccatccaaacagagcaagctttccttcttatcccgaacaattcggtctgcttcgtctccctccctttcaattttcgtagacgaaccaacgaaaggtcttttctagtctagtcacttcacttctacggctactgccatg

SEQ ID NO: 28853 - DNA, 3000 bp, Unknown
  misc_feature (1)..( 3000): 2750-1469P.txt file - cDNA_ID_2999054; gDNA_ID_2926227; Annot_ID_142559
ggtcgttgaggacgtgctttacgtgatgagccatgggctggtgttcaagcaagaaggtgacacgtggaagatggttgcatcggcctcagagtttaagcggaggatcggaatggcgatgacgagtttgagtgatgaggttttgatcgtaggaggagtgatcggacctgataggctcaattgggacatcaagcccttgtcagatgtcgacgctttgacagttgggaatgatcgtccggcctggaggagtgtggcgccgatgacaaggtgtcgtgggacgatccttggctgcacgcagttgacaatctgatggatgggaatgtggcttcattatgacgtctttcagttcttttttgttttgtattttcttcctgtttgttaactgttgtgagcattattgtttttaaatcttctttgagaaatgaaaataaacgaatagcagctatgtcttgagaaaatgtcatcaaagcctggttattgtctataaacgaatagcagatttatgtcttgagaaaatatcatttatgagtctggtgaaaaaaaaaaaaaaaaaataggtctattgattgggctatatgtgggaatgatatcaggttgggtttggacaggttgcataagttattttgtgttgggccttaaacaatctgaaagagcaatatgggtttgaacatggagatatttggtcattgaacagaaaaacaaaattgtggtattcaagctctaaggagtattttgtagtgtataagagtaatgattcggatttaagacatgttgacaaagaagcaatgatttaagaaaatggacctctcattatcttgctcatttgctttctttatctttggtaattagggtgatatgactatatccttgataaacacaatatatcggtgccactttcgaattaataataaccatgattaaagatggcgagtcatcaaagaaatcatgaaatggaaagaaatataaaaatttcagtatcgaatcaaatgaatgattagtgctgattccactccaattatattttataacctctacgtcaggtggtttagaaggaaatcaatctatcaagagtcacgtctatggattgggagtcaaaacatatacgtatgcttctggtagtagtcgtagtgattaagggatcaaagttgttagactgaatgggttacaaacacaattacggaatcgatggacacactcattacattaaaaagaaatagcacattcaatggcatatatggatgagtagtcgctatttgtttcttcttatttgtaagaaaattaatcagatggatattcacaaaattagatttatccgaaagaaaaaaaaaaaaaaaaagagaaacccaattgaggcaagaagagaccttgaggcatgaaaacaagacacaaatacacaaaatttccttggctaaacaaaacatagaaaataaaagcttgaatcgacagggggagaagaaaaggccaatatgatcacaacgtcatagaaatagcgaaaaccgtagaggaggaggaggagaggacctacacactcctgtccacatccttttagccccaccgtgggtctatcactaattccttcctctatcgtattatatccgaatacgttacttttctttccctactaggctaccaagtaatatttatgttttcttttgcgttgattatttgtaagtgaagttatgattatacataatcttgcaacttgaaactctttttgttttttcttgaatcttggtatgaatcagaagttgacgagcttaaacaatgaaaatgcgatagttagatgggattcgagaaaaacaagatcaacaacaataaaagtggttcgacgagttatataactttttgggtcaaataagtgattattattatataatttgtcttgtaatggagtaaaacgcatcaagaccattcaatcaaacgtttactagtagacaaacacacgtggcgcttatctagaacttaattattggattaagcaaagcaggtgcaactgtggacccccctctgattacatttgttttttatccacaaactgtttataaaatatttagtagtatagattaacatgtacattattcactgattattgttcctacatttttaaataacgtcactgattctttgattaataaaacaagaaacccaaatgaaagtgaattatgatttgagaaagacaaacgaaataatgacaaaatgccgtattatataataatggatacaaattgtaagaaataaataactcacagttttttttacaaaaatgaaaaatagtagtataaaataaaaggagagcctgtgtttcagaggcccaaacatcaatgcacaaataatgaatgtatcgccgttcaagtgtatacctaataaactaaataaaagtttgtacatgcaacaaaaataaagagagagtacaaattcgataatcttgcaaaagatgtttccaatcttttatcgtcgacccaaaatgtagtatgttgttgttaaaatacacgacgacaaaaaaaagagagtacgatacacattcaatcatatccggtccctaatatgaataatggatcgaaaataattgagatctctatgtgttaataaatgtaaggggtaaatccgtaaagttgcatgcatttcttggttaaatctacaacgtcccgtctctcgagatcactctctctctctcgctctttggaaggaataaagaagagaggaaagagataagtgaaagcaacttttaatctgatttttgcgagtgaggagaggatcatcatttcataggagtgagagaccccattaataccagaagcagtcagagtttctcaataattgtaccaaattctctctattcttcttctctttcattttagatattttctcttacgcagactcattgctttcctctctccatggaagctactgagttatgatccttaccctcaccggtctttaactatgcttagaaacaaacctagagcagccgtgacgactaagaaacaaacatctctgttaatg

SEQ ID NO: 28854 - DNA, 3000 bp, Unknown
  misc_feature (1)..( 3000): 2750-1469P.txt file - cDNA_ID_2999054; gDNA_ID_2926227; Annot_ID_203539
gagcgttaaactcgggtgggatgtcaaagactatggctggccgcaaggtccaatggtggtcgttgaggacgtgctttacgtgatgagccatgggctggtgttcaagcaagaaggtgacacgtggaagatggttgcatcggcctcagagtttaagcggaggatcggaatggcgatgacgagtttgagtgatgaggttttgatcgtaggaggagtgatcggacctgataggctcaattgggacatcaagcccttgtcagatgtcgacgctttgacagttgggaatgatcgtccggcctggaggagtgtggcgccgatgacaaggtgtcgtgggacgatccttggctgcacgcagttgacaatctgatggatgggaatgtggcttcattatgacgtctttcagttcttttttgttttgtattttcttcctgtttgttaactgttgtgagcattattgtttttaaatcttctttgagaaatgaaaataaacgaatagcagctatgtcttgagaaaatgtcatcaaagcctggttattgtctataaacgaatagcagatttatgtcttgagaaaatatcatttatgagtctggtgaaaaaaaaaaaaaaaaaataggtctattgattgggctatatgtgggaatgatatcaggttgggtttggacaggttgcataagttattttgtgttgggccttaaacaatctgaaagagcaatatgggtttgaacatggagatatttggtcattgaacagaaaaacaaaattgtggtattcaagctctaaggagtattttgtagtgtataagagtaatgattcggatttaagacatgttgacaaagaagcaatgatttaagaaaatggacctctcattatcttgctcatttgctttctttatctttggtaattagggtgatatgactatatccttgataaacacaatatatcggtgccactttcgaattaataataaccatgattaaagatggcgagtcatcaaagaaatcatgaaatggaaagaaatataaaaatttcagtatcgaatcaaatgaatgattagtgctgattccactccaattatattttataacctctacgtcaggtggtttagaaggaaatcaatctatcaagagtcacgtctatggattgggagtcaaaacatatacgtatgcttctggtagtagtcgtagtgattaagggatcaaagttgttagactgaatgggttacaaacacaattacggaatcgatggacacactcattacattaaaaagaaatagcacattcaatggcatatatggatgagtagtcgctatttgtttcttcttatttgtaagaaaattaatcagatggatattcacaaaattagatttatccgaaagaaaaaaaaaaaaaaaaagagaaacccaattgaggcaagaagagaccttgaggcatgaaaacaagacacaaatacacaaaatttccttggctaaacaaaacatagaaaataaaagcttgaatcgacagggggagaagaaaaggccaatatgatcacaacgtcatagaaatagcgaaaaccgtagaggaggaggaggagaggacctacacactcctgtccacatccttttagccccaccgtgggtctatcactaattccttcctctatcgtattatatccgaatacgttacttttctttccctactaggctaccaagtaatatttatgttttcttttgcgttgattatttgtaagtgaagttatgattatacataatcttgcaacttgaaactctttttgttttttcttgaatcttggtatgaatcagaagttgacgagcttaaacaatgaaaatgcgatagttagatgggattcgagaaaaacaagatcaacaacaataaaagtggttcgacgagttatataactttttgggtcaaataagtgattattattatataatttgtcttgtaatggagtaaaacgcatcaagaccattcaatcaaacgtttactagtagacaaacacacgtggcgcttatctagaacttaattattggattaagcaaagcaggtgcaactgtggacccccctctgattacatttgttttttatccacaaactgtttataaaatatttagtagtatagattaacatgtacattattcactgattattgttcctacatttttaaataacgtcactgattctttgattaataaaacaagaaacccaaatgaaagtgaattatgatttgagaaagacaaacgaaataatgacaaaatgccgtattatataataatggatacaaattgtaagaaataaataactcacagttttttttacaaaaatgaaaaatagtagtataaaataaaaggagagcctgtgtttcagaggcccaaacatcaatgcacaaataatgaatgtatcgccgttcaagtgtatacctaataaactaaataaaagtttgtacatgcaacaaaaataaagagagagtacaaattcgataatcttgcaaaagatgtttccaatcttttatcgtcgacccaaaatgtagtatgttgttgttaaaatacacgacgacaaaaaaaagagagtacgatacacattcaatcatatccggtccctaatatgaataatggatcgaaaataattgagatctctatgtgttaataaatgtaaggggtaaatccgtaaagttgcatgcatttcttggttaaatctacaacgtcccgtctctcgagatcactctctctctctcgctctttggaaggaataaagaagagaggaaagagataagtgaaagcaacttttaatctgatttttgcgagtgaggagaggatcatcatttcataggagtgagagaccccattaataccagaagcagtcagagtttctcaataattgtaccaaattctctctattcttcttctctttcattttagatattttctcttacgcagactcattgctttcctctctccatggaagctactgagttatgatccttaccctcaccggtctttaactatg

SEQ ID NO: 28855 - DNA, 3000 bp, Unknown
  misc_feature (1)..( 3000): 2750-1469P.txt file - cDNA_ID_2999069; gDNA_ID_2926227; Annot_ID_142563
ctctctgcgttgaaaagtttgtgattctacggaaaggaatatgctctggtggatgcgtctcggttttggttctttgtgctcacaagtaacgacggacgaagattcccaacaaattcacatgacaaactataaactatagtctataacaaattacgtaatctgatttatttctttattatgaattacacaattaaatacagtagtcatcttaaagagagattattacagtggaccttttggtttcgatagattgcgtcacaaaccaaaaaggttattcatttctcgatgtacaaatattattaaagtcgaatgtaaatttacaagaaatttgggggaaacgaataaacggcgacggaagggctgccactagaccgagaagaagcaaagacagacgagctctgtttttgcaagagagagttttttataataaaaactggaaaagggcaacaaaacgactctttggccggtgaaactgtcaaaaagacattaagacttggtctctctcccactgcaccgccgatccttctctacttgtcaaactataaaagaaaaagagtatttttttttgtggagaccaccaccaccaccttcgatcgatttctactaacttgttcttcttcttctttctcaactctcttgtcttttgtctctccaccaattttttcttgttctttctctctccaccacataaaaaaaaaaaacctagctttgtcccctcaactcactgattgaactgcttgattttcgattgatcatctgggtggttttgaatcgaagagtattgttgtattagtggctggtggctctccaaaagagtaaggccggagagagaaatcaatggcctctggcggcggagaggcggataaatcacttgaaatcgggtccgggaccgcggatcccaaaataggcggtactgggagcaggagcgccggagaagaacgatacttcagggcagatacactggatttcagtaaatgggatttgcatatgggtcaaacctctactagcagcgtcctcaccaattccgcttccacgagcgctcccgcaccggcgatgcaggaatgggagattgacctctccaaactcgatatgaagcacgtcctcgctcacggtacttacggcactgtctaccgcggtgtctacgccggccaagaagtcgcaggtccgtcttttctcctagactaagatatatatgattcattaggatagacactggtggtcttttttggggatctcccgtctgatggatgttatggtttgctgcagtgaaagtgttagattggggagaagatggttacgccacaccagctgaaactacagctctccgtgcttccttcgagcaagaggtcgccgtctggcagaagctcgatcatcccaacgttaccaaggtattctttttacattcaccgattaaggtagaagaagaaccttttgatcaaaggacttattcatttgacctctctctctctgtggcagtttataggagcatccatgggaacctctgatctgcggatccctcctgctggtgatactggcggacgtggtaacggtgcacatcctgcgagggcctgttgtgttgtggttgaatatgttgccggaggcacgcttaagaagttcctcatcaagaaatatagggccaaactacccatcaaggatgtcattcagctcgctttggatctcgctagagggtaatctctcctttactttatgtttcctgatttgccattcatttctgaaactattcagacaaagatgcttcctttatcaacaaaactcttcctaccttttttctttgtctcaggcttagttacctccactccaaggcgattgtacatagggacgtgaagtcagagaacatgctgttacagcctaacaagacgctgaagatcgctgatttcggggtagctagagttgaagctcagaaccctcaagacatgacgggtgaaactggaacacttggatacatggcaccagaggtatgtaatgttgttcctgtagagtcaaaatccttgtgtttcgtaataggaaagatgagaatgttagcttttgttgcataggttcttgaaggaaagccttacaacaggaaatgcgatgtctatagctttggggtatgcctctgggaaatatactgctgtgacatgccctatgctgactgtagttttgctgagatctctcacgccgttgttcatagggttcctctctctctctctgtctatacatacaatctctcctatgttaaagctaatcaggaaatctaatgaagtcactgtttggtgcatcttgctcagaatctgagaccagagattccgaaatgctgcccgcatgcggtggcaaacatcatgaagagatgctgggacccgaatccagacaggcgtccggagatggaggaggtggtgaagctgcttgaagccatagacacaagcaaaggtggtggaatgatagctccggaccagtttcaggggtgcctctgtttcttcaaacctcgaggcccctgaatctctctccctctctttcctttttgctccgtgtctgatatattcttgagagctgcgtgattctttggattttgtatttactttgagctatgggagttggattggtgtgggttttgtcataagaatctttctgcgctctatgtatttatatacttaacacagtcgtgtataattcgattaagctttattttattttttgatgttgattcgaatttcatatatacacgacgcacacatgcaaattgatcatcaaaatctgataagaaaaaaacagagagttaaaacttacttacaagaggggtctgaaggaaacatagaaaaggattgggccgatactgttattagtattcaagataaaggtctaaacctacaatttgtaaacaaaattagtactaaagattttgagtgtttctctctacagttttttgtgtttatcgtatgtttcacacagtacacgcttcagtgggagttgttgggtgatcggtccgaggcgacatacaagatg

SEQ ID NO: 28856 - DNA, 3000 bp, Unknown
  misc_feature (1)..( 3000): 2750-1469P.txt file - cDNA_ID_2999073; gDNA_ID_2926227; Annot_ID_142564
taactgaaatattgtactccggtttttcttttcaaagcgatcccaattaattagctaatgcaaaactatattttattcaagatgggctgtataatgaattttaaaactgttaagatgtccatgaatcgagatggcccagtgggcccgacaagaggtatttattctgtgcgttgcgtctgtgcgcctaataaacgactgagctttaagtttacttattttctatgaaatgtgagaagcccactagagtccagcaagccagcgacgttccaattcccatttttacccttgttccacctccagtcagacgaaccgcttctccccggcttgacccttgtcgtactcgtcgatggctccggtgaagcagaagaagaagaataagaagaagcctctggataaggcgaagaagttggcgaagaataaagagaagaagagagtcaacgcagtgccattggatccggaggctatcgactgcgactggtgggatactttctggctccgaaactcttctccctcaggttctcctctctctccttccccgcttttcagcctgatttcagtttaattcctcttctcccccatcagttaccactagtcaatgtcgttttgctattgcttgactagattgttccatccttttgattccatgcttttgtagctcctctagggttctttgaattgaaccgagagattgttgttgttttcagtcccctcagacgaagactatgcgttcaagcacttctttagggcttctaagacaacttttagctacatttgctcgctcgtcagggaggaccttatctctagacctccctctggtctcatcaacatcgagggaaggcttcttagtgttgagaaacaagtcgccattgctcttcgaaggttagcttccggtgattctcaggtctccgttggtgctgcctttggtgttggccagtccactgtttctcaggtaccaatcaacctctactcagctccctatttccctgatttcaatatatatatgctgtatcctgacaccatccatttgtttccccaggttacatggagattcatcgaggcactcgaagaacgtgccaagcatcatcttagatggccagattctgaccgaattgaagagatcaagtcaaagttcgaggagatgtacggtctccccaattgctgcggagccattgacactacgcacatcatcatgactctcccggctgtgcaagcatcagatgactggtgtgaccaggagaagaactacagcatgttcttacaaggagtctttgatcacgagatgagatttctcaacatggttaccggctggcctggcggcatgaccgtctccaagcttctcaagttctctggcttcttcaaactctgtgaaaacgctcagattttagacggcaatcctaaaactctatcccaaggagcccagattagagaatacgttgttggagggatcagttacccgcttcttccctggcttataactcctcacgacagcgatcatccctctgattccatggtggcgttcaacgaaaggcatgagaaggtgaggtcagtcgcagctactgcctttcaacagcttaaaggaagctggaggattctgagcaaagttatgtggagaccagacaggaggaagctacctagtataatactggtgtgttgtttgttgcataacatcattatcgactgtggggattatcttcaagaagatgttcctttgtctggtcatcacgactccggttatgcagaccggtactgcaagcagaccgagccgcttggtagtgagctcagaggatgtctgactgagcatttgcttaggtgaggatcttaaccttgggaattggacatcttcatctcttctctaaggccgtactaagcccgttagaccattcagcatcagtttagtggtagcccgagacatatcggacaaaagcaatgttatgaaacttttcttcaggtatcaacaccagattaacatcatgccagttggacctacaaaaatagattcatccttaagtgtgattaccatactttgtgaactactaatcttttgagaggagtggactatatccccaacggaactgtttgttttggcaatgtaaatgttatttttttaataataattggtgttttcttttagtattgagttgttgggttccattatattcgctctctgcgttgaaaagtttgtgattctacggaaaggaatatgctctggtggatgcgtctcggttttggttctttgtgctcacaagtaacgacggacgaagattcccaacaaattcacatgacaaactataaactatagtctataacaaattacgtaatctgatttatttctttattatgaattacacaattaaatacagtagtcatcttaaagagagattattacagtggaccttttggtttcgatagattgcgtcacaaaccaaaaaggttattcatttctcgatgtacaaatattattaaagtcgaatgtaaatttacaagaaatttgggggaaacgaataaacggcgacggaagggctgccactagaccgagaagaagcaaagacagacgagctctgtttttgcaagagagagttttttataataaaaactggaaaagggcaacaaaacgactctttggccggtgaaactgtcaaaaagacattaagacttggtctctctcccactgcaccgccgatccttctctacttgtcaaactataaaagaaaaagagtatttttttttgtggagaccaccaccaccaccttcgatcgatttctactaacttgttcttcttcttctttctcaactctcttgtcttttgtctctccaccaattttttcttgttctttctctctccaccacataaaaaaaaaaaacctagctttgtcccctcaactcactgattgaactgcttgattttcgattgatcatctgggtggttttgaatcgaagagtattgttgtattagtggctggtggctctccaaaagagtaaggccggagagagaaatcaatg

SEQ ID NO: 28857 - DNA, 3000 bp, Unknown; identical to SEQ ID NO: 28856
  misc_feature (1)..( 3000): 2750-1469P.txt file - cDNA_ID_2999073; gDNA_ID_2926227; Annot_ID_203544

SEQ ID NO: 28858 - DNA, 3000 bp, Unknown
  misc_feature (1)..( 3000): 2750-1469P.txt file - cDNA_ID_2999077; gDNA_ID_2926227; Annot_ID_142565
atgtaaggctgaagatgaggatggttaagcagctcgttagcctgcagcgagttaacaacaatgcttagttcaaccacaaacggattacttatcatcaaaagcaaataagcattataggaaccatacgcttggcctgagttcaggatttttcctcaacatgcttttaataaggcctcggctgcagataagggaggaaaagaggttggtacagcaacgccggttaatgttgttaacagaggaaatgatttcaggcttacaatgagccggaatacatggcgggaataggatccattatcaacttgtgtattttggtgatcagtgtctgcacatcctgcaatcaagatttcacattttacattatgtgttttaatgccaaaatcaaaaaccaactgtaaggatacttacggaagctttgaaaggaggtttatgagcagccatttcatacatgcagcatcctgttttccatgatgatccatgaaacggtagtcacaaggtgaacaagtgtaggagtaaaatatcaaagaagaatgtattgttgttatacccaacgaccaaatgtctgactttgatccgtaaggtatgtcagcaagaagctcaggacacatgtagcttggagttccaacaacctataaacacactgacttataataacagtgtcacaaaatttaaattagtttcattgtacagaacttacagaggatgtaaggtcatcagaagttagaatcttagcgagtccaaagtcacctgagaccgaaattgtggatgcgttagtaactgacaaaaaggcttaaagatacatgaatctacaaaacataccaagccgtatgtcttgctcttttgtcaagaatatgttagaacactgaaaagacatttagatgttaatttagatgcttggaacataaaaaggaacaaaattctgaaaattgatagtgaggttacatgtttaccttgacatcgcggtgaagaatatggttggagtgaagataatcgagggccattaatagttggacaagccattggcataatttctgcatcatttagtagttatttgttcaaatattagatccagtgatagattgtaagaagtgaagggatgggtgagagtgagacaaacctcctcaggaaaatgaacaccacatgctcttttgatggtatctgtcctgcaatattcaaaatgaaaataagagccaatttcttcaaactaaacacaacttgtctgtagttgaaaatgggcaaaaaccaatttacatgtccccgccttggcaatatccaataacaatgcacacatagcaaccctgggaaacaagagagatgatgagtattgactattgagtagagtaaggaggcagaagaagaatgagcaaaaggagatgagaaggagagaccttttcaacccatgaatctttgtactcgacaacaaatggattgcggacagtagaaatgagctccatctgaaacatgaaggggagggaggtccaaactcatcatcatcatcttaatccaacaccaccaactaatttcatttggtccaataagaaaaaaaaagaaaaacaagaacaaacctcctgatgagctgatcgtcgagccctatcagactggcgggcgagacgaatctttttcaaaacgtatctgtaaatggtgaagatgaatagagcaaatggaatcaccagagaagcaacaagagagaagcaaaagcagagaatgaatgaatgagagagaatagaatacttcttgcgttcttgtttgtgtctaacaagaagagcagagccaaaggaccctttcccgatctgctccaagacttcataccgctccatctgacaaacacacttgcttgaaatttcagcagaaacgtcttcaaaacaaaaaccatataacaaaacaagtcttaataaattataattttttcttaaaaaagaaaagagtatacatggagaaactgctacatacagagatgaggcaatccaatcagtgtcaagtcatgcaccagattaaagattaaaacaaataaagggtagctttcagcgagatttatgattgctttcatcaaacagtgagagtgagtaattttcataaacagcgaaaaagtgggaaccagctcccgcaatcatcatgatgcacaaaattaattaaaatatacctctgtacgaaggctcttggagggaggagcttcaatcgtaccgacaccgtggtgaagagaatcaaactactaatacactatttgtattatatcaccaaaaatggaaactttatcaaaagataaaatcattttcttaaggccaaaaagcaaagactataagaagaaggaaaaagaagcagaccagacgattcgtccgagagcggcaaaagaacaatttcccgtctacgattcgccttcctttttttcttaaatttcaaattagtagtatgagattttccttgctcaattcctattttagatatatatatatatatatatatatatatatatatatatatatatatatatatataaagatgaaaaaaaaaaagatatatatatatatatatatatatgaagagaaaaaaatacaaaactttgctttttcagttctcttttctagtaaaaatgattttgctcgcttaagtaacgtagagccatttttttgcccatttttgtacgcaattattttccgtaactgaaatattgtactccggtttttcttttcaaagcgatcccaattaattagctaatgcaaaactatattttattcaagatgggctgtataatgaattttaaaactgttaagatgtccatgaatcgagatggcccagtgggcccgacaagaggtatttattctgtgcgttgcgtctgtgcgcctaataaacgactgagctttaagtttacttattttctatgaaatgtgagaagcccactagagtccagcaagccagcgacgttccaattcccatttttacccttgttccacctccagtcagacgaaccgcttctccccggcttgacccttgtcgtactcgtcgatg

SEQ ID NO: 28859 - DNA, 3003 bp, Unknown
  misc_feature (1)..( 3003): 2750-1469P.txt file - cDNA_ID_2999081; gDNA_ID_2926227; Annot_ID_142566
gagcgaatataatggaacccaacaactcaatactaaaagaaaacaccaattattattaaaaaaataacatttacattgccaaaacaaacagttccgttggggatatagtccactcctctcaaaagattagtagttcacaaagtatggtaatcacacttaaggatgaatctatttttgtaggtccaactggcatgatgttaatctggtgttgatacctgaagaaaagtttcataacattgcttttgtccgatatgtctcgggctaccactaaactgatgctgaatggtctaacgggcttagtacggccttagagaagagatgaagatgtccaattcccaaggttaagatcctcacctaagcaaatgctcagtcagacatcctctgagctcactaccaagcggctcggtctgcttgcagtaccggtctgcataaccggagtcgtgatgaccagacaaaggaacatcttcttgaagataatccccacagtcgataatgatgttatgcaacaaacaacacaccagtattatactaggtagcttcctcctgtctggtctccacataactttgctcagaatcctccagcttcctttaagctgttgaaaggcagtagctgcgactgacctcaccttctcatgcctttcgttgaacgccaccatggaatcagagggatgatcgctgtcgtgaggagttataagccagggaagaagcgggtaactgatccctccaacaacgtattctctaatctgggctccttgggatagagttttaggattgccgtctaaaatctgagcgttttcacagagtttgaagaagccagagaacttgagaagcttggagacggtcatgccgccaggccagccggtaaccatgttgagaaatctcatctcgtgatcaaagactccttgtaagaacatgctgtagttcttctcctggtcacaccagtcatctgatgcttgcacagccgggagagtcatgatgatgtgcgtagtgtcaatggctccgcagcaattggggagaccgtacatctcctcgaactttgacttgatctcttcaattcggtcagaatctggccatctaagatgatgcttggcacgttcttcgagtgcctcgatgaatctccatgtaacctggggaaacaaatggatggtgtcaggatacagcatatatatattgaaatcagggaaatagggagctgagtagaggttgattggtacctgagaaacagtggactggccaacaccaaaggcagcaccaacggagacctgagaatcaccggaagctaaccttcgaagagcaatggcgacttgtttctcaacactaagaagccttccctcgatgttgatgagaccagagggaggtctagagataaggtcctccctgacgagcgagcaaatgtagctaaaagttgtcttagaagccctaaagaagtgcttgaacgcatagtcttcgtctgaggggactgaaaacaacaacaatctctcggttcaattcaaagaaccctagaggagctacaaaagcatggaatcaaaaggatggaacaatctagtcaagcaatagcaaaacgacattgactagtggtaactgatgggggagaagaggaattaaactgaaatcaggctgaaaagcggggaaggagagagaggagaacctgagggagaagagtttcggagccagaaagtatcccaccagtcgcagtcgatagcctccggatccaatggcactgcgttgactctcttcttctctttattcttcgccaacttcttcgccttatccagaggcttcttcttattcttcttcttctgcttcaccggagccatcgacgagtacgacaagggtcaagccggggagaagcggttcgtctgactggaggtggaacaagggtaaaaatgggaattggaacgtcgctggcttgctggactctagtgggcttctcacatttcatagaaaataagtaaacttaaagctcagtcgtttattaggcgcacagacgcaacgcacagaataaatacctcttgtcgggcccactgggccatctcgattcatggacatcttaacagttttaaaattcattatacagcccatcttgaataaaatatagttttgcattagctaattaattgggatcgctttgaaaagaaaaaccggagtacaatatttcagttacggaaaataattgcgtacaaaaatgggcaaaaaaatggctctacgttacttaagcgagcaaaatcatttttactagaaaagagaactgaaaaagcaaagttttgtatttttttctcttcatatatatatatatatatatatatctttttttttttcatctttatatatatatatatatatatatatatatatatatatatatatatatatatatatctaaaataggaattgagcaaggaaaatctcatactactaatttgaaatttaagaaaaaaaggaaggcgaatcgtagacgggaaattgttcttttgccgctctcggacgaatcgtctggtctgcttctttttccttcttcttatagtctttgctttttggccttaagaaaatgattttatcttttgataaagtttccatttttggtgatataatacaaatagtgtattagtagtttgattctcttcaccacggtgtcggtacgattgaagctcctccctccaagagccttcgtacagaggtatattttaattaattttgtgcatcatgatgattgcgggagctggttcccactttttcgctgtttatgaaaattactcactctcactgtttgatgaaagcaatcataaatctcgctgaaagctaccctttatttgttttaatctttaatctggtgcatgacttgacactgattggattgcctcatctctgtatgtagcagtttctccatgtatactcttttcttttttaagaaaaaattataatttattaagacttgttttgttatatggtttttgttttgaagacgtttctgctgaaatttcaagcaagtgtgtttgtcagatg

SEQ ID NO: 28860 - DNA, 3003 bp, Unknown; identical to SEQ ID NO: 15958
  misc_feature (1)..( 3003): 2750-1469P.txt file - cDNA_ID_2999085; gDNA_ID_2926227; Annot_ID_142567

SEQ ID NO: 28861 - DNA, 3003 bp, Unknown
  misc_feature (1)..( 3003): 2750-1469P.txt file - cDNA_ID_2999089; gDNA_ID_2926227; Annot_ID_142568
agtgttagttggttcatgagtgttactgattcggtgtgtttactgccaaaaggagcaccacttgggtagcgacgttcctctcaagaatccagaacgagatgtctcctcttttgcaatgcagctcaattatgaaagaacaacttataaatcctcactgggaaagctgtggttcgatgaggctggatcaaaactggacttgcaggaggatgatgatgatgctttcacaaatcttggtggtgcttttaaagaactcgggttctgcatgagggagttgggcttgtccatagctcgtctatgcgacagggagattggcggaggcttgctggaggagagcttactggattcttgcacagccaaaggacgtctcatacattaccactccgctgctgataaatatgctctcagagaatcccagaggagaaaccaatctggtaaccgagtatcaagcaagaggagagtccagaacgctgctgagcaagagctgaaccgtagaaatggagctggtttgagtgggagtcacttcaatctgtggcagcagtggcattacgattatggcatctttactgttctcacggatcctatgtttctatcgccgtattcctatcaggaattcagtttgatgagcagccattcttacctgcagatctatcatcccagcaagaacaagttctacatggtcaagactccacaagacagttttttggtccaaatcggagaatctgctgatattttgtccaaagggaagctacggtcgacccttcactgtgtgtgcaaaccagagaagctggatcacgtaagccgtgagacatttgttgtcttcttgcacccaaagtggagccaaactttctcagtctcagaatatacaatggaacatctaaggtcggatgaggtcgtccctagaccagatttacagaatattgttccacctctatcgtctcggttaagggatgggatgacttttgccgagttttcacgtgaaacgacaaagcagtactacggagggaatggtttgcaatctaatagatagccgtgccccaggttaatagcttgtctaatctttaggtagttaaattcaaaataatctttaggtaatgagtagtggaaggcaagaggaatgagccaagagggttagttgtaaaagagattagattaaagggagagttgggattcgttatgtgtacttcgatgttggagccaaaacaacagtgaaagctgttacatcgttttcacagtcaaaagctctccctttcaaacatgctttttggttgtggttgctcttctttagtctctctctgtgactcagtttatgttcctgttgtgtctcccctgttgctgttccaaacttacatctctttgtttgctttcaagcgtcgcattaagacaaaagtggtgttattaaagtaaaagctgcctctctccctacacacagattgattcctttagggaatcaatcatcttttctttgacacttttgatttatagttttttttcatgaatggttttttgtacgtgtagatcaaaccgacaacagggtttagctcgcaagtcttttcttttgtgaattcaaaacaaagtttcaaactttgtcccttcgaagatgcttgctttgacctaaagaggtgctttttgcatcgaaagtgacctcggtttcaaaaccctaatctaagaatagaaacggatatggtgtaggtatgtaggtgtctattgtaagcaaatcaaaagcaaaagaagatggtacctaaaaactaaaagtagtttaaagaaacaataaaatggaaaagagggttcatcattcaaagtggcagatacattcaatttttaattggtagtataaaatacaaaacgtccaaacaagaacaatgattgcaaggcaaaggaataatcagagagacaaaatgactagtatttttctaagggattggttataaagaatggaaaatgtgggtatccctaaaaattagacagagcaaaagggaataaaggatgtatctttattcagtggtcacccacctatagtttccaaagtgcaaataaatttaatatagatacacatgatgagattttgaaatatcttatatatgcgtttttatatatatcaaaatgctctagtaccaaagaatatagatcaacaatcatgttaatttgtacaaagatgaaagaagatcagaagttttgattgtgtagcctgaagaaaaccttggatggatgaataaactaattgccaagttttgtgtcattgaagtggaaaagagacagagagaagaaggtgacgtaagggaaagcacgccaaggcagcagcatgtgtgaatgtacgcaaaggtcgcagctttgtgtttcaaaaccgaagcagaagggaccaaattaagagactgactgatcatcatacacagtcgtttcattcctttattctcatctttctcttcctcccattttctcacaccaaatttcagcacctaatccgttagtttaaccatgatccacaacaataaaccaagttgtttgattggtttaaacaagacactctaaacgcaaattcaaccttcttttcctttcttttttggtcaattgaaacataaatgtctgataacctatgactgactagtcaagctatcctaatgtttctgattaaattaagaaaaggcaaatacaaggatgacttgattccctcctttttctcaagactcgttgatacatacatctaaagtaatatttatgtgtaataaaaaatgggattggcaaagatgcggccttattattgaaaagcgacgtctttgttttgtatagtagtaatccattatttatgcaacgactatatattatgtcaagagtagtactactcactcctactctcatcgaaatataatcacatatttctttaaaagaaaaagaaaaggtgaaatacctaaacgttactttgtctatctatatatatacacacacataagtttcctagtcaagctctgaagtcgaagcaaagttaattacagagagagagaaaggatg

SEQ ID NO: 28862 - DNA, 3003 bp, Unknown
  misc_feature (1)..( 3003): 2750-1469P.txt file - cDNA_ID_2999105; gDNA_ID_2926227; Annot_ID_142573
atgacaccataactgaaagagatatcaaaactcacactttatctctcaaaatgtaaacgagttcagcattaatcatgttcagatgcacagagagacactaacatacaacaaggaaggcctaccttctataagtaaggtcaccaattgcacgggagacagtcagctggccattcactcgtggcacaccggcccactcagtgacataacctcctgcagcttcaacacgaatcttttcatcctctctatttgggtgatggtcctttgtcaattctttggcaatgaaacgcagtagtccattgccatgttccagtttaaagtcagagaaccttgatggtgaagagccccgattgcgtcttcgctctctgtacaacttcaccaaagtagctgcaataaacaaacaccattgcaacaaactgtttataaataaatacaacactggctttttgttaggcagcttgattttagaaacagatgttgctaaacctctagcttcttccagagtctcaaatttttcagaacagagaagtgcttttgagtcaccgatactagcaaccattagttgaccatctgcaataagtgcaattgtagccgttgaacctgaattcagctttctgtttgatgcttcctggagaaaaacaaagtgtagctggttatatccttatcatgatagtaacaacgctcgacggagtgtatagaagatatccactataccttagtaaatgtgacatcaatgtcatggatcgctctcagcaatgcttccttcataatatccaaggggagagaatcatcaaaatgaagtggcaatgagtctcgaaacctgcaagaaaattgggacactgcaatgaagcgaaaatgacgacttgataaacgaaagagaaataaaatgaaaaggcactcaactgcatttgaaaatccaggttgtatagatgcatgatttcatcccgacttacgccgtgcaaaatgacactgtggtctcctttagttgggaatcgtccaatcaacttcctcgtcatagcagaaaatgtagcgtccaagagaaagttgatatgcaaagcaaagtaatccaataaaagttttgaagccatgtcactggcttctgcaccattatgtccgtcaaagactgctgcaattccaaccaaaacatcctttggtgttccagtcttgcctgtgagacgaggccatcagtattccctccacagctagcacatagatacaagatagaaattttccataccgggaaatggaatgcgaagatcaagagcacagagaagacgatcctcttggtagttcctccgaccttgaatagctgcggtatggcaacgaccagctccactatgagtaggagaaccccaattctggagaatccaacgagggcatttgggtgattgaaacacagctggagctccgccttgtttgtaaaccgccaaacacgtagaagattcccctcgacagttaatcaccaggaagaagaagacgaaaaatataataaggagccctagatttagcagacttgatttgatactggaggtcatcttcttccttacatggattgtgtgagatttgagggatttctctgctaaatctagggattaaacaaaacaaatatctaaccgacaacagaatccgagagtcctaaccaaacctactgatattccaaattcttctttattatcaatccgagagcaaaatgtttaaatctcaagtaaagatcgccagaaaatgaagctagagtagacaaaaatcaagctaccctttcactcttttgctcgtaaacatgcttgaaaggaacaattgcttcatgggaacaaaaatatgtaataattgtgtggcagaatcttgtcggtaataaaaggttggttacctctggaaggctctgagctcctccacccgcctgaaaacgaagaagaagaggaagaagaaagaagtcgagaacctttgacttcatccaaagggtttcttttgggccttttaatttcgggtttagtaaatatgatcgaaggggaaaaggcctctttaaaagcccagcccactaggactacgtggcagtaagtttgttaccaaattggatgactagtgtgatgaggcttggaatgttctgttgcggtttgtagtacttgttcttctcctaacaataacatgataatacagcataatccaaagagtttgcatcgagaggtgtaaagcggccacatggtcaccatgttcgcaagcacactccacgagacaaccaaaatacgacgtggcaattttttaccttttgtgacgtgttaacttaacttctttcccacatccgaaaggaaactttggaatctactccttcttggaaaaatccaaatgtgccaatcacttgtgtgtatatcgtcttttctatttaccaagacctcaaagctactactatttcttttcttcttttttttacctttgtagctagttttactcgtcagtcgtcactttactacattaaagctatccgattgatgccacgtagtcccgaccggtccggtgaggtggtcaactttttgtatacctggtttcaatatatattacttcgatatgtaaatcatgggatccaccacatacgattttaccttaatctcctcaaaagtataagttccggaactttctaagaagatatgcacccttcctccctctggtaaatagctctagaaagttcgaactccacttggtgactaaaagaattttaaggatcaccagctccccgctatatatatatatggatttaagtcacctacgtggccattgtcttcgccacatttcctgccccaactgccataaactaagtaactaaccaccagcaaaagcagagtactctgttttaaagaaaaaatacacttcccgctctttcttcttttggttctgtgctgttttggtcttctccaatacaggaaccccaaatgcatcgtttccttccttggattataatttacgaaaaatccaatcatagatcattagacttctagcattagcattgctaacaagatg

SEQ ID NO: 28863 - DNA, 3003 bp, Unknown
  misc_feature (1)..( 3003): 2750-1469P.txt file - cDNA_ID_2999116; gDNA_ID_2926228; Annot_ID_142578
tctgatgaaactctttctatccttctctctttttttggtaatttatatcatcttatagctctcatcactacatattatttaacatctccatggccaaattttaaatttctcgatttttgatataatattttgtgcaggagtagtaatcaatggagtaatgggttcaaaccagcttcttcgaccaagaaaagtaccgaagctctttgtgttcggagattcttacgcggatacgggaaacacaaagcgcgacacagaggcttgggctatcccttacggtatcactttccccggtaaaccttccggccgttattgtgatggtctcatagccaccgattttctaggttcatttctctctctccctctccatgatcaatgttaaacctctctctttagtttagtcatgtacccttccaacgatgtctatatgattttatagtattatcattatattatacattgttacggatgttaattaataaaactattatgttggttggtgcagaaaaagtattgggggcagaatcaccgtacctctatagaactcacggacgagataaagggctaaaaagaggaatgaattttgcgtttggggggtccaaaatgttggactcctctccgaatagtccattccccaatataactgctcaagtgaattttttggtagaccttgtcctcgccggccgtgtctacggagacattactccctccgatgtttctctcatcagctacgctggaggcgactatatttattacatcgaccaaaatcgtcctgccgctgtaagaaaaaaaacattaatcttagatgtcaaggctaattaattcagaaacattattacaccaagttctctgcctttacatgtgaaagaacacttttgtttgtttgttattagaaaaaaatcataacgccaaatgtatatatacttttattttgggtgattatttgattcttatcttcattaaaatttgcatgcagggcttaaaagcactagtagagaaagtcgtggataatttacgcgttaatatgatagtattgggtggcctgctatttaagaagatagcagtaacatcgctgcagccgatcggatgccttccttcttacacctctgcatcctcgttcaagagttgcaacgagtcacaaagtgcattggtggaactacacaacaaattgttgaaaaaagtggtggccaagctcaacgaacagtccagggttatgaagaaggagcagcatttctttatcattgatatacacaacgccttcatgaccgttatgaagaacaaaggtgagaatccaagtaacaaaagtttcacgtttgattcaatatcaaaaccctagtcttatagggttttttgtgtgatcggtttatgaaaatgtagggagcaaaagatttaaaaacccgatgaagtcgtgttgtgaaggctattgtgggcgttcaagtgacggtgggaagttgtatacgttatgtgatgatccaaagtcttttttcttttgggatgcagttcaccctactcaagaaggatggagatcgatttactcggtattagggaaccctttaaccgactttttgaccaaaccgtaaaaccagaatcttttttcttttggtttcaaatgcttgaagcaattttttttttaaataagttaattgggttcataaattggcttacttctttaaacacgtttgaagaactttaaaataatgagaggatggtaataggtgtcaacttgaaaataatgaaaattggtaaataacgagaatgttttaaacattcattagggcggctggacatctgtaactcacgtgtgtcatcgtgttaaatacaaggtatatccatttttcagggagttttgcgtggaatttttgaaaacctagtatttaattactaatttaaatagtagtactatatgtagtggactagtggtatttagcaaaaattattgattcgttattattcttttaattttcttaaactatgaaaacctgaaaaggtaaaactttaaaatcaaaacccatttggtagtagtaataaagaaacatacgaggaattaataaatacttcgttgggacaataaataaaatttaaacaaaaataaaaatagtcaataatcaaggagggtatgccaatattccattgacgtagataaagaaacaaagtctttttgtttctagattacgcggccacgttttaaatctcgatgcaatctttgactgtgtaggaaacctagtcttacacaaactacattttattcacaacttagcccacacaaaaaaatcacaactagattcaaaagaattttgttatttatcattcactactataattattcatttgatatatatttttcaaaagtttaaacaaacgatacggacatgaacagttagtctaccgaagtatgatttcagcctacaaatttgaagtcgtaccgtgtcatgagaaatataagtttttcccacaagttttagggattaattttgatctggaattttctttttatgaaaaaaattgaaagtcaataacgaatgaaaaaaatgttaatgattgaaaattataacattaaaacgccaaaaatcatcgccccgtcaattttggcaaaatattccattgaactccatggtctataatagtactctaagtctataaactcaatacctacaccaatcaaagccattgtatctcttgtcccatgcaattgtatagtagtcacactcagacaataaacaaacgtaattaagaaactctaatggtgcaaaacaaaattgaataaactcaaggaataaagatacaaaagttgaccagatcatagtcgtttcacatctctaaggcttagtggcttactatataaagccgcaaagacattttagtgagaacacaaattcaattccaattctcaaagtgctctctttttaaaccaatctgctctcttccacttactctctctatctctctcccatctcgtttcttttttggtcattaaaagagaaacctttgctctgaatcttgaaaatg

SEQ ID NO: 28864 - DNA, 3000 bp, Unknown
  misc_feature (1)..( 3000): 2750-1469P.txt file - cDNA_ID_2999120; gDNA_ID_2926228; Annot_ID_142580
acaacacaatacctatgaaacagtcacatatctcaaactgtaacaactgcagatggttcttttgatattaatgggttcatgtctttagttccacagagatcatgtcaaattcaaaagtgagaatttttcatatgaaacataatcatcgtcaaatcaaaagttcaatctttttgaaacaagaaaaatgaatataaactttatgcaaagtcgtgtttctatgatgttacctttttcttaagcagacatgtactatcgcataacaaagcataacaaaagaaaaactctagtttcatcatgatgaatcatctatgatcaagagtaagacagtacctgaagagattattgacgaagcagagagacaagaaaagctgttgtttgggcttctgtctcttctatctttatgtttgttggggttttttgtcggtatatttttgaagaggtttcaaaaggattctgcatttttctgggcagtttgaagaacaaatcatgggacccatattcatatgtttgtgggtctcatgtaagaacgagattattaaatatttttgttcaattcgatggagactatattgacatgttgatcactactgatttttccgttgacaagtgtcttcgaaattttaactcttaagcacaagagtttaatcttgttttagtagattattatgaaccatgtcacttttcaatgaaaactccagattttttgtttggcaagaagattgtttttccagaattgtgtgattcatgtatatattaggtaagaaaatgatcaaaacttaagaaaaaggtgataatgatggacctaatgtacattttgacaataatgctggtctttcatcactataaccctagaagtataatttactacatatcacttcgctcgagggaaattataatgtttctctcttgaatattcaaaagttaaaataacattaacttattgaaatttttactagttttcttaaagataagctgatttttaaagcattttaaagtattcttaaagtttaaaatgttcgcaaattcaggaagatatggaccacaacaaataatttagtaaactttgtatattaattagggttgtcaccatgtttttttaggtagaacatagaatactcaatactctcataccgaaataataaagctttatgtgaatcacatccgcacgtaaaagtgtcaacaaaatttaagtaacttaatacgtgaataatgtaacaattgcaaattatcacataccctatattaatatcggtcttctaaatagtaacgttgaccttttcttgacttgctaataagtttatactattaagttaaaacatctttcattatggtcaaatatttgagcccttgtgcttagcactaagtctgcatctagggtacaagtgaaagttatgttcgcatttttgaaaatttatttctaacaacaggtcagttgacttgggagttttggaataatttgtaatattgtatatggatccaacaaagtgagtacttcataaaaactattcgtgggtattcttcgaaatctgatagatcggaccggcccattaacagaagcccgtcaatatctataaccacaacaaaagtaaccgatgaatttagtcagtcatttagatcctttcttctacatggttgtcacttgtcactgtaagaagtattcgtcatcctagcatcttccaagaagatttagtaacaaatgtcaaaatcatgcatgcagtaaactaaaaatagtactctttgtattcgagtgctaattactaatcttccaagaagattggtaacaaatgtcaaaatcataaggaataattataatacaaagtacattttaacttattaacatatgtcaaaatcaatagggtacttttgatacgtccggtaaattagtgttctagtacagccctatctctgttcttttctcattaaattggatttgaaactctcattattgtaggcatggaagagttttaggccgccaaggtccacatcattaatagtttaggtctttaatacagtgacattacatcattaatatttaggtcccaatttctggaaattctatctggttggaatttaggtcatcattcttgacaattttttctcctcttttgactaaaatccaaatcatctttcctctcaaaactattaatgtaatactcttattcacattaggtcatatgttaatgttattgtaatatactaattatacaaaactaggtagtttctttctttactgtagtagatcttaaaacataagataacgacataaatcatttagattattagtagtttgattaattactataatttatggtcttaaggttattcatctttgtttatgcaaacaaaatcatatgattagtgtagtaaatacatatcctttttgtactatcgggtttagggatcaagataaggtccttgttttaactgtctttacattatatccaaataaattatggaaatgattcactgacacaaataatcgaattaaacttaaagtcttaaactatacataaaactacagattggtctaataaagaaattaaaaccaaccaacaactccataaagatattctactatattcatcaatttgactagtggttgctgacactagatttatgattcctttcatatattttctcttggtaattggtatgtaaataaaattctccaaatatgaaagactgaaagtgaaatgtaatcagtaaaccgagtaataccggaattttaaatctgaatgtccgttttacatcgaccagatctgtcacgtgttaaataagaccgggtcaaaaatataagacgctgacttgtaacggttcgatttcgatttgtgcacgaagcgggatatctaacggtttaaattaagccacgtttaaagattccttctatactggacaaagtcccctataaaaacctctgacccaatcacatttctcggatccaaaaagacgaagaaaaggaaaaaagacaaatcaaagagagacgattcgatcgcatcaatg

SEQ ID NO: 28865 - DNA, 3003 bp, Unknown; identical to SEQ ID NO: 15516
  misc_feature (1)..( 3003): 2750-1469P.txt file - cDNA_ID_2999124; gDNA_ID_2926228; Annot_ID_142583

SEQ ID NO: 28866 - DNA, 3000 bp, Unknown
  misc_feature (1)..( 3000): 2750-1469P.txt file - cDNA_ID_2999135; gDNA_ID_2926228; Annot_ID_142589
acctggttgatttagtaggaaagccaggtcacttatgggagcctgattccttgctaaatggtccttcatctatctcaatttcttctcctctgcggtttccacgaccaaagccagttgaacccgcagtcgattttaggttactagccaaacaatatttctccgatagccagtctcttaatcttgttttcgatcctgcatcaggtattcccatacaaaaaacctgaataatatgttaactttttgcatgctgcttacatctcgttttgtatttcccctaaaagagtaatctcctatcatttagggtatttcttgatcatgtctcagtatctgaagtgttagtagtcttagaatgattctattgtttgttttcttgtctcttttcactttagttgtttttggctgttgatgtgtatgtttgttggtgggttctttgcctaatgatatttaaggttaaacttgttagtctgctgttcaagcttatgaattctagtgcatttatgtgcaagacttgtcttctggactctaatttcttatatctgcttgtttgaatggttgtagatgatatgggattctcaatgtttcataggcaatatgataatccgggtggagagaatgacgcattggcagaaaatggtggtgggtctttgccacccagtgctaatatgcctccacagaacatgatgcgtgcgtcaaatcaaattgaagcagcacctatgaatgccccaccaatcagtcagccagttccaaacagggcaaatagggaacttggacttgatggtgatgatatggacatcccgtggtgtgatcttaatataaaagaaaagattggagcaggtaataattttacggaaaaattaatgattcggtctaaaaatgcaaagaaatatgaaattcttgaggaagtggttttgctttggactctgttctcgaacaaaataaggaaaaagtgccacccattttgagattacattcttctctgttgcctttaattcttccactctaatttgagcgactgctctttcaggttcctttggcactgtccaccgtgctgagtggcatggctcggtaagaacttttttgtcagaatttacgcagctgaattttttttcgctctaaaaatttggttgtgacttttggatctgcttggtattataaaaggcaaagttattgtatatgtgactctccgttctgtcagaaattaaacacggacaaaaggtgtcccattttagatgtatatgtgtctttatatcataaatttgtcttcctgtttgaattttacaattctatcactagaagaattctaattttgattattgcagtaatattctctatcaatttcaggatgttgctgtgaaaattctcatggagcaagacttccatgctgagcgtgttaatgagttcttaagagaggtgcacaaataaaattttctcttgattttggtaatgaacttgttgtattaatgtctccaatgatcttgattcgctgtcaggttgcgataatgaaacgccttcgccaccctaacattgttctcttcatgggtgcggtcactcaacctccaaatttgtcaatagtgacagaatatttgtcaaggtacaattacttggatttggaaggtttgatgtactgagtgtagaattttggcctataatgactctaataccatgatttctttcaaacagaggtagtttatacagacttttgcataaaagtggagcaagggagcaattagatgagagacgtcgcctgagtatggcttatgatgtggtatgtttaattccttatgttacatgtatgggtgattacttcctgatcttggtgtttcttcacatggaactttctttccaattctctgtcacaggctaagggaatgaattatcttcacaatcgcaatcctccaattgtgcatagagatctaaaatctccaaacttattggttgacaaaaaatatacagtcaaggtttgaatctaaattagaaattgttgtgtccaatgttttgattttgatattttattcctcttgtgagacaagcttatatataaattatgatttttaattctaaattggtttggagacattacaaaaaggcgttaatctgctgaaacttaaaagatacagcagcctcaagctgtcgtcttaaaaacaatcagaacattattattctaactcctcaatttgtcttgaaatttcaggtttgtgattttggtctctcgcgattgaaggccagcacgtttctttcctcgaagtcagcagctggaaccgtaagttcagtttgtttgaaactaaaacacgctgaacaacgtaactttcttctaggtcctatttccaatggaagctaaataattactgactttgatatatcagcccgagtggatggcaccagaagtcctgcgagatgagccgtctaatgaaaagtcagatgtgtacagcttcggggtcatcttgtgggagcttgctacattgcaacaaccatggggtaacttaaatccggctcaggtactttccactctaaacatctcaaataataatgatattattttgcatttggaagtccctcactctacatttcataacatgctatatatgatcatacaaaaaaatgttccataggttgtagctgcggttggtttcaagtgtaaacggctggagatcccgcgtaatctgaatcctcaggttgcagccataatcgagggttgttggaccaagtacgttaagattttctatctcttttttgaattcttcttgaatagacttcatgtttatgtatgtgtttcattaccagtgagccatggaagcgtccatcatttgcaactataatggacttgctaagaccattgatcaaatcagcggttcctccgcccaaccgctcggatttgtaaaatacccccggtccattcaaaagttgttataatcatgatatgcacatatactctcagcattcttttgctgcccaggagggagacactagttaagatatagctttaaaggtacattcctcatg

SEQ ID NO: 28867 - DNA, 3003 bp, Unknown
  misc_feature (1)..( 3003): 2750-1469P.txt file - cDNA_ID_2999139; gDNA_ID_2926228; Annot_ID_142591
gcttaacaggaacaaatacccagaaacgatgtgaaacggtttcggctgaacttggcgaagtccgtaaagcagactcgtccggtacaggatccagaaagttcggatcgtcggcacaagtagcctccgacgaaagccttaacgccaatgcaagctgcagctgataactctcctccgtctgctgcgcccagctcttcccagatgaagaccctccagcggagtccgccgccatctgtatcctcaaatctcctccaccaccaccaaatccaagcctaaacccatcatcttgaggaaatccaacagattcgatctcgttagccgccgcagaaagcgtaggcatgtaataatccccagacaaagagctctcaccgaaactactcccactggattgcctttgcaaccctagagacgaagcatacatattattcccaacccgattcggttgattattcaacctatgatcaccaccaccaccaccgctaggatcccaatcaaatccgcctctctccgccttagctttcccggtgttcccgctgttatggttgctcctgttttcgctcgacaaggaatcatagtgaggcggaggagctccggtgacggaaactgacacctgatcgtcagaaaattgactaagcaaagtgtaattagatcttctaccgggcatttccatggaaaagagagttatcgcgatctagatgagagagtttcccgatcatataaacatcaaaccctaggaaaccgccattgttgaagaagtttggcgagctagctagccacttgtttctctctctagtttttcattttttttttgtactttttaaaaaagtctctctctctctctctctctctctctctctctaatggaattggattttttttttgtttttgcgttatcataggaaataaacttactcggtgcgtttctgttgataatttcgttatattcctcttttgtcctcctttttatggaactttgacattttttttattttttgtcaaaacaattctccaatttagtttgttttttagtgtattattatttgtctaatttttgtattcgactatgatatctattcatatgttttgtgctaatttaatcgctaataaaactgtttaaacaattaatttggtatttcatattttggtgataagcaactgaaattggaagataaaaagtagtatcgtagtgaaagtagaaaacgcaaagctaaaagaggaacatacacagtgtaaaatactaaaccatcttgcctatcaaatccaaatactatcaaatttgatcttttacaccaatctgaatccgtaacattggatccaagtttcgtatacctaaacatgaaattttcattcggctctacgtagtctaaaaaactcgacataaaataaataaaaagcctttataacgtccacaatatttagaatagaaagtgagagaatggactataataaaataattggagtcgagggggatgtattcgtgtatgcgaaaatggatgggctcttctgtctttatattccttaatttgtctattcaaacacattcgtatttctggtcttcggcctgcgacttctataccatgcatgcatcttatctctctctttttttttttttttcgttttcttttctacttctccatttttttttaatttggttatttttattgcctttatgttttttgtgtattatatataaatgaactaataatacttcattatgtttcgtgttattataagtgaatttttcacaaccattacaaaaaattatcttttgcttaaaagttaactttggattatagtacttcataaaaatgtaaagattttgatcaagtacttatcaacgcagcttgggtagtcaatgtgctgtcattaatttatctatcaagctatccacgcagcttggacaataaataaatatttaaattctattgcatatttatatcatttgatccgctaaggttcatcgaatactgccaggttcattgcactcaacgcatttttgtcattaacttacgttttttagccatggctgctgagaatataaagttgctactatgtaaagaaacttttgggtttgatcatatttgtgcacaaaaaaaaataaaaaaaaaatcatacttttaaaactagtattaatccaaaaagtgctaaaacataacaaaaaaaaattctccttaactactatacaaacatatatttttttatgcgcataaattaaaacttaacaattgattatgatcacatatgttgaaaaaaatcgaaattatgtgtgatatgtaaaaccggagtataatattggtaaactataaatttaagagcattggaaaatgttcatgattcatgccgagaactcttctaaatctaaacacgagaggccccgaatagatctaactaaaatgaattgtgtttaatataataatagtgttccttaattctcactcgtgcaactatccatttaataattttaattattcgtagtcggggaccgtacttagttttatcatataaactcttcacagattttgttaactggtttttctttggattagaaaaaaattaaaactttgcgatacattatgctcaatttatccgtgggacttattttgaggaatggagatagatattgtcatgaagacatgaatatatagaccccacatgttgacgaaaactccgtcagtcaaataaagtgttaaaagtccgttacgatccgtcctgacaccgttaaaaaaagccgtcaaaataaagtatgggcttgaaacgttagttttgttgggctaattttaaaatcatggcccaactaaaggagatattcgagtggaccgcgtaacagaggatccctaaaatcccttcctccgattaataaattccagcggacattttagccttctcacatcaacacgccctaaaaccgctctcgagagacgaatcgctctcagcttcttctagaaccttctccttctccttcgacgcatcgtcgccttcaagatcacactacctcgcacaacaatg

SEQ ID NO: 28868 - DNA, 3000 bp, Unknown
  misc_feature (1)..( 3000): 2750-1469P.txt file - cDNA_ID_2999145; gDNA_ID_2926229; Annot_ID_142599
gagactcagcctgcagagccaacaccctatctacaaaatccatgaagctctgcctaatttcatccctttccggcttgccctcttccggatgaagaaagacaatgtcatcaaaagcaagattaggaacaaaagcaatgagatagcgccacctcttggagagaagagaagtcaaagcagcctcctttgtggtaaggaatgacagtatatgagaaagaagctcgtctggtagactgccaacacgatccatctcctctgcacgaaagaagaggtatactaagtacacaaatctcaaagcttttataagaacatcagcagtaacatgattaccaaacagttccagtgataatgatctacaaacagagcaagtggaaggaaatacgtgaaactggtaaaaacaattgattcaaacatgaaatttaacagatgagtaaagtccaggcaatcatggtttgtgaaatatcgaaatagaggaataagtgaaacttgaaatcaaacagagcaagcggaagcccaattaacaacgcaaacagaaatccaccaaaaggaaactttgaactaagaaatccccaaaaggagaacagaatcagtagaagcagaagagatgagtaaaagtcggtatctacctcgttccaagccccaaatttggtgatttcagtgaatgcgtccagcgagaagggagaagggagaaagtgagagttgggagtgcttaaatcgctggttcgcgaagatgcccagcgagaggtaaagggaataaagtctcaatttttaaagaggaagacggcagtaaaccaaattgagggttaaagttgaaaatgtcaattttgattcaatgttacccggttccttgaaatccaccggtttaacagaaaagtgaaattgagtggtttaaaattgaagatgtcaattggttctattctacctggttcctccaaaatccaccggtttatctcggtaaacaaatcaggaggacttcttgatttttggtttaaaaatcggtccaaacggaaaagtaaatcaagccaagaatttagaactaaaccgaaccaatccaaaatattacctaaatttattccttgcgttttggatgttctcatattccaatgcatttggaaagcgttgtgattgattgaaaatttgacataatattataattcttacttccggatttttatatagatgagctaaacatgacgaacctttaagttagggtataatatgcgtatgaaatcgtaaaaatagtttttgtttcatcctataaacagaactagcaaaaccctcactaaaattacagtttgtagatttgtcgcaaatatggtcgtcgtcagtcgtcactcgtcagccctgtgaagttttgtactttcggtaattttaactacttcaatttcacacttttcataaaaaatttttttccgtataccatgagtgtgaaattcatatttgctgaaaattgctggaaaaaataatcagttcattcttttgacttcttgaacgctgagttagtgtaatatttttaaccaaattaacaaacagataacaacgaaagagtccacgttttagtacacaacgaccaaccttcgtgtctcaatacgcacgtttaggacttagaatggcgttttcgtaaatactaacttatagtcgtaattaaaaattgtatattcattttccctctataaatgactctgtttcgtttcctgcttcacttaagaagtagcagaacaatggcgacttctcagcaatttttaaaccctacactcttcaaatccttagcttcctcaaacaaaaactcatgtactctctgcccatctcctttcttgcaactcaagtccgcctccacaattttcaattacaaaccacttacttcctcctccgccacgatcatcacacgcgtcgctgcatcatcctccgattcaggcgagtcaataaccagagagactttccacggcctctgcttcgtcttgaaagacaacatcgacaccgatcaaataatccccgccgagtacggcactctcatcccttcgattccagaagatcgcgagaaactcggctctttcgcgcttaacggcttaccaaaattctacaacgaacgtttcgttgttccaggagagatgaaatcaaagtactcagtcatcatcggcggcgataatttcggttgcggatcttcccgcgaacacgctccagtttgtctcggcgcggcgggagctaaagctgtggtggcggaatcgtacgctaggatctttttcaggaactgtgtagctacaggtgagattttcccgttggaatcggaggttaggatttgcgacgagtgcaaaacaggggatgtggtgacaatcgaacacaaggaagacggtagtagtttgctgatcaatcatacgacgaggaaagaatacaaactgaaaccgctcggtgatgccggtccggtgatcgacgccggtggaatcttcgcttatgcaagaaaagccggcatgattccttctgcttgaatgtaatcggatccataatttatcggttctgagtttaatccggtttggtttatttggttcgagaaccggtactaacgaaataaattattaccaaaccaaaatttcttctggttcgactttgtttgccacgtggaaacagcgatataaacaagtgcccaaaaaggcttgcaatggtttttgtacaagaccttcgttttcttcaatgttcctcttttcttagatgcatttgcatgtcctctcgaactgaaagtttaaggttcttcttctgccttcgcatctgtactaaggttggtttcgaagatttctcatctctttcaattgtaattcttatcacatatactctatctgttgtataattctgtttctgttgaagttaagtgtgtttatctccgctttgaaactccttttcctgtttgtattattttgcagtgggtgaatgttagttgaatttgtggtttgaagtctcaattgaaattaactgagtagtgaaaggggttttctagggtttgacaagaggatg

SEQ ID NO: 28869 - DNA, 3000 bp, Unknown
  misc_feature (1)..( 3000): 2750-1469P.txt file - cDNA_ID_2999149; gDNA_ID_2926229; Annot_ID_142603
catatcccaattcaagtaatacatgctgcaaaatgactcaactagtcaagaaaccattgagattcatcggtattttgataagtaagtgaaaaaataccaaatcgaaatagcgtctagagaaattgtcggattggagagtaaaccagagataatcactagcccttggttgtaccatatctccaaactgaagaatatttcatttcaaatttggtatcagctttctttaaaccatatactcaaaacgctcatatcaaacagctttatgtttaccatagcataactgctgaagctaccgtgagcttgaagtaaggccatatccctctaaatgccctcgttgaaaaccctgtccatgtctccttacaattcgggctcatcaagatatacataccattcacagctactagcagccaccatgagaaactgagaatcagagccgccccaagcaagccgaaatccagcacgttggtaaccagccacgtgagtaacgtgtggagcaagaaaactcctaaggacatgtaagccaaagggttcactatgttctgagcctgaagaaacctctgcatcgggcaagcgagggcaaatgcgtaaatttgtggaatcattccacgtgcaaagatctgaccctcgtgtgctatggctacggattggcccattgttttaaggattggacccgagtaccagtagaggaacgtgaggaagactgcagctgcaaggtgcaagaccatggctcgttggcagattattcccattgatgagtactgtctcgctccgtacgcttgaccacacactgtttggaccgcgctcgccattcctaactagtcaatttgattaacaaaactttttaaaactcaagaatgttcgataaggagaaaccgatcaacatatgaagtgtacaataaatatagaattaaacgacgttgtttcgtgttcttcactctgttttttactttatgaactcaaatgtgccttcgtaccatgataccgtaagctaggccttggattccgacggtggcgatggaagcgccggcgagctgaagagaaccgagatgaccggtgaacatgacggtgacgaagctgagcatgtaattcagaacagagaccactatagaggctccagagagtgtccatagaagctttgactcccacactgccagctttagccaccaccgtggtgtcactgtggatccacgacggcggagaaactcctctatctctggcgaagaccgttcagttatctgagaatccgagtggagtcgtgtcaataacggctcgtatgtctctgtggagctcatggtccgtttattagttcctctgttttttttttcccttttcttttggtgttgttgttctgttatacgcctaccggggcgtctttttattacgactgactgttttggttatgttgggagttcgagtcgttgaccaaaattgaatcaatggttaagatctcttgtgactgtttggtcttaatcttgatgatcatagtgtaacaaccattctctggttaccgtaaatggacttagagattttactgccgattaatatttttcttgtatatttgaaactttttcttttgtaaacgatagctaaaagtgaaacttgttgacaaaatgtaaaaagagaaacatctgatctgcactgaaacttatgtgtgtaaaaagataaagagtaacactaggcatgtcacatgcaaatgcacattgggtgagaaaaaggttgtaagttttaacagtacctaatgttcttcaacgaatgtgagtagacccatccaacggctagtctcacattgacacattgtacatcctccaaatgaaatgggggtaagatgtattgttttccacgtagataatttatcaagtaatgattattaaaaaaagactgtgatcaaagaacttttcacagaattaatatttaatatgttactagtactacaacttaccacttatatgtactcttttttctaccctaatgataatgagcttttgagaccaaaaggaaagcttttgacttttgagagcagtgaacaaaagaaaaaaagaggaagaaaagcttttgagaattgtggcccatcaaatgttctacaggcccattttatcccgcgctactcctgaagcccatttgcaaccaaccaaagaagtagctattattttaaaatttaagaaataattcgcatttgatgaactgtacctgacgtaagatgaaatcaatgagttgtctattaggtcggattggcccactaaattcagaagattactcatcattttttttctaagctaattattataaaaagtttttgttctccaatatcttttataaatagtgttccctaccatattaaaattttaatacaacatactccaattagagtatttgcatgtatagaagtattgttttgttatgattaatatcatttggttctttaggatatttctaatttaattattttatgtacttttcacaaattcattcctatccatgatcataatggagtttaaatatgaagttaggatattactattttgaatataatcattaaagaatcaaataagaaattaaaaaatagtgaaaaaattcaatcaattcatttattgaataattttgaaattttgtcctgttattataatatttgtttaatagtctacataataaacccaattatttacggaccaaaaaaaacaaaagcgtccatcgaccgtgtaaactagtaaggcgtgaaggactactagctccaggcaaagtctcggtttttgtattgtgtgtgtcacgtgctggtttttattttatttttcacttattaccacgcgcgtttgagagagagagagagagacttaaccacaccaacgaaccatttaaaaccctagaccttcttctcttatacctctctctctctttcgtcttcgtcgtctcttcttcctcctgatttgactctctcgagtctcgtcgatttcctccgggaggagacttgaaattcgtgactttccgattgtgaattccccgatg

SEQ ID NO: 28870 - DNA, 3003 bp, Unknown
  misc_feature (1)..( 3003): 2750-1469P.txt file - cDNA_ID_2999153; gDNA_ID_2926229; Annot_ID_142604
aagagttgataccatggcagaaacataagcaggagatggcaacaaagatatgaactctctatgactatcaaaattgaccagagtagataaaatctacatatcactattaagtggcaaaaggtgtagaggaactataaatggccagggttgttttcagaggaagaactaataataataataatatgattggccaattgccaatcctatgcttataacatgaactatgaatgagaaggcaaaaacctgagctagaattcttacgcacatggtgatttcagacaaacagattcataacataaatttaagttgataaagcagactaactcgtattttgaagatagtatcctcaagacaaatagcgctccataaacttgtggtttttgcaagttttgcttcacccagtccaggagttcgggccattgctcaggatagtcagcgtaaattatggtcttcaggcactctcccatctgaactctgcatcatacacaccaataacgagcaagaataaggaccaaaaacagaggctagctttcctatctatacttcattgttaacatgtatgtgtaaatcaagcccatttcactctacataacacaaacatatcagtccgtagacaaattaaccaaaaaaagtagattggtcttaacgactgctgcaaggtgtacacaaactgctacctcaaaatcgggggcacttgagagacaaatacaagaatctggttcctgacaacattcttatcacttggcaagattatgttctggtcacctgcataacaaaacaaaaacaatgtaatccaagcaaacaggtaacataacaatatttgattaataaacaaactaaataaacaattaccagaatgaggttcccagtgcttagcaatgaaattcttgaaatggatactagcagattggcgtacagaaagatcagagccaccatcaacaattatttgcaatatccttatcaaatgctgtggagtgtgctgcaactgaaaaaaaaaaccgaaatttcaatcagattttaaaccttaatagcagataatacaaccacagtcaaatcaagtcaatctaatgaagaaaaaaaacatcgatactccgaatttggataagcttagttctatcacaattctaaaataataaagagagaaattgaactaagcagagaggaaggaataaaaaccagaaaaagaaaaatttggtgtatacctgattaaggctctgctcagcagctctgcgctcgtcaggattgggactgaaagcagccgcgccaacgattaaagcgaggctaggcagatccatcggggaattcacaatcggaaagtcacgaatttcaagtctcctcccggaggaaatcgacgagactcgagagagtcaaatcaggaggaagaagagacgacgaagacgaaagagagagagaggtataagagaagaaggtctagggttttaaatggttcgttggtgtggttaagtctctctctctctctctcaaacgcgcgtggtaataagtgaaaaataaaataaaaaccagcacgtgacacacacaatacaaaaaccgagactttgcctggagctagtagtccttcacgccttactagtttacacggtcgatggacgcttttgttttttttggtccgtaaataattgggtttattatgtagactattaaacaaatattataataacaggacaaaatttcaaaattattcaataaatgaattgattgaattttttcactattttttaatttcttatttgattctttaatgattatattcaaaatagtaatatcctaacttcatatttaaactccattatgatcatggataggaatgaatttgtgaaaagtacataaaataattaaattagaaatatcctaaagaaccaaatgatattaatcataacaaaacaatacttctatacatgcaaatactctaattggagtatgttgtattaaaattttaatatggtagggaacactatttataaaagatattggagaacaaaaactttttataataattagcttagaaaaaaaatgatgagtaatcttctgaatttagtgggccaatccgacctaatagacaactcattgatttcatcttacgtcaggtacagttcatcaaatgcgaattatttcttaaattttaaaataatagctacttctttggttggttgcaaatgggcttcaggagtagcgcgggataaaatgggcctgtagaacatttgatgggccacaattctcaaaagcttttcttcctctttttttcttttgttcactgctctcaaaagtcaaaagctttccttttggtctcaaaagctcattatcattagggtagaaaaaagagtacatataagtggtaagttgtagtactagtaacatattaaatattaattctgtgaaaagttctttgatcacagtctttttttaataatcattacttgataaattatctacgtggaaaacaatacatcttacccccatttcatttggaggatgtacaatgtgtcaatgtgagactagccgttggatgggtctactcacattcgttgaagaacattaggtactgttaaaacttacaacctttttctcacccaatgtgcatttgcatgtgacatgcctagtgttactctttatctttttacacacataagtttcagtgcagatcagatgtttctctttttacattttgtcaacaagtttcacttttagctatcgtttacaaaagaaaaagtttcaaatatacaagaaaaatattaatcggcagtaaaatctctaagtccatttacggtaaccagagaatggttgttacactatgatcatcaagattaagaccaaacagtcacaagagatcttaaccattgattcaattttggtcaacgactcgaactcccaacataaccaaaacagtcagtcgtaataaaaagacgccccggtaggcgtataacagaacaacaacaccaaaagaaaagggaaaaaaaaaacagaggaactaataaacggaccatg

SEQ ID NO: 28871 - DNA, 3003 bp, Unknown; identical to SEQ ID NO: 28870
  misc_feature (1)..( 3003): 2750-1469P.txt file - cDNA_ID_2999153; gDNA_ID_2926229; Annot_ID_203606

SEQ ID NO: 28872 - DNA, 3000 bp, Unknown
  misc_feature (1)..( 3000): 2750-1469P.txt file - cDNA_ID_2999157; gDNA_ID_2926229; Annot_ID_142606
tatagcttccccttagtaagagtttactatatatagaattagttgctttattaaatcatttcctcctagattgttggagagggttgtttggtttaattattttctaatcattaaactgttgggatttcgaataatcttttctaagttgattgctttcatcatcctttttcctcaaatctcctgttaatcattatactaattatgaatcaaatcatttcttattcacttacaaaaaagtaatatattctttatttaagtgtctttacagatctgacatggaacaagtgtttgctgattggaattttgaagataattttcacatgtccactaataaaagatcaatcaggtatatatcaattttccaattcaagtatttcataattatataccaatttcacatcttaatcatagctatttaagtattgtttgtttaaaatatgtttgtaaacattcatatgttgggacagaccagaagatgaattagtggagctattgtggagagatggtcaagtggttttacaaagccaagctcgtagagaaccgtcagtccaagtccaaacccacaaacaagaaaccctaagaaaacccaacaatatttttcttgacaaccaagaaacagtacaaaagcctaactacgctgctctagatgatcaagaaaccgtctcctggatacaataccctccggatgacgtcatcgaccctttcgaatccgagttctcctctcatttcttctcttcgatcgatcacctcggaggtcctgagaagccacgaacgatcgaagagacagttaagcatgaggctcaagccatggctcctcctaagtttagatcctcggttataacagtcggaccgagtcattgcggcagcaaccagtcaacaaatattcatcaggccactacacttccggtttctatgagtgatagaagcaagaacgtcgaagaaagacttgacacttcgtcaggtggctcctccggttgcagctatggaaggaacaacaaagaaaccgttagtggaacaagtgtaaccattgaccgtaaaagaaaacatgttatggatgctgatcaagaatctgtgtctcaatcagatataggtttgacctcaaccgatgatcaaaccatgggtaacaaatcgagccaacggtcaggatctactcgaagaagccgtgcagctgaagttcataatctctcagaaagggtatacatatactatttctgactagttgatcaaccattcagtaataataattctgatgtgatctttgtctattaattacagaggaggagagatcggatcaatgaaagaatgaaagctcttcaagaactcatacctcactgcagcagagtaagttttttcatcacaaaaaaactgagttaattaagctgtaattgattggtgtgtttaaatatggttttgtcttcttctttttttgtgtagacagataaagcttcgatattggatgaagcaattgattacttaaaatcacttcaaatgcaactccaagtgatgtggatgggaagtggaatggcggcggcggcagcagcagcagcaagtccgatgatgtttcccggggtacaatcatctccatacattaatcagatggctatgcaaagtcagatgcaattgtctcaattcccggttatgaaccggtccgctccgcagaaccatcccggtttagtatgtcaaaacccggtacagttgcagctccaagcacagaaccaaatcttatcggagcagctcgctaggtacatgggcgggattccccagatgccgccggcgggaaatcaggtcagttgcagacggcatcgttttgaagaaagacaaatatatttatttaatatctgacgtgtcatgttttaaattagatgcagaccgtgcaacaacaaccagcggacatgttgggatttggatctccggcgggaccgcaaagtcaactgtcggcaccggcgaccaccgacagtcttcatatgggtaaaataggctgacttggcatatagttttcctccgaaattattcttcttacagttggtgattgttatttatttttggtcgcctaagcaagcataaaagctaagtcaaatgtattatagagatctaataagttagtctcatacttataacttatttttaaacagttgaattatagtatcaatcaagtgttgggaacctaaagatcatacatgtgtcaatacttttatatttgttctcaaggttcatcagaaaaacaaaataaaaaggatagactaggcctgcatttgacattatcatgggcttttttgggtctatgaatatgaacattaacccatattactgctcaaaacgcatacgttatacaaaaaacggaaaacgctaacgtggtttactccaccacgattcgtacgtaacgactagcgagtcccatacctactcgatttttagtttcctcaagttaacggtgaaatcaaattaccgattatgtccttctaaagtgacacgtgtcttacaagaggagcgagtttatcctaatcacatactcgagcgtgtaggtttccgattaaagcgaagcagaaaaaaattactaaaataataaaaacgtatagaatgtgattaattaagtcaaccaataagcatcttacaaatcagcactctgaaaacaaacacgattattaatagaaaaagctgcgacccgactcctgagcctctctctttctatcgctctttgattttgtttctcattgttttgcttcaaattacgcattcgaatctgatcttcgttgatctctgtggaagaaacagataagagaaaatcgcatgaatttttttagaaaactaggttttaatccttcgattgcaagctacttcactaatacgagtcttctgatctcaattcttagtttttctcctcaattgccgatttctctctttcttttcgagcagaaatcgttagatcctttatcgctgtgtaatagtagtactaattttaataatcttgagagtaattactccgttcattgttgaatcatg

SEQ ID NO: 28873 - DNA, 3003 bp, Unknown
  misc_feature (1)..( 3003): 2750-1469P.txt file - cDNA_ID_2999173; gDNA_ID_2926229; Annot_ID_142611
gaatcaaattgtacttgcagcctttcccaaaattctgtttctggcaacttttctcctgcttctctctttctggtatgtatattctcaatactctgatcatattgtgttgtccctgattattttatcttaataatgatctgagataagacaatgatgcttcttcatgttatagggtagatgtttgccatcagggaaatggagaggaggatgatgatgatgatgaagaaaatagcatccaacaagtgttgcttgaaaaaagcaagagcaagccaggttcttcgaatgcaagtgatcgtagaaagtgttgctctttccatggtattcatgttggaacccggcagaagtttgttgttgcggtatgggatactttcagttttgtgcattaacctctagccaagtcatttctatgatctttataaaaatgtttatcttttttgctaggcaattattcttgtgttcatcttaatgatatcatttgcaatccttatctggatcgcttccggaaagaatcctatgaattcttcattattggctgaggtatgtggtattcctctgcacattgatatttcctctttcactaagttcttaagctcgagaaatagaagacttttgtctatattttttctggttttatgataaactcacttccttatataggtgtatgtcgatatttttgctgcaataatcctaatcactggaggaggaatctgcttctatggtaagtgatttcttaagttcttttctggtttcagctattcatatttttcttctagcaattcgtgagatgttttggtcagtggtttactggcttattgctatgattgaacagcgtatattcacaaactcttttatgttctttaggcctgcgtctgctctttaatctaagaaaggtgcggtctgaacaagtttcatcagagatgcgaaaggtaactaatgattctttggctcaacaagcttttctttctttgcacatgtcagtcgaatccttaccctgaaagtacattttaaccatttataggtatcgggtctagcaggagtctcagttgtttgcttcactgttagctctttaatcgctcttctcacacacattccagtaagtcattatcactcaaaaaagtatgtctgtaaaccgaaacctaacattcgtcgatacatttaaccaaaaccaatctttgatctcagctcttttatcattggaacccaagcaaattacacggcatcaaagcattggttcttctgatcatatactatttcataggtgaagatttttttctttcgttttgttgttttgaagaccttcaaatgcagggttactgataagaacgctttttaaaggttccaccgtcccattggctttcgttttatgggttttgcgggagttaccccctcaaaacattgtgagtaggcaagaagacaccagaaggattacttatgtcaactatgaaactgttccaaggcaacctcaaggtcctcaacaagactgggcctccgccacagtgtcgaaaaatcaggtatacaattctcttgatgaacatctaaattaggaagtcatgtctgacacatacaaggagttttatagtaagctgtaaatgcatgcatcagataaactaggggtgggaatataaaccgaagcaaaccacaatatttatagctaactaactctatttagataagaaaaactcaaaccgtatgctcacttttaagataaacgcaatgttgagagcattcgagaaaggtttgaacgaattgcggtctgaacatgaatacatagttgaaacactacgaaaaatcctcaaatgagaaagaagttttcattctattagtgacttctgaggttatttcagagtttcctttttatcgaccatagattgtttagggaggtcacttaacagtttttggttcggaaacgacggcgcaggtgtctaaagcaagtcctatatgaaccaaacaatcatcataatcattgacctgaagcaaacatccgccaatcttcttttgtagttaccgggaaaaagcctcgtgggattgcagaatggttcttaggcccaatgtggtgtgttgtggtggagtgaatgaaagtggaaacaagctcgttttcttctctctgagtcgccttggaatacaaaaatttgtttataagatagaaatggaggtttgaatctgagaaagctgtctgtaaatattaacttttgattgcaatttatagtttagcatcatgtgttggggggacttgtggatggatataaaatgtgttccaaggaagatataattttgtcttcctttctaaacagcgtcgtttaagctgctttgttatcatttacatatacgacgacgcatcattctggttttaaagatggcatattacgtttgagattaaacgccaccgttttcgaaagatagcacgggcattatacgatgtcgtattgcttcctctttcgaaaatttgttagcgcgattttgttaaacttttagcgccattttttttcacattaaaaatttgagaccccgaaacggtatcgtttgttggatgttatcctaaaattgacggatctgatatgaaaaaaaaaatccttaaaaaaaccgtttgagaactttttggatatttgtggtcttctcttttcgtctttcttctccactgtcaccttcctcgctaagcaaaagaatttagagagagcttcgtactatgcccagagaaaaaagcaaaaagcgagagccaaaaagataagaaagatcaaaagatgaaaaagcttagacgtaaaaaagcagaaatatatgtatatagaattaacaagtctctcgaagaaaaccctttagccatctttatcaatctcttttcttttgcgttctctataaagttggtataaaaggagatcaattaacaaatatgttaatcgattactttgatttcagtgagatttttgatttcacgaataaattattgggtttttgtggaggaggagagggtggtagtagtaattatagtttcgattcacggtggatatg

SEQ ID NO: 28874 - DNA, 3000 bp, Unknown
  misc_feature (1)..( 3000): 2750-1469P.txt file - cDNA_ID_2999184; gDNA_ID_2926230; Annot_ID_142616
aaggccaagacacataacttcaacgtttgatttggagcagtattgtatcgataccgtgatgactatttatcattaccatggaggttgtcaagttggaaaagtggtcgacaacaattacaaagtattaggggttgatgctttgaggatcatcgatggatccacgtttctcaagtctccggggactaatccacaggccacaatcatgatgctcggaaggtaaaaacacgcagaaaccaattgatacaaatgatctaaacatgtttttaatctttttttttcaaaatatgattgttggaaaattgtaatgtgtagatatatggggcagaagattcttcgagagaggatggctttccgaggaaaagaggaagaaacatgagatttctaagtacatatgctaaaagatattgttgtttggtgttcgttgctccaaacgaagacattcactatagtgtatatcacatatttcatgaatcttacaaatggggttttctgttgcactaaagtcatttataaccgactgaaacacttgatacatatccttgttgataatggccttagacaataaaaggatgaattgccttattgttgcaaatttaagaaatttgttcttagtaaggatagattaaatgttgtaaatatattcttatgtgttgatatatattcctgataagattgcctaatttatcccgacattgcaatgaaaatccaaatgaggtgtaaggcaaaaactatcaaggttcaagcgtattttgcaatcaaccttcatattcattttttcccatgccatcgttgattatatttttactttttagtaacatacttctgcacaagtataacgtcaacaaatttgattatgaaaggtcaatcctcacaagtctcactcaatgtatagtaatagtgaacaagacggtagggcagtcaattgcatacacaaaattttaaaaatggaaaatttattatttgggatctggcctactagagagctccaaaatggagctgaaaaggactacaaatcctttggtgtgctccaaaattattttcatatctttttcgcattctttgtttagttggaatatatatttcatgatttttcttaatccaatctgctaggatcatattcgatgatgttaaatttgaaaatatttgttctcctaattgaataacgagttagagaattatcttttagttatgaggtatgcatggttgtaaaaaagagattagaacatgtaaggttttgaaagaatcgtatatcaaaagttaaatcaataacataacatataaagtatataagatgtgacgtcaaaaataaacaatctaacatgcatatgtacgcctaacatgtgattgcagcttaagttagtttatactcaaaaaaatattttattaaaagatctttaataatattttcatatggtcctaagtctaccaaaatatcaaataatattttctatactatggttttgaatcctagatcattcacacagctacgtaccatatgcattgttggtaccaattaataagtcaatgacaaatttaactaatgcatggccctttaaggtttcgcaatttttttaatcccataacgcccagtttttaagtattgtgccgcagcaatgtcaatttatttaagcaaagtgcccatgaatgtgcttgtgcagactctttaggtcaaaacaaagacagcatagaattacgtaaggatgaagttagattacgtacgacgcgtagatatgccggtgaatttgtaaattcataataataaaaatgattgttctttctttcaaccaatcaaaacccgatggctttcaaattacggcgaaaccgttactagtcaaccttttaatatactattcattcctaacatacatttccgaaaatgttctctgattgatctgactaatatggataattaactttacttactataaaatttgctcttaagccgataaaaaaataaattgatagatcaaaacttcgacggacattcgatcgtgggggcgaaatttgagctttctctccttttaattagataaatcatcagaaaacgtgggctgtgtgaatgcaacaattatggaatacttctatctacagtatacagtatatatacactaacaaacatctgagaaatattgagaaaagtatacataaataaattaaatgaaaatatgtattaatggggcatattcccattacatccatgactctacccacatggcaaagacttggattgaaaacgaagaaattaacaacgaagcaacaaaacaaaaacaaagaaaaaacatccacgttgaattggtcatcagaaaactccctccacattttcttaatccataatgccacaaacacaatcattcatcttcaatcattccattatccaacacatcataactatattccacgtggcatttatacccccaccatcttcaggttttctcctttgtaaaaaaaaaaaaacacattgcacaatagagagagcgagcctaaacgattttccacaatagtgctataacatcaaaagtctttttcgacggtgtctttggcctcttcttttgaatcctcttagctctggcatcttcaggtccatagattcttctattttatatcattttttatgtattttactatacaaaaatatctaattgataaatggttactctagtgttatacagttgaatactatagaaaaaattagaaatagatactctttcacgagattgtttttttcttattgtcaacaagaagaagtaaatgcttttactattgtatccttctttaatttattatcgggccaaaccacggggacacgcgcttttaacaaaagttgaaaagtcatgttactcctcctctcaattcgtctcctccgccatgcgaactcaaactcaaagctctctctaactttttgcttttcttcgaatctgtgatagatcgagacttggatttatcagcttctccgtgctcctttagcttctgctcggttttgttttttttagtctgacgatg

SEQ ID NO: 28875 - DNA, 3000 bp, Unknown; identical to SEQ ID NO: 28874
  misc_feature (1)..( 3000): 2750-1469P.txt file - cDNA_ID_2999184; gDNA_ID_2926230; Annot_ID_203622

SEQ ID NO: 28876 - DNA, 3000 bp, Unknown; identical to SEQ ID NO: 28874
  misc_feature (1)..( 3000): 2750-1469P.txt file - cDNA_ID_2999184; gDNA_ID_2926237; Annot_ID_203924

SEQ ID NO: 28877 - DNA, 3000 bp, Unknown
  misc_feature (1)..( 3000): 2750-1469P.txt file - cDNA_ID_2999190; gDNA_ID_2926230; Annot_ID_142620
tctcagcaataacttgctctctgagattattccaccgaatcttgctgactcttctaagcttcttaggcttaatctcagctttaattcactgtctggtcaaatcccagtgagtctctctcggtcttcttcccttcagtttcttgctcttgaccataacaacctctctggtccaatcttagatacttggggtagtaagtctcttaatctccgtgtcttatctcttgatcacaactctctctctggtccgttcccattttcactctgcaacttaactcagctgcaagattttttcctttagtcataataggatccgtggaaccctaccctctgagctaagcaaactcactaagcttagaaaaatggatattagtggtaacagtgttagtggccatatccctgaaaccctagggaacatttcttctcttatacatttggatttgtctcaaaacaaactcaccggagagattcctatttcgatttctgacctggaaagcctgaacttcttcaatgtctcttataacaacttatctggtcctgttcctactctcttgtcccaaaagttcaattcctcttcttttgtcgggaactcactgctttgcggatacagcgtttcgacaccatgtcctactcttccttcaccgtctcctgaaaaagaaaggaaaccatcccacaggaatctgagtaccaaagacatcatcctcattgcgtctggagcactcctcatagttatgcttatccttgtttgtgttctatgttgcttgctgaggaagaaagccaatgaaaccaaagccaagggcggagaggctggacctggagctgtagccgcaaagactgagaaaggaggggaagctgaagctggaggtgaaactggagggaagctggttcattttgatggaccaatggcgtttactgcagatgatcttttgtgtgcaacagcagagataatggggaaaagcacttatgggactgtgtacaaagctacacttgaagatggaagtcaagtagcagtgaagagattgagagaaagatcaccaaaagtcaaaaagagtttgagaatgagattaacgtcttgggaagaatccggcatccgaatctccttgcactcagagcttattacttaggccctaaaggagagaagcttgtcgtcttcgattacatgtctagaggaagccttgccacgtttctccatggtaagtttgatactaaagtcttaaagttaaagacaattttgctttacaagtaccattttgtaactctgttttcatatttgaaattgcagcaagaggaccagatgtacatatcaattggcctacaaggatgagcttaataaagggaatggctcgaggcttgttctaccttcacacacacgcaaatatcatccacggaaacttaacatcaagcaatgtgcttttggatgagaacataaccgcgaagatctcagattacggtctctcaaggctaatgacagcagcagcaggatccagcgtgattgcaacagctggtgcgttaggttacagagcacctgagctctctaagctgaagaaagccaacacgaaaaccgatgtgtacagcctcggtgtgatcatattggaactgttgactgggaaatctccgagtgaggccttaaacggtgtggatttgcctcaatgggttgctactgcggttaaagaagagtggactaatgaggtttttgatttggagctgttgaatgatgtgaacacaatgggtgatgagattttgaatacactgaaactggctttacattgtgttgatgctacaccatcaacaagacctgaagctcaacaagtgatgacacaacttggagagattagaccggaagagacaacagcaacaacatcagaaccgttgattgatgtccctgaagcttctgcttccacaagtcaatagaaagagtggagaatttttgtagtgtggaaatgttgcagagtagtagttgatttcttttgcaattctttaattcttccaagttgtttttttgttctttgtttgtttcagtgttttgaaccatttcttcatcagtttatgtttgtaaatagtgtctctttcatcaagtagtctctgtcttttgagcacagtgaaaaatttgggttttgaagaaggtactactagaaatgagtttcaccatctacagtaaaaatttaggtaagttttaaagcaccatttacaccatatactgaaaaggagaggacattgagaagattcaaacaactaaccaaagtccaacaagaatgaaagtttaggtacctatgtaaagaatgaaaatgctcacacatttgccaaaacataaacacataagagtacaaagatacgcactagccagaaaaatgtaaaccagtatataatcaaagttaaagcaacagccaacaagtgccaagatttcatttttagaagatgaaatgaaatggatttcaaagatggaattcttttaatctcaggagagaaatttgagaatttataatttttcatgactaatcaaattgttaaggttcgagattatttaaatccaataaaatttatattaaaaaaaattagtatcactcataataaatacaagtattaataattgtacaatttagagaaattttgaacagtctaaaaaatttctaaacactataagaattactattttcaaacctatacatattttattgagtttattcctttttctcactaagaaaaatgtattttctcttgacagaaaaaaaaaaagccgaaaaggaaaataagaaaaatccaaaaaaagagaggccaaaattacacaaataccaacggaaaaaaaatatctgccagcaaagcaatgcaccacacgcctgacacgcgcccaaacccacctctcaatcgtatccatccacgtgtcaacaatccacagcctcatcatcccatatcacctcactttatattccctcctccgccaccaccaatcgcctcaccacaaaaccctttctcctccaatttcgtcgcacacaggaaaacaaaatg

SEQ ID NO: 28878 - DNA, 3000 bp, Unknown; identical to SEQ ID NO: 28877
  misc_feature (1)..( 3000): 2750-1469P.txt file - cDNA_ID_2999190; gDNA_ID_2926230; Annot_ID_203626

SEQ ID NO: 28879 - DNA, 3003 bp, Unknown
  misc_feature (1)..( 3003): 2750-1469P.txt file - cDNA_ID_2999201; gDNA_ID_2926230; Annot_ID_142628
caaattgctaagcaattcggaaatatagaccaggaaacaatcttactaaaaatacccctgattctgcatgatcaactagtttcaaaggaggaacaataatatgcaagtcgttcggcttacagttaaaattcctaataagttagatgccactgtcacagcaagagcaagagcagcattaccaccagcaagctgaattggcaatatgataagtcagtggaacgcaagaaaaacagttttgcacaaaatattgattagacttatatcaaattgagtacgtgagtaagggcaacaccacttgataaggtggttggcatacagcaaaatatacccagccctgtaaagagcaaaaggacatacataagttttggactcctcaatcactaactcactactgagctggaactgaagaataaggtattcaaaattgaaccataaatgtaagaaacggatcaagattcaaagacaacgtcaaagtggaactgttggatacaagatcacaaaggcaatcagattactacttaataacgcagctatagttgatcaattagttgtcagatattatataacgagagacaatttaacaaaaactgtagatgtaatgtaaatcaatggaagccgatacaatataagcagtaacaagttcaggaaagaacgtggtctttgaagttttacttgacactaagtttaagatagagaaagagtaacctgtaacaagttcacgaggttggagttggaccaacataattagccttgagaaggatggagtgagcaacaaaatagagatctgaaagaaaaagagaaatagtttgcgtttaagtatgtagtataactaacaggagttaaaaaaaggaaaagcattaccaaaaggtttctattcattagattttcttattttcagaacttagcagaagagatctacagaagaggaaacattcacagaacatatgaaagctaaagatgagtcaagatcatactagcccaaagagtccaagaggccaccctttgacagcagcaccaatcgcttcggtacgtaaagtcaaccctgctccacaatacatgaaaagagtacacatttgataagctattcgacagaaacaaagtgattgcttccatcaccctttaacatagaaaaagaagaagaacaaagcaattgtacacttatgccacagctgatagaatcacctgatataataaatatcccgcatgtgctgatcttagtgaaagagtacttgtctgcaagacagcctagagtcggatttgcaaagcccaaccccactccactaacaagagctaaccaacaaagcacaacatgaaattgaaatgtcaaaagtaacaaagtgaggcataagaggtcactagaagcatcacattaaagtgataagtaatcttcatggaaaattgaattttgatgcagtcaaccttgtcatcagactttaaaagatctagcctaaactttcatctcaagaatcgttagggaaaatgaggattacgtggaaaattggaaaggaaaaaaagggcaagagcaatgtgtaatgttacctagaggcaagaaattatctgaagcaaaactcagcaattccttgccaaaatataatctttgagctgaagctgaaatgcctccgtcaccaccaagctgtgaacacaaaaaaaaatctccacattcacaataaagtttgatcatttacatgaatccgattccattctccacacgaacttggaataagcatagaagaatacataaaatcgaatggaaattgaccagagaccttgtcggaaggttggcatgctctaatggatctggaaatccatcgtctaccacaggggtcttgacagcgacggaagacgacggagcggttccccggagacggtggttgacggagacatagaaaggggttttgggttgaagccagggtactagctatcgccatgggagtagagagaattagaatccaaaagtgagcagaagaatgatcaaagtttggctgcttagttctgcattactcagttctcaagtatctctctcagtttaaacaaactccggcttatcggaaccacttcctgtctagcttcccactaccactggctcctgttatttatttattcttttaactcaaaaaatataggaatattcattttcaatttgaaccaatcacaatgagtttgtctttcagcctcaaacaaacaattgggtctaaacccaatattggagtagatacattgggccaaatcagagggcataaaattaaacataaaggctaaaggagagcgaacccaagtaaattaatctcacttatttcaagtgcattattattattttaattgtatcaccaacattcatatcccctctcacatggcattgatgagcagaatatgtccaatgtatgtagtaatgaagtacatttgtgttatatagcccatttgctcaaattaaattgtaagcaaaaaaaattattttcaaattatgttcattccacaatttatagatccgttgaatcaactgtatataattcgtatgtccataaatatttttaaggaatctagttctcctaaactacttaaaagaaataaaaatgcaatcagaactagcatttataagccaaaaataccaaattacgggccctgctcaagaaagaaaaaaaaaaaaaaaaagtgctaagcagaccatagaagagatattttgagctgtagaaaaactcaatgcaccattaagattgcttaaaccccaagcttgtgacttgtgaggagtttaacaaaaagtcgtcaaatcctgattacgacaaggcacctaatactttttagattgcaagaaaaaacaatataaaacaattattttgatcacattagcttcttacccaataacaaaccgccacgtatgacttcgcttgttcgataaacaatctctctgctccatataactgaatcaaagactttcacacgagatcaaggaagaaagatcaaaactctttctttcctttttttgttgaaaatcaaatctaagaaatg

SEQ ID NO: 28880 - DNA, 3000 bp, Unknown
  misc_feature (1)..( 3000): 2750-1469P.txt file - cDNA_ID_2999203; gDNA_ID_2926230; Annot_ID_142632
caattcacgtgtgccgattaatcatcaccacaaaaaaaaaacactctacacaataggcatgctcttccttgtcacgtatagattcatagatatccctaccatttctcatattcttctacttttacagtctgttttctcctcattaattaattgtttaataataaaaaaacgatagatatttagggtttcaattgctcggatttaccaaagaaaatggcagtcacgtgatttgcattttgggaagtacattcacatgcacaatttgacgacataataagaaaaacaaaacctattaatctctaaagctgagaaagaaatggttttgttgtccacatagagtagagagaaagggacgtgagcgagagagtttggacatcaaaagttcacatacaaaggagatttggtctcttcccatatattctgcaagaaaatatatttgtactgctgcatattattcgtgttttacttcggcttatatagaagtgggtttgtgtccacacattaatattattgtatatataattaaaaaaaatttaaatgcgtgtgaaaaaacagtcgagagtattttagataaagaaaaataataatacaaatatgatatgtactacacactacactcgagcagaaaataattttacaactctgacatttgaggttgatgtgtagactcaggttattttatatagagataaaaaagataggaacgatctttacaaaaaaaaaattctaagaatgtcaatgatttgtttgtttttcttacagccactgtcaaatgagtttttaaatgtcattttgtaaagcagtcaattttaaaaattgccaaaaccacttcacttgttttttttgaatttttttaatataaccctaaattgtttcgagaaatttacgatgtatagtcaaagtataggccataacaaatgtataaacaaaaatttccacccacacacacacacacacaaaattcgggtgaaaaatgactaggtaatcaaaactaataaattagtttatttccttattcatttcttcaatctttccttgtataagtaagtataactgtataaaaaacaaaatataaaaatgtaagaaggtctcgtgttcttgacagctatatatcctttgtcttctccccatatgaatcgtattcccttgtccgaatcaaatatcattgtatgacacctaactgcacatcttgataattttatgattttaacaaaaacttaagaaatcctgtgaccaaaaagaacaaaaactggataatccaacattgcagaggctactagaccaataccacgtgtgaagagatcattagacggcttccattgtattagggaaatgatattcttgtacttagctttgataatattatatgactaacgtctaaggtctaaccgctatgttaaaatgcgttgttttgttcaaatcaaatcacttcatacgaatttaaatcctcatacatatattcttgggatgctgcattgtcaatgtctctctcagactctctggttacatatatatatatgggtgttgttaaagacaagtcattagttaaactacaagatatgtaatttgtatatatggactgtaattgaaaaatttagaaaggaccaaaaggacaaaataacattgagatcttaacaagaatgtacaaaaataaaacccattccatctgccccactctcttcttctctaagtgacaaaattatcatagagaattaggtcacgggggcggctttgggctaccaaaacatcaccttttcttctttttttaatctatattttataaaaacatatattttgcacatagcatgatttcaccgtaacaaatatactgtattcgtagccgactagaaaagaaggaaatgaagataaacagatacagggcccatataatcttcaacatgaaagcacaagaaggcccattagctattttacgggctctatgaggcccaggttcttcactctacctgagctaaacaagccagtctcaaagtttttttatttttcaacaatcaaaaaactcttctccaatgcttaagctgaaatctagtttattttttctatttactaaaacctcccaaggaccaaagaacatcgacaaaggaagacgacgaagaagatttcgagcttcgacaaatcatgcggattcttactgctcgcatagctaacgtaattacccaaaattcttcatctgaaatttcctctctttacccgtttataagcttttccttgtctttctcttcatcaatgggtttaacgggtcgttaccgattcttctggaatctgaagtaaaatttgcagcatttttgcagggcacgaaacgcgaatcctcgatctcgaaatttctcctcgtcgaacaagaaaggtgcctccttttttccttttgtctttttttcaatcaagtctataatctgtgaaaggatcgactcatggtcttaaatttacaccagattaagatagaatgaagtagattgattcgaaaatctgatgagcttttggttaagtagttgtaattgaagtccatttctcacttcacactagtagtgagagtctcgatttcaatcacatttgcttgtaattttactccaaagtggttgctttgtttgatgaatccgtactttagtcttagaaacaatcatgaagtagtcataagagtagagaagagtgtgacttggactcatcaaaagaagtaaagggcctttaggtttgggtgtgttatgttcttagctttgctttcattttctagatgaccttacattggaggaagaagctgagaggaaaataggttggtgtctcaaaattttctttgcgggcacagcaacgtatattggataccagtttttcccttacttaggtatgtgaatgaatctctatatctaatcagctcttacatttttttattaatggtggatcactgattgtcacttatttgggttaggtgataacttaattcatcaatcaatatcgcttttacatgtgaaggatcctttgtttaagagaatg

SEQ ID NO: 28881 - DNA, 3000 bp, Unknown
  misc_feature (1)..( 3000): 2750-1469P.txt file - cDNA_ID_2999210; gDNA_ID_2926230; Annot_ID_142634
gtgatagataagatattcgcaattttgaatgataacaatgtaaaaccgcaaattgtgaaacttttgtccatcattcaaaaaatttagtttttggcaaaacaatccgtgaaaaggacaacattatttatgtatcaatacaccccactacctagtcacctaaagataaaatgagttagttcggcttaccattcaaactccacatgtataatatgatatttttatagattgacatataatatttgtgttttattgttcatgatattctttagaaagcttgaaaataaaatattaggataaaaatagttttctctaagttcatagtcaaatactactatctaataaaagtaaactttgattgaccccatatatataaaaattaggtaattggtactgcaacaaaacatgtgtagtacaaggagacctcatagaattctttgtacttgtactttctgttagtggattttaaagttggtaagcttttttccacatcaggtataactaaccttcctaaacctttatactttattattggaaatatggtaaatgcactaattcataatgttctcgtttcctttacgctaacttctccgaatctttgcttttgcgttactataaatattcagaagacaccatttcttctcattcaacaaacaagcatctcattctctgattcggtccatcgatctcaaaggctcaaagcttaatcgtttcctttcttcttattctagccatggctcaggtaattttgtgactttgatattcttcttctttttttctccatttcttggccatgaaacgatggaataatgtttttgagagacattgatctggaagcaggaatgtctttttgtgtccatctccaaaaaagatgctagcaattgtctatatatatcggttatgagagtccgattaatcagtttttatgataataaatattttggaatgaattaatatcaaatttcaagagggaagaaaagagattgattggtctaggtctaggttctatctgtaagtactataatgtccgattagcaccactttgaaatattcatcaaaaaaggtaaatattattaagctagagcacaaaagataacagttaataattgtgataaaattagctgttgatatatttggaccgaattggtcctatgtatatggatatggttcttacattttcggattaaattgtctaattaatgcagaccgttgtcctcaaagttggtatgtcatgccaaggctgcgttggtgccgtcaatagagttttaggcaaaatggaaggtatttctctctaatctttttttcatgtctttcaaatactttctactaatcattgtttccctttattttaagccttataatttattgactctataatttattatataatctcaggggttgagtcatttgacattgatatcaaggagcaaaaggtgacagtgaaaggtaatgttgagcctgaagcagttttccaaacagtttcaaagaccggaaagaagacttcttactggccagtggaggctgaagctgagccaaaagccgaggctgatcctaaggtcgaaaccgtgactgagactaaaaccgaggctgagactaagactgaggctaaggttgatgcaaaagctgatgttgaaccaaaagccgcagaagccgagactaagccatcacaagtttaagtatactaacgatgaaaaggaaggctaatctacctttacaatgcttctttatcttttgcttttgtgtgttgttgtaagaaatgcttcctctaaatacctaatatctttatgtatgtatacctttttcaactattgataacaagatgttggacccatgttggtccgactttcttttataagaagttttaagtgttttactagttaattaaatactgcgagagtcttaactttgacttattataaaactcaatccattcagacatctgtctgaaaataggcaaaaacagaatgaaccattttcaagagaaaattgtaagatgagccggcctgaagaacttggaagccccaagcaaaagtttttctggtctatttacatatttttgtaagaagttggacattaggatgggatttgaagtttgaactccccttggtatttatataagcccaaaaccaaatagactaataacttattttgttatatatgtggccctaatagtacataatattcatgtggattcaaatttgagttatcatcttacctgaattactatatgggtgtgattagtatacactaatctagctaatccattcagaaaacaattcgtgctaagatttggattgcacattcttacaaaattaatgagttattaattaatatttttcccaaaaattaagtcaattaatgttgaagctataggagcgacgtgcttacactacacatatttgctgttgaaaggttggaaagtccttttcttctttaccaactttttacgtcttttagcttttgaagctatctatcgtatctcaaatctctgtattcttatctactctctaaatcattcttcatgagttaactttactaaattatgtacggttagcatcgatcatatacatgcgaagcatatacatatatccagtcaagcatataataaacaaattaataaatatattggatttgtttcattaaattaattaagtatataacatcccatgaaggttccaagttccaactatacaactgcccctaaaagattccttcatgtcttaatcatttcatctacgttgttttatttgttaaattatgctcaacaactctttacggaaacaatcatgtaccgagttgattattaacgaaaaatatatttaaaaatgtttcaagaacgtagccatctctaaccaattcttgaaccatactttaccaacttgcgttcgaagcaagaaactgctcctccatcatcttcctctattgatcttcttcatattctcaagtttactccaaaaattgcgaggtagagaagaggaaactacaaaccaagaacattaaatg

SEQ ID NO: 28882 - DNA, 3000 bp, Unknown
  misc_feature (1)..( 3000): 2750-1469P.txt file - cDNA_ID_2999210; gDNA_ID_2926230; Annot_ID_203642
ttgaatgataacaatgtaaaaccgcaaattgtgaaacttttgtccatcattcaaaaaatttagtttttggcaaaacaatccgtgaaaaggacaacattatttatgtatcaatacaccccactacctagtcacctaaagataaaatgagttagttcggcttaccattcaaactccacatgtataatatgatatttttatagattgacatataatatttgtgttttattgttcatgatattctttagaaagcttgaaaataaaatattaggataaaaatagttttctctaagttcatagtcaaatactactatctaataaaagtaaactttgattgaccccatatatataaaaattaggtaattggtactgcaacaaaacatgtgtagtacaaggagacctcatagaattctttgtacttgtactttctgttagtggattttaaagttggtaagcttttttccacatcaggtataactaaccttcctaaacctttatactttattattggaaatatggtaaatgcactaattcataatgttctcgtttcctttacgctaacttctccgaatctttgcttttgcgttactataaatattcagaagacaccatttcttctcattcaacaaacaagcatctcattctctgattcggtccatcgatctcaaaggctcaaagcttaatcgtttcctttcttcttattctagccatggctcaggtaattttgtgactttgatattcttcttctttttttctccatttcttggccatgaaacgatggaataatgtttttgagagacattgatctggaagcaggaatgtctttttgtgtccatctccaaaaaagatgctagcaattgtctatatatatcggttatgagagtccgattaatcagtttttatgataataaatattttggaatgaattaatatcaaatttcaagagggaagaaaagagattgattggtctaggtctaggttctatctgtaagtactataatgtccgattagcaccactttgaaatattcatcaaaaaaggtaaatattattaagctagagcacaaaagataacagttaataattgtgataaaattagctgttgatatatttggaccgaattggtcctatgtatatggatatggttcttacattttcggattaaattgtctaattaatgcagaccgttgtcctcaaagttggtatgtcatgccaaggctgcgttggtgccgtcaatagagttttaggcaaaatggaaggtatttctctctaatctttttttcatgtctttcaaatactttctactaatcattgtttccctttattttaagccttataatttattgactctataatttattatataatctcaggggttgagtcatttgacattgatatcaaggagcaaaaggtgacagtgaaaggtaatgttgagcctgaagcagttttccaaacagtttcaaagaccggaaagaagacttcttactggccagtggaggctgaagctgagccaaaagccgaggctgatcctaaggtcgaaaccgtgactgagactaaaaccgaggctgagactaagactgaggctaaggttgatgcaaaagctgatgttgaaccaaaagccgcagaagccgagactaagccatcacaagtttaagtatactaacgatgaaaaggaaggctaatctacctttacaatgcttctttatcttttgcttttgtgtgttgttgtaagaaatgcttcctctaaatacctaatatctttatgtatgtatacctttttcaactattgataacaagatgttggacccatgttggtccgactttcttttataagaagttttaagtgttttactagttaattaaatactgcgagagtcttaactttgacttattataaaactcaatccattcagacatctgtctgaaaataggcaaaaacagaatgaaccattttcaagagaaaattgtaagatgagccggcctgaagaacttggaagccccaagcaaaagtttttctggtctatttacatatttttgtaagaagttggacattaggatgggatttgaagtttgaactccccttggtatttatataagcccaaaaccaaatagactaataacttattttgttatatatgtggccctaatagtacataatattcatgtggattcaaatttgagttatcatcttacctgaattactatatgggtgtgattagtatacactaatctagctaatccattcagaaaacaattcgtgctaagatttggattgcacattcttacaaaattaatgagttattaattaatatttttcccaaaaattaagtcaattaatgttgaagctataggagcgacgtgcttacactacacatatttgctgttgaaaggttggaaagtccttttcttctttaccaactttttacgtcttttagcttttgaagctatctatcgtatctcaaatctctgtattcttatctactctctaaatcattcttcatgagttaactttactaaattatgtacggttagcatcgatcatatacatgcgaagcatatacatatatccagtcaagcatataataaacaaattaataaatatattggatttgtttcattaaattaattaagtatataacatcccatgaaggttccaagttccaactatacaactgcccctaaaagattccttcatgtcttaatcatttcatctacgttgttttatttgttaaattatgctcaacaactctttacggaaacaatcatgtaccgagttgattattaacgaaaaatatatttaaaaatgtttcaagaacgtagccatctctaaccaattcttgaaccatactttaccaacttgcgttcgaagcaagaaactgctcctccatcatcttcctctattgatcttcttcatattctcaagtttactccaaaaattgcgaggtagagaagaggaaactacaaaccaagaacattaaatggattgctcaatctgcaccacaatg

SEQ ID NO: 28883 - DNA, 3003 bp, Unknown
  misc_feature (1)..( 3003): 2750-1469P.txt file - cDNA_ID_2999218; gDNA_ID_2926230; Annot_ID_142638
ggaagaaaacacgtcaagctagtgaaaacaaaaagaagaccttgaaagtggctccaaaaaaggtgaattcaggaaagctctggctgtttacttatcagaactgtaataattctatgttgttatcatctttctgcgaaaaagtagtcaatactttgatctattggttttatggctctagcaaagtgtatatcagtgcattgtatgtttcaacattgattgttcacaacgttcttctgccacatgtctgaaaccagtgctacacatagtttgaagtgaattgcctagtccttcagtttcatgtatattcttctttttttcaaaagttggatttagaatattgtcacgagatacagtgggattactgtttaatgagatatgcaatttggaactcccattgttcagttatagagccttatgactattggtaacatataagtttgctccaaatctaattctgcatttgtggttacattacagagacagcggacggtaaagcaagagaaagaggatccggttagtgcagcttgtcaggattatatcgagaagcagaaagcttactttgcagagattgatgcatttgagctgccagtagaagaggtatctaatagcgactcagactaagtaagaagagataacaatcttaaggatatcatagagacaccataacccgttcgtaatcactgtatagctaaggagtattctcacaggaaatgtttcactggtcacttagtacacatgacacgtcaaatctgtgtatacaaaatatctatcggtttataatatttaacatcgtttcagtgggagaacgttcttggttctacttagacatgaattgacgaaaaagcctgtccacaatacacaggtaaggccacgactgagagacaaactatatacttacattcacacaccaataactataacactctctgttcaatgaggcgaagcagctcatagaaaaaaccaagctttattcacataatcaagctttattcatgtcgctgatgattagagctttacctgtggtctcatgtctcttcataccctccattgacccagagaacagagctcttgtcacactccccattgaagaactacagccaagtcttcccccgttggagcaacacagagtcgaggttggtgaagacctaagctcatcctcttcgtagttagcgtacagaagtggcgattttttgtcgtgactcatacgttttttcaaagaatgtggtggcgaggaggaaaaggaagatgaagatgacgtagaagaccaagaaaacgatgagcttgccgtcttcttgctaccgtgattgctcctcctgagatcactgaacatggagaaggacagaaacttacttagttttgatctcaccttgctttgcgtccttggtgtcgacaaaatcccggaggagtagtatgagggcggcggtgtgagaggcagaggaagagaggaatcggagcagaggtggtttttgggtgttcctggccttgactcccatatgaatggtatggaggctccgccatagtaggaggatctctcttcatcgattgcaaagtcatcttctagtctttctgacatctgttttttataaactctcggtttatgtttgagtcggcttttgatgagaattgatgtacgaaaattgaaacaacaagtgctagtttcgaagcttctttagaggtgacaaagagtaatatgtattgcgagtaaaacaagtttgccgatgaaacaaaagaatcttctttgcacggttgtatataatcgtggatatttattctgcttttttattttctttaggaaaaattcatatggatgagcatattacaagtatatggaagatcatacataggggaaaaaattggttagataataaatgaaaggtggctatcttactgtatgcattacttaatgcgttttcattaataataagagagtcgtgaggtgaggatcacattattggtaaacagttactgtagtaagcattgcttagagtatttaatatgttaccttttgtgggattccactctataaacctttttatttggtgttcttataattaaggaaataattattgaccaacaaatccacacgttttaatatatatcaagactactaaccttgtttgtcgtaatttgaaactactgaccaaaagtttggggcatgttcatccaaaagatataatggtttacatttaatgaaatgataatttagataggatataatagggaactactcagagtgtcagaccaaaccatctgaatacgtaccaatgtcaagtgctaactggtaactcccaacaatagtaattagaaaagatatatatatttgtcggttctaattagttggaagaaacgtatgcggagaaataaatagaaacgtgagagatcgaaagacgacggtgatgaatttggacggttgagtgagggaggtcgtataatttaatggtcgtttccaatcgtattcgtacgtggtccgttttctcctactcggattttgctttaatgtgatggccacacaaattggttagaaaactataagggaaagctccacctatttatttcactcatacatttactatacactaatatcgcacgggaaaattataacaattttcggatattcgtatttgaacagaaacaaacaacacatacgtaagaatttccttcacaaaaaagcccaatatagacgaacttgaacttcgtaccaacggcccaatatcgcttccttaatcaacggcccaaaattttcatttattaattaatcagataaccaatcaatagaagccacgtcgccacagccattagtagtagcatcatcaaagcctgcattcttgttcttcgagtctctctcgtgagtgactttcattaccgagaaaaacacaatcatagagaagctctcaatcttgtttgcttctgatcagtaactatgattactgtaaatagatcactctttcattatctttccctttcacttgtacaaaccaattcgttctcgagctaacggaaatg

SEQ ID NO: 28884 - DNA, 3003 bp, Unknown; identical to SEQ ID NO: 28883
  misc_feature (1)..( 3003): 2750-1469P.txt file - cDNA_ID_2999218; gDNA_ID_2926230; Annot_ID_203646

SEQ ID NO: 28885 - DNA, 3000 bp, Unknown
  misc_feature (1)..( 3000): 2750-1469P.txt file - cDNA_ID_2999222; gDNA_ID_2926230; Annot_ID_142640
gattagatttagttaacgaacgtttttcacaaaatgtgactgactacatataaaaacgtttgagatttggtgatccaataatttttcagttgcaggtcaatgtttaaagttaataagtttaccacacactaatacaacacaatctaaacaaatagtgaaataaataaagagttcaacggctatagaagaagaagcctaagaaagtaaaaacgatagcaaaaacgatggctgtcatgcctaaacctaaaccagatttaggcttggtcaatggggtggaaggtctccacacagtgtctccaggaacatcctcgaggaagattcctttaaatgccaacagctctcgaatccgatcgcttctcctgaaatctttgctcttccgggccatattcctttcttcaatcctctgcaagacctcttcttctcccattcctgctcttgttaatgccttttgtttcatgtctttcaaaagctcaccgtagcttagagtcgtgagcaaaccaagcacatcaagaacttccctcactgccttctcaacctcgaccagtgacactaccagcgacatccgctgcttcttctgcattttcttgagcttggagattgaaacgttgatgaatttcaatgcgtcttgaaaagcaccagtgagtatatgggcagtgttcaagtcgttttgacatttttgtttcaaactcacttttcaccttctttatcatctctttggcttctgcagactgttgagtctttccaacatctccactcatttcttctcgatatggcgatagagctttaaagttaagaaacattcataccgttttcccttaagagatgctaaaaaatattgtgaaggcacccacctgataaacacagtataaagcatccgatgaactctcaagctgcgaaaccgaatagttgagaggagaacggtactgtgcactcatcaagaaatgtctcaaagccagtggatgatagttagccgcgatctacacagattcaacaattttgcattagccgtgagaaaacacacactcaatttatgatattgaaacaaataagaaacttacttgtctaatcgtaaaaaagttgttcaatgattttcccatcttcacattgttgttggtgacatgcccgttatgcaaccagtagttcacaccactatcttcacaagcagcacatgtctgggcgatctcattttcatggtgcgggaatttgagatctgcgccaccaccatgaatgtcaaacctcggagacaggttaatgagcactcatggcactgcactcgatgtgccatcctggtcttccatgaccccaagggctctcccaacttggttcaccagattttgcagcctgcataaaaatttcagcataaactccagctgctctagtttaataactgaaataagaattgaacaaaaagattaaacttgtcaaaccttccgtaatgcaaagtcagcaggattacgcttccttgagtcaacagcaacacgcttaccagcttgagtatgatccagccgttgaccagataactgaccataactcggtgatttgtccactgagaagaacacatcaccacccacagcatacccacatccattctcaatgatctgtaccaaggaagcatcatcattataccaccatattttaacaaagaacattgcaggaaaccaaacaagaagaaaaaagacaacaaaccttttctatcatcttaatgatctgttccatatgatcactgacacgaggctggtgggtgggaaggaggcactgaagagcagccatatctaaaagatactcctcgcaaaagcgattactcaaatctaacggcttctctccacagtttttagccttttcaattacttgcaggtacagtattcagagtttgataaacaggaggattatttggtgttcattgctctagtttcaaaacgcagaaaaggataccagaccttgtcatcaacatctgtaaaatttctgacataagtaacttgataacccaagtgccttaagtatctgcataatcaaccagtacactagagagataaataccagcttcaaatgtctctaagcttagtacattgttaatcgaagctaacaatagacaaaattagttttaaattgttgggatttttccccaaattcgtgacctaaagaaattcaaattaaacaacaatcctacggcgaaaactatggaactgacctgtaaaggaggtcgaaggacacggcggcacgagcgtggccaatgtggctataatcgtaagcggtgataccgcatacatagattccgattttgccgggattcatcggcttataaacttccttcagttgagtcattgtgttgtacaatgtcaaatccggtttctccacctccatctccgacatctctccgtcgcttggaagaatttctcaaaaactctgatgatttttcacttctcccgggtaaagctttcacgagctcaatttttaccggcggcagcgtcgaattttgtttaggaaaattgaaattgcttaaatagccctagatttttctaagatttccatttttctatataggaaaattatatatgattttctgacccccaaaaaaatatatttgactctaaaacaaaggaaataaaggaaattgctaaataaccttgattttagaaagatttccatttttctatttaggaaataatctatgattttttgtctaccaaaaaatacaaatttatatggctgcgaatattattgactttagttgatctctgagatgtacaaagaaaatctcgtattagcaaatacacactagtaattaagtaaacaaaattggacacctcatatatcatcagatcactaaactcccacgtaaacacattaatagtcacagactcacagcaatattcttcatttgtggcccccgttacatttcaatccccaccacacaaccacatgtatgttttgccaaatttataaaaatgtagcacaatttggaatctctttacttggaatttgagtgaaaaccataagatg

SEQ ID NO: 28886 - DNA, 3000 bp, Unknown; identical to SEQ ID NO: 28885
  misc_feature (1)..( 3000): 2750-1469P.txt file - cDNA_ID_2999222; gDNA_ID_2926230; Annot_ID_203649

SEQ ID NO: 28887 - DNA, 3000 bp, Unknown
  misc_feature (1)..( 3000): 2750-1469P.txt file - cDNA_ID_2999232; gDNA_ID_2926230; Annot_ID_142645
aagtctgaggtggcttaagtaggtgattattccctgtaaagtgttgacgatatagactaattagatatcagatatggaccgttcgatgtaaatctaacggttgctattacgtgaagccggtacgagatggagaacgtggcgacgcggtttagctgtgtgcatggcttgggcgggcacacgctggtactggatttaaattgtggtgaacacgtgttatctctgttatttataatctagaccataagatacgccacgtcagattccacggtggacaatgtcttttagaatagattgggcccgtcgttttttatttttgaggaaagtttcggccttttcggtatggcccagaccactaaactattgttatacttatgtgcgttgatctttcgcatataaggattggatcattggactgaggtttggaatgttaggtgcgttttacgtttctcctgccataaactacacaaagacaaaagcacatgcaaaaacaacataaatatgcatcaacctaaggttgcgacacaaatcgagcaactatgcaaaacgcttaaagccatgaagccttagagattgacaagtagatcagtcaaagtttacgtggcttagtaaaattatatacttttgtttgctaagaaaatacttttatatacttatctgaataaatccacctctcgctttatttctattttctagtgtctacatatataaaaagatcatgacgaccaccgttattatcattatcttcgttgccatcttcgctacgactcttcacgacgccagaggagcaaccatggaaccgtgtctcgaatcaatgaagactgcttcgcttcctgatcttccgtatgcttatgatgcgctagagccagcaatcagtgaggagatcatgcggctacaccatcagaaacaccaccagacttatgtcactcagtacaacaaagccctcaacagccttcgttctgccatggctgacggtgatcactcctccgtcgtcaaactccaaagcctcatcaagttcaacggcggaggtcaaaccctagctttaaacgactaagttctcattaaattcttccgataggtgcttgttgatcgtaaggattttgatttttttttttctgttgctttgcttgtagggcacgttaaccatgcaatcttctggaaaaacctagccccggttcatgtacaaaaatgtttttttgtcgtcactccatgtgtctatttctgatgagtttaattgtctcttctaaggggtcaaattgatatataggaaggaggtggcaaaccaccgcatgatcctttggcttcggcgatcgatgctcatttcggatcactagaaggattgatccaaaaaatgaacgcggaaggcgctgctgtacagggatctggatgggtggtaagttttttttcagaatctcattaacaatgttgggaacacaattattggttttcagatgaaagtttataaaaatttctgacagaatatcaaaattcatttcaatttgaattggatatgtgatgtatataggactctgttcgaaatgaaattgaaaaacattaatttcaaaaaaggtgttaaaaaggaaaatctaaacgggacaataagtttggttagtgtatagtgtagtattagaaatatctataatttcatttttgttaataaacaggaacttttgtatttccttgtgtagataaaaccaatgtttatattttctttgttttatagtggtttggattagacagagagcttaagagacttgtcgttgaaaccacagccaaccaggtagattaatgtagtgattaagctaatttgtaacatggtctatctcacaaggatttgggaaaaagaaaagaaaaagatttgatagattggtcgaacatacaggatccattggtgactaagggatcacacctagttcctctaattgggattgacgtgtgggagcatgcctactatccacaggtactctaatctcaattataatactccttgatttgatatcaggtagagtaatatcggttttattagtaaaagaactgtttgattgaatattaacattgatcaatgggtgcgggtaatgcagtacaagaatgcaagagcggagtacttgaagaacatatggactgtaatcaactggaaatatgcagcggacgtcttcgagaagcacactcgtgatcttgatattaactgagttttatatgtctgtagtagcttttgttttttgggtttcttgtcttgttgataaatacggcagtaccgaagatgcaatattaagtttaagatgctatgtatgtaccttggaaaataacgtttgttaagcttttttttcttgttttagaagtaaaaataaaaataaatctatatttcttttgctctggtttgactaaatgaaatatttgtaaatatataagatgtaacaaatctataaatatataataattaaagtttaatatttaagattatataaatgaaatttccggagcagtttttttagttttcttccataaatcagtactcttaaaattgagtagattatttttttcttcttcttagcatctcacttttattagactgtaaaagggtggtccaaatagttcgccaaccaacttggtgttactgtaaaagtttgatatattgggtacatcgtagaagcatgtcttgagagcatatccgcagcaccatcatttttctcctgattcacatgtcccataaaaaattacggtagtttcgacatccagtgacgtatatgatatatgcatagacacgattagttttcaacatgtaaacaaatttttaaaaagttttagtgaattaatttctcaaagtttcaatgtactgggcttgctcaggcccaaatataacccattcctaataaaacctagaagagtctgcatatataatagaatatttcgcaaatattagggttcctgcactcttcttcttccctgtcgccgcatcaaagagaactgaagcaataggcttttgaagctctctgcataaacatg

SEQ ID NO: 28888 - DNA, 3000 bp, Unknown; identical to SEQ ID NO: 28887
  misc_feature (1)..( 3000): 2750-1469P.txt file - cDNA_ID_2999232; gDNA_ID_2926230; Annot_ID_203655

SEQ ID NO: 28889 - DNA, 3000 bp, Unknown
  misc_feature (1)..( 3000): 2750-1469P.txt file - cDNA_ID_2999238; gDNA_ID_2926231; Annot_ID_142649
ctgtttacatggagaacttctgaggaacagtatcgaaatcgtctccaaagtcgtacctttgtctttcccttcctacctgaaaaaaagtagtcaaacggcttagtcagagaaacatgggtttccaggacagaagactaatggaatatggtattaaattacctttcccaagtataaagggtcacatgataagctctcatccatggctaagagattcttcgacagaccaatagtcctgaaatttttatcaaaacacataacttgtttgatgctactactttcctttggcaaaacagtcatctccatatcaacttgattccaagtgctaattatgcactccttattacgagtttcaacattcaagcaatgtttcccaaaaaaaaaccatatcaaaacacttagttctgtagacatacctttgtataacagaatccatgatctcaatcatctcactagatttgtactgctcagggtcctccaagaatctgaccatcccgtctttctggttgataagggcatgtatctgaccatcctggatctgcaggtttgtaaagaaaaaaatgatattgtccaacataccagttaaactaataaagctagcttccaaaaatcaagtgtgggacacaataccatctgaagcacatgcatttccgcctccttagcattaccaagttggaccatgttggctatatcttgaagcgacagggtcaagtacttctgtgtcaatctcagaatgttacgcttgtaaagggatgacactgcttgcttaactaatccaaggttcttatcctgaaagagcatttcgcccaagttatggaaggggatgaatatttaatattggtacagaaactatggtaaatgtttagaggcaatttacctcttcaaattctgcattcctggccacaaccaatgcctctagttcaccaatcttcccgtcgttgtaacaattacccagttcaatgtaaggctgagaaaagggtgaacgataaaatcataagcctgaaaatagatttagctggtatggagtacaaaacaactgaaatctttggactgaagtgaaaaagggaccagactccattcaaacatgaaaaatacaactaatgatcgggttcaaacttactccggtatagttcttgaagctcctctgtgctgctgtagaagcacacttggggagagtgttagtaaactgcacaagtaaaatcaaacaagattataagaaaaacatcataagattaaccaatgcttgaaattaaaatcagacacaggatgtaattgtgaaaccaacatttctcaaaaacatacagttgattcagactcgtgcaatatgctcccatgaccgaaaactagataaacaaagaaagtaaaatataaagaacacagccttacctgcccattgtgaatgagagacaccaatatgtactttttgtacgcctcaagagctatggcattgacttgatgcataggagcagtcacaacctgatacaagtacttaggttgagttaaaactaaaacgaaagtccttaatgtataaaaagcacgtaagaaaaaataaaaatgccttacattgtaaagaagctctaatgctttctgaaatctcttcagtccaatacaaatcattcccctatcaaaagtccaggtaatcaaggaccagaataagaaaatactataaaacaaacccaacagggatggatttaatgtgtttacacatctattgatcaaaggaaaaaaacagatagcaatgaggaaaaattgcttacccataatagctatagagaaaaaagtctcttggctggtcaatctccacgatatcatcactaagaatggagaaaccagatttgtacgatttcgcctgcaaacagagttgaagaacatctggatgcaatgcagtcaaacgcttggaggagacctgaagcttctgaacagcgtttaacagtggccctactcctcgcaacggatctcccagtgctataacatggtctttcaatatcttacaaagagatacaactgcaaaatcaatataataacatcatccatctccccaaagaaaaaagaaaagaaaacacattaagacaagataagctctcattaagtgtcagtaaattacatttatagctcgccaaacgaatctgcccagcatcacaagaattgatgaaccgtgcaattatcggtatctcataagcagctttctccttcgacactggaccacaggtaagaacctcactgtaacaatcaaaccatacaaaaaactcaaagatcagaaatcgaataacatagacaattctccttgttaaacttcgacctaatcacacacatcaagttccaataaccaaaatcatcaatcagcctcaaagtatacacaaactagtaacaaaaacctaatctaccaataggttaaaactcacaggaaatacaggtaaccgagagagtgcttcgaggcgtcgagctggtcaagagtagagaaattaacacctggttcggctcggagcgagtcttgagctcctctcaaaagatcgtgaagtgcagataaatcctctggactccccgataaaccttggattgacgttatcacagcctccaccgagttcacagctccgatcatcttcgatactaagacgaaaacacaaaaaccctaatcgatcgccctttttctccctctcaaaatcttttgctaaactgtttgtttaattatctctggatcttctccataaaaatacatgctctcataatatatatacgaaccctccgaacggttaagagtctaatacattactctagaataataaaccaatatctaaccggcttttaaaccaaatattcccggttcgaaatgtaccagatggtaattgtcggtttagccagaccaatttcggggatggccttttatcattcgtctttccagagaaagaacgagattgcgatcacagagtgtcaaagcaatctgctttttctcctctcagattcaaaggttctctttgaagcttcgtaggtggttatactttgatg

SEQ ID NO: 28890 - DNA, 3000 bp, Unknown; identical to SEQ ID NO: 28889
  misc_feature (1)..( 3000): 2750-1469P.txt file - cDNA_ID_2999238; gDNA_ID_2926231; Annot_ID_203673

SEQ ID NO: 28891 - DNA, 3003 bp, Unknown
  misc_feature (1)..( 3003): 2750-1469P.txt file - cDNA_ID_2999240; gDNA_ID_2926231; Annot_ID_142650
tagcggccatgaatggccacgttgaagcatttagagtcttagtctacgcaggcgcagacgtgaagctgtataacaactctggcgacacggtagtctctctgtctgaacagaacggtaaccgtgacgtgatagagaaggtgatgctcgagtttgctctcgagaaggacagcagaaacatggcaggcgggttttatgctttacactgtgctgcacggcgtggagacgtcaaagcagtgaagcttttgagtggaaaaggatacagtctagacatcccggatggagatggctacactccgctcatgcttgcagccagagagggccatggacatatgtgtgaatacctaatctcctgtggcgcaaactgcaatgctaagaacggaagaggggaaaagctgctggatctcgcgactggtgatgcggagaaggtgatccgtaatgagttgtctcggaggtttgtgatagaaggaagcagtgtgatgaaacacaccaagggagggaaaggaaagaagcatgggaaaggattgagaatgttggaatcaagtggagtactaagttggggaaagtcacggaagaggactgtggtgtgcaaggaagtagagatcgggatgagccagcggttcaggaagaaccgtaaggggaaaggcgatggagcggaggaggaagggattttccgggtagtgactacggaaaacaaggaggttcattttgtgtgtgaaggtgggttggtgtgtgcagagatgtgggtgaggggaatacgacttgtgaccagagagacaatttgtggaagaactcagactcagaattagtgttgtttatgtatgtatataaagaagttttgagaaagggagcttcattttgaaggtagtgtgcttctattgtgttggggatgtttatagttcttgggtttggtatctgcagtatatttgtgaactgtgaagtagttcgagttgcacatgaatgaaaactaaaacatctcagttgatttgagattctccaaatttgattattactttgtccaaaacaaagactattctaaacttacatggattcacaggcttagatccagcactaaaattcggcatgtgatacctggatatcaaaaaacaacatgaagttcctgtctctttcaaaagaacaaaagttacaaaatgtttaaaaaacattacatcacacaagaagtcagcacttttgtttaccagtcaccaactcaacaagcaataaccaacagagataaacagagaagctttgaagttctaatcactattgtaaccaccatcatcgttatccttatcttcgtggtccttcaccactcgttctatgaactgtcttcgaactccagccatcacagcttccctcgaggagtcatcgtctcctcctttgccatcgttaagaactggctctgattgacacagaagtaaggctacacctgaaaaaccaaatcagttgcaagtatgttagacatgtgcctaagaccaatctgctcaaagcatgatacaatcgccaatgtggtcacatcaggtctcagatcagacaaaggctagagatgagacatgacataatcatcaaacacaaataagcacagattacatcagacaaacaagggttcattcaaacttactctctggggtgcacctacggccaaagctctttaagcctacatgagttcctttgatggcgccatggtggtacaccagcaaggtaggaagattgcaatcagggtagttcggaatacaatcagtagatattatcttaacgaactttgttgctgggtatctactacccaattcgtctagacaacccaatagcaaactacattctgcaacactatcagagaacaacaagaaataaacatgagttaatagtgtttcaagcatgtagtaaagaatggctcaacaagagttcacgaatacttgaaaaaacatacccatctttatagagacatacaacaacccaatcttcagcagaagcttgcgtaacctccctcacgaaatcagagcccgagatgggagtcactgttccatatcttttaactttagcagcctctcttagctcagacaacctcttcttcctatgaaagcatcaaaacacattagtgcctgtgaatcatgaagtgtgttgcacaattatgtttagcctattcatcaacatctcaaataagatactaccctcaattgcattcatatccaaaacacaaacgaatcgagaaaaaccagagcttgataattgcattccctagctacatggcaacagatccgagaaaattgaattcacaatccaccaaggcaaggattctccagggaaagttaagattgtaaatacaaaaatcagaatgttcgattcgatctacgaacctgtattcttcgagaaagcgatcatcgtcgagatctttgtcgtcctcaagatcctcaagctcctcctctgtcttcttatcaaaccatgcctgatccttaggagctgaagactcgtcttccgccggagtatacgccggaggtttgaaagccggagccttctccggtagattccccaatttccgctggatatcatcccattgagttgacgctccttcaatgtccttatacacgaaatgataatccgccatcaaagtataaccacctacgaagcttcaaagagaacctttgaatctgagaggagaaaaagcagattgctttgacactctgtgatcgcaatctcgttctttctctggaaagacgaatgataaaaggccatccccgaaattggtctggctaaaccgacaattaccatctggtacatttcgaaccgggaatatttggtttaaaagccggttagatattggtttattattctagagtaatgtattagactcttaaccgttcggagggttcgtatatatattatgagagcatgtatttttatggagaagatccagagataattaaacaaacagtttagcaaaagattttgagagggagaaaaagggcgatcgattagggtttttgtgttttcgtcttagtatcgaagatg

SEQ ID NO: 28892 - DNA, 3003 bp, Unknown
  misc_feature (1)..( 3003): 2750-1469P.txt file - cDNA_ID_2999248; gDNA_ID_2926231; Annot_ID_142652
tcaaaagagaatacaatgagcttgacactgtctggttcatggctggatctttgtttcaggtgtttggctacctacgatttcggcttcttcttgtcattttaatatatggaatgctaaacatcggcctcggacttacaccattttatttgtgttttgcagcaatacccatttgacataccaactgaagctttttcatttgagattttcaaacaggcatttgttgccattcagtcatgtgtggtgcatttacaagtaattttcattcttttggggtttacttttcacaacttgaatgtctttctgtatttgaaagaatagttagagtaaaatataataatatggtcttacctctattactctatcgctgaatctaaagtttagcttgcagctcatcatttaagcaagtagtcaggtggtgcttgttgcttcttctaatttagattgttatgcttcttcttgtactcagaatgtcggtttggctcgtcggtttgctttggttcctcttggtcctcccttgttggcctattgttccaactgcaaggcaatgcttactgctgttgatggtgctgttgaactcgtggtagataggccatataaggccggggatcctatagttgtctggtgcgtctgtaagccaaattgcttcctacagctagctttttcattctgatctatttttcatacttttgcatttcctcctttatttgaaggtgtgggccacaaccaaatgcgaaattgcttctgaactatggatttgttgatgaggataacccttatgatagagtaatagttgaggtaattacaaaactttgttgcgttactgtaaacactagtgtagtgttcatgtaattcctcactgtttgcatgttttatgcgtcatacacattcaaggcagcgttgaacactgaggatcctcaataccaggacaagagaatggttgctcaaaggaacggaaaattatcccaacaagtatttcaggtatgactttcccatggcaacaagtctactttgagatgttctgtctgattttggttttgcatccatctcaggttcgtgtgggaaaagaaagagaagctgttcaagacatgcttccctacctgcggttgggttacatgtctgatccttctgaaatgcagtcagtaatttcatcccaaggtccagtttgtccggtaggtagaggatgagtgacctggcaaaacttttttctaagtaatctttgatatttccttgattgcatcaaatgttcagtccctacatgtgaggcctccaatgttactgctacatagaaagttgttgacacacttgtaaaggtttaactctcaagctcttttgtagatgagcccttgtatggaaagagcagtactagatcagcttgctaattacttcatgagacggttatctggctaccctactactccgaaagaagatgatgcattggtatgtctttagactttgtgatcgctacagatcaaacacatttttttgtttggttttcctgcatgacatgacattgatagaattcccaatcaacagttggcagatcctagtttgagtcctaggaagcgagttgcaacccggcttgtccaactggagaagaaaatactagttgcatgccttacgacaacagttgatcttttaaatcagttgcccgatacagccatctctccatgcccagcaccatatgctccttccttgaaataaaaaggcacgtatctctgccccctgcctctctcacttaataactaatattttctgaccttctaaaactatgttggttcaggttcgtgttgtagctgcaatttgtgggacatggcaggagtaatttttggtcgtgtccttgatcattacaatctgaggtcgcttaactacggtcagtttttgtgtgtacaagtctagatctgatcctttgcggctcgaaaacatgactaggaagtttccaaaataattttgattttgtaagatttcttgctagctacaaagccgaaatctatctccttatagatggtttattgttgtttatgaattcagaagttgatgatttcaaagttttaatgcattgcaaattgcaattgcaggtagataagggtactaggagcgttatctgccgcttgacacgcaaatgtttcagcatatgattgtcctttttttcttacaacaatgaagccttaagtcgcattgttcaaagtgtacatacatgaatgaaccttcttgttcttccccaactccctctgtaatgttttatctctgttttagaaatttagaatttatcatttccaaaaaaaatgaataacgaaattgagcattttgtccattggatacaaaaacgtcaggacgagccgatagagtgaacaaaaacggcaagcggttcgttgaatgcgttgactcataaaaatcttcgcatctaaaatatctattggtgtctcactacactagtcactagatctgttcgattaaaatccgacggtgtttattgattgttcctgagtgttcccgtaccgaaactcgttaaccgattcaccgttaagtgtggaatcagacagtgaagagatcaacagatatttatctctctacttctctcggtcgtattcgtcattctgccttttatctatttccatatcaacattttagggtttttactcctctaaggtttcgcttcttcttagattctctgtcttccgcttcagttggatcatcgattttctcaattgctctgaagttcagccggtgagtttcttccttttcacgattttggtgtttacttccatcgggcaattcgaagtcttcattgcaggacgagttcagatttgaatcgcttaaattagggttttgaatcatctatctactatcggatcgagattatctgatttagagtcataagagtcttcggagattagctttctgaagcaaatccgtcatacgagatgtttcgtttcctgcaggattagactgatccggagctcttcacgagattaagggaatctatttcacaatttcgtcgatatg

SEQ ID NO: 28893 - DNA, 3003 bp, Unknown
  misc_feature (1)..( 3003): 2750-1469P.txt file - cDNA_ID_2999252; gDNA_ID_2926231; Annot_ID_142653
agatcacaactcaaatgaaggagggattggggatgatgagattgagattgacattaatgatctcagtgaccatgccttgtttcagttgcgggatctcttagacgagcatttgcgtgagatccaaaacaaaaaatcaagtgttgaaccctgtgagatagaggtatatcttcgtctatatctcatgtttgaatcatctaattgcatcatcactgctaatagggaaacttttatctattgcagcttctgcatggatcagtgccagggaattcatcaatgcaacattgtgatggttagttcacagcctgcttgtggttcgataaagttttttgcttggctctttaatcagagtaacattttttactgtattcgttgtagggagtgaattggatgatgaagttgttgacattggtgaaaatgaacacccaacatccagcatttctcctgtcacgatagagaaggatctggtgttaggaaactctaatggtatcttttcttttgcttgtttatattgacattcttgttctccatagaacttttgttggggtatggttgttacatttgtcatttccaaactctcgtgacctcagattttctcagaagtggccttggagccatattgttgttgatatgcagtgaacgttgctagcgcacttattttataatttttaaattaggaggccttttacattcacttgtttactaactaaaactaaattgcctttcgtgttccctttattgattttatggtgattagactatcccctgggttgtactactgattgctcctcttttgatgcatataatctaggtaatagcttgggaagtgtgtccggtgatcctaaaatgtcaagtttaccgagggcatcaaaggtatatagtggtctggaataacatgcaaacatgaataactgagatttggtgcgacacaatgcatatgtcgatgtggatatctttgttaccttgtcataaagttgatataatttgatatggaggaactcttggaccacaattttttactgttgcggaaccataacaatatgaaatggatgtcatagtttgtttgaatcctgatatatataaaattcaacttacttgatggttcccagatttgttaggataacctaattgtttcttcgtgctcctgtcctgcgctgatacaggggcttggaaccatcgatcttgaacctatgttggatggagctacaagcgcttccccaacaagaggatgtgagtggattttttgttagtggtcaaaagtttagtttttgggtgtggaacttatgttttgttgctttatacaagtagcatctgttggtggattggatcagctggaaagtgcatctccggagaaaataagttctgttgaggcggattgtcagcaagatggtaagaaaaggagtatggcagaaaaatgtttctgctcttctgtctgaggtggcatctcactcttgaccttgaccctttaatacactaggaaatagtgctcagaatgagaagcaattacctcctgaaaagagctacagggctgctattttgaagaaccgatttgcagacataattttgaaagcccgagagaaacctcttaaccaggtttgttgtgcgttccaagttccaacccactattctgggtcctttttgacctttgaattgatttttcgtaaattctatgtgttcctgagatcagaatgacactcgagatccagagaagctgcagcgtgagagagaagaactcgagcttcaaaagaagaaaggtttgcttccttgatttgctaaatcaactgtagttggtgacatttaccagttgtaagtgataaaagcacactgcaacctgagtttataatatgtgccctttcttaacagagaaagcgcgattacaagcagaagctaaggcagctgaagaagctcgtagaaaagctgaggcacaagctgcagctgaagctgcggctgaggctaagagaaagctggagcttgaaagagaagcagcacgccaggcattgatggaggtaaagatgttcattacaacgaaatagtcattactatattataatgggtgaactctatcattaagaaaattggaatatctagtcccattttttcactgaaacataagttttcatggtatttggtgcagatggagcagtcggttgaactcaatgagaacgcaaagtttctcgaggatctagaactgctgaaaacagtcgacacagaccatttgacaaatacaatagaggaggaggatgggcctgatgttgggttgcgtagtttcagttttgggggtagtaatcctcttgaacagcttggactgtttatgaaacaagatgaggatgaggaggaagctgacccgctaacttcgccagcccctgaaatagatatagaagagggagagattgattgaggttgtatgctgatccccaaaaccaaacaatagatatatctgaattctgaatccagaatccatcccaaaaaaaaacatatactgtgagcttcaagtagagagggccgttcagactgaggattggattttattggtactgagagtgggaacgtagtcattcatgagttaagttttgcttggaatggtcgtgagaagtgggtcatcgtctttttccctttgcgttgtgttgtgtgatgttggtacgggttatcttcgtgcttcttgtcgaattgagtatattgtatcagtaaagaatttataacttaaaaagagccttatgtcaaatacgacgtcgttttgtatggaaatggattttttacaccgctgaaaaaataaaaagaaaactcggaatctcttcttcttcactcaagaagtcgctctgaaacttggaaaccacatttttgttctctcaagagtctgttttttttttctggcgtaagtttgaatttcatgaaaagttgttatcgctagtcgatttagtgtaattgatatcctgattaaggcttttctctgcatgccagccaatcaggctagaattgtgaagtataaaagtaagcaaattgacaatg

SEQ ID NO: 28894 - DNA, 3003 bp, Unknown; identical to SEQ ID NO: 16497
  misc_feature (1)..( 3003): 2750-1469P.txt file - cDNA_ID_2999260; gDNA_ID_2926231; Annot_ID_142656

SEQ ID NO: 28895 - DNA, 3000 bp, Unknown
  misc_feature (1)..( 3000): 2750-1469P.txt file - cDNA_ID_2999264; gDNA_ID_2926231; Annot_ID_142657
atcaaatattagaaatctatctaattatagatcaattctgaaagacattaggctatatgtcctagtctattataatgtttaattaccaacctaaatttagaaatctgttaggaaaacaaattatataaccaaattgcattagtttttccttaattgaatatttaacccttcatgccacactcttaattaacacccaaagaaaaaaaaacccgccatgactcatatataatgtaatgtgataaacagataatgtaaacattacaatttccattaaagtactatagaaacctaggtaaccgatcgattattacttattagacgttaaaagaaattagatatttgatttatagtcgacgtgtatgtatatatatatacatacatctttcttttccgtatagcttacattataggtagtcaacaaacttactatacttcaatatatttaacttttgtgtggtacatcaagaaaataaaattgcagctaaccaaatattcgtttttgttttggtgcactgaactgaactaaaatttagaaaaatgtaatatagaagagtattgttgtatatgagagggacctcgacaaaatcacaaaaacaataaataatacgtgagagaccgttgggaaaaagagtatatacggagcctacgatgtgtaagaaaaattattaatgcaagggaccagaatcatatttaggcccactaaaaagcactgtctctttaggtccaacttaatcttcatatagtcactaattgggcctaaaaattgtaactgtagttatggatagcgttacgtagaatattcgtttagcatatcagtttctcctttccattcgttaactaattttttctttgcaaacatactgtatctaccgttttatcaaataattttctttttattatttgtttgtttactagaattacagttttttcaaacagataaataatcatattaataataacatttgctaaatttagttaaaagaatcatggtgttactttttaagttttactggtttgctttcaagtttcaagaatgattgtatagtactttcggatgtttgatctttaaaacttgttggtacagttggaatgctttattggaaatatcaaactatcaccaacgctaacatttctattctttttgaacttcatcaagagccaaagcccctgatcggcctcacaaaagacaccattttctttggtctccggcaacagaacatggattggaatcaatccctaatcaaaccgggtcaatttggcttagtcaagaaacgtccctcttatgtaacagctgttccagaacggcagaacattcacgaacatataaatgggtgtccactaacaaattcaaacacataaccatgatcactctgtccttttttccatttttttaaatattcaagtaaacaacatgtaaattataacgaatttaggtcgtctcaacatcatgactcattcacatgcgttgacttttaacccactaaacattttttataggacccctctctctctctataaattcgaccccctttgttgatagatcatacagagaacaacaaagaaagaaaccaaataagaagaaaaaggagaagaacattcaaatggcaccaagaagttctttgatccgcttcgccttcatctgcattgtcttggccgtgatggtcatgactgctgagtcgcacaacggaacccaccaccatggtccggctatggctccaatgccacccatggctaaggctccgtctccaagtgccgccactttctccgcctaccctcagctcatcgccaccgcattggtcgctgctatgtctttcgtcttctgatgagatgtgttgccattcatcttcagaatatgttttactctctatgagattttattttaattttcacatgtattccttctttttttgttaattcttcaaagattgtgatgttgtgttcctatcataataaaacatttatctcttgatgttttttttattatcttaatcatattttcctctttttcgaaccaaatcttctaatcaaggcattataatggcccgtttgagaaaaggtggactttctttttaaaatcaactaattcatcttaaggttatagaatagataaatatccgaagtaaatatataaaataaattgggtcagcctaaacaaaataatgaaatgcaggccttacgtgacagtaatgggtacgcctcaacaaataatggtgtattcactattcagacgttggtgtcaaaatcaatgagtgatatccttattagaagaacgacaagctttaaactagtttcatgtgtaaagtacgaaacaataaacatcatgaaaacactcgaaatattgtagtaaacttgccaacaaaaccatgagtacaagtgtacaactccaatgaatcagatatatatgcaagatggaaaaaatccccaaacaccttaaaatacaacaacatgtgacaataacgaagtgaacgaccatctcgataaatagttaacaagactcattctcatccgttgacttttcatctatacacttaccattttttttatacaatctttttctatcatgactctatcctcaatagctacgtgcccacatggagccaaggctcatgcctttcgtcttctgatcaaatgtgtgtcattgatcacaccattcatcttagttgttaagaaaatatctgtaaatcattttttttttcattttatagttgtatcactttattatagtccactcggtttttgcatttttgttatagtccactagttgggccgtgttatacaatagcgagcctatctcaacaaaaaacaaagcccaacaagtatttattttgccagttttgtaagcaattaattgaatagagtaagtagagacggagcaaaaacaagagaagcgtttggattcgacgtttgccttatccgttcagctcatcttcttcttcttcttcgtcacctctgaattagtttcccagaatccgaaattcctaggaagagaacataacaatg

SEQ ID NO: 28896 - DNA, 3000 bp, Unknown
  misc_feature (1)..( 3000): 2750-1469P.txt file - cDNA_ID_2999271; gDNA_ID_2926231; Annot_ID_142660
atattatttcacaaagaaattgacaaaacaactaatttgacaattttgtttagttttgtttatacgattatagtcggacaagtagtggaaatgctgttaagatcaagaagctttttatctttgaagccaggatcttctaacaacaacactttgtctttatccccaacaccaaccatgtgtagatattcatgatcctctctttctttccctttgaatactagcctttgttgttttggctctaaaccggtaagcaatgataataccatcttaagttctcctgtaaacccataaatagaatcttatgttatgaatctgataaagagtcatttaaaagtctcccaaaagatgaaacataaaggttgagaaatgctgagggacaagaaacttaccaaaagtggaggtggcttcaatggaaagatcatgaaaatgagcaaaagtagagactctaatggagatcaagtcttcaccaatactctcttgtcttttttgaacaagcatgcctcctggcctaagttcccatttgatctcacagttgctgcagctactattgttgttgttgttaccaactcccttttgttgttgatcttgttgtgtgcctttgttgttgattcttttaccaaatccaaatctaatcccaaacctcttggtcttaaacttcatcatttctttctacttttgatttctatggagttttttcttttctgttttctctcaagctttgggatacatagaacatggaaacatttaggtggtttatataagagaccagaggttaagataagaacaaaaaccacatacatacttgcatgtgcaagttgttttttatataatgaacaagtcttcctcttttatataccttttttgtttatgttatgtaattatgtatgtggagtcaattattatagtacaagatattagccatgaataagtgccgacaaaggataaatcagatttaaataggattgatcgagactgttaagagaagagtttcagcacatgggcgatggttcgactgctgataaacaatgtttccttgattggaggatcccgaacacgacaaaacgtaaatagaaaacaatcaacattatggtattaatgttaattaatcaaaattatatattatgggtaggctttgttttgtctaggaatttcggcgtaccaaccttgttgtattaaagtttatctcagtttgacaaattattttcatacttatttttttcttctatcaacactattatgatactaaatgcattacaaattttcgaaggcttttgtatggtgctagattaacgaatacatgaaaatattcacaatgcaaaaatgttgagaaaaaaaaacagagtagaaataacatacgatataattatataaccatgtatgatgtacctaatcaagtaaaaaggacactagtttaatttgtttctttaatgtcaatgaaaagtgattacgtttctttcggatgggtaaatttgaatcttgtgaaaagatcgccatgtggtaggagaggaccgtaggagtaggaccattttgaaaaattaataatgcatggaaaccttgtgaaatagcttattaatcaggtcaaggttataagaacatacatatcagtgtgtgagtttgtatatgatgaatctaaaaataaaatcttcattcttcgacaagatattcttatagagatcaaacagctcagcttataatttggggaatatcagtctgtctgtctactacaaatccaaatcttaatcattttgcaactttttattaatcttaacaaaagacaaagatattttaccgtacgtctagtgattaccttcagtgtgttacatgtgattaatctccgactaagtcatggatcttcaacataaccaaaccatacatacacatgcatatgtatgtgattattcattcattattgatagacaagatgaaatgacatagcaacatgttgtcatagctagaagacggctttagagatatggagaatccacatttatatttctcctttaacaatcgtgatccaccaacatggttgcccatcataattatatatacattcacatatgtaaacataggaaggggaaatatatatataagtacacaataatgtttgtggacattttatacatgcattatatgtttatgtgcatgggccagacatgtttattggatttttacaaaggaacatatatcctttgtacccaacctaaagcatggtcttcaatgcatctatgtcatgtggaacttgtaatctattcacgtttgaatgataataattaataaacataaaaatactttagaatataatttttgtaacctaaaattatagttaccacttacaaaaaaactaatttatcaaagctaacacacgttcatacacaaatttttttactttattttatttttctcaaattatagcatttatgtatagatcaagtccatattttgcagtaaaataaaaacatagagataaaaattaaaaagtaaaacgtaaaaaaaactataaattatcaccgtaaagggccttaaaacacgagtattgggccaatgtattgggtttaattgtcaaaacgacactgttacacttacatgtttttcctcttgcagcggttgtagcttacccccgctcatgggagatgattggatggccacaagagcaccacaccatcacttaacccaaaaccatatctgtttgggctgcgtctgagttttcgaattccagattgttgaagaatatttattcggggttttgttgtgttaggtgatgaattttacagaaaagttgcgaccttttaaaaattgtttattcctgtgaattttgcgagtgtttggtttctctttgattgttcttgctggtgaatttgtgttggaaaaagatgcaagctttaagcatttggctattaaattctggtcatttagttggatcgagattggaatttgagttggattgttcttgttttgtagttagtcctctgactagaaagaggcattgtcttgttgaatatg

SEQ ID NO: 28897 - DNA, 3000 bp, Unknown
  misc_feature (1)..( 3000): 2750-1469P.txt file - cDNA_ID_2999275; gDNA_ID_2926231; Annot_ID_142662
aaaaaaatggcacgtcaatttgtcgttttggttctattgactttaactatcgccaccgctttcgccgccgacgctccctcagcttctcccaaaaaatctccatcacccactgccgcaccaaccaaggctccgactgccacaaccaaggctccttcagctccaaccaaggctccagccgccgcacctaaatcatcttcggcctcttctccaaaagcatcttctccggctgccgaaggacccgtccccgaggatgactactctgcctctagtcctagcgactctgctgaggcacctaccgtctcctccccaccggctcccacccccgacagcacttccgccgctgatggaccaagcgatggacccactgcagagtcacccaagagtggtgccgtgacaactgctaagttctctgttgtcggcacagtcgccaccgtcggcttcttcttcttttctttctaagttaagtcgtccacgttttggttggatggatcagagatttgtataatcttttgagttgaggccgtaaatttattttatatatacgtttataaatcgagattaattggagtaaatataaacctaaatgtcattttgaaatttggttagaacaaattttcatattttgtttaataaacttattttttttggaaatgcttatgatttgtgtggtctaatggtcttttagttcctattgtcatgtgttgtgaattagatatcatgaatgatataaatggatatttctacatttttattttaaaattttgttggctaatactaaattgtgtactatttataatattcatgataaaggctattacacatttttaatcaagttaataaatttaggatgctttaatgtactaacctcttttggtgccaaagtcagccaatgtgtaaatacaagcttagaaacatatttaaatatttcatagaaaatatttaaattttggaaatatttgtttgtgtgttttttgactgattattaaaaaaagttatgtaaaaatttaaattaatagataagttgtactccatccgtcttaatttagttgtcgttctagcactaaaatattgttttgtaataattgtcttttttttttttaaatgtaaatgtttggtacaaattttaattatatacttattatttaaatattttaactaataaaaaattagaaaatatattaagtagataaaattaaataaatatttttttataattgctgtgcaaaaactttagaggataattattttaaaacagagaatattataaactatttctattattatcttgtttcaaaaataaaaataaaaatttcgtagttaaattaaaacatcttagagagaatgtgaaatcaaataaatcagtatattatcgtatggcatttttacaattaaaaaataaagcaaaaaatattataataaaaaatataaaaagaacaaaaacgttaaaataatataattaatctttgagccgaaacaaaaaataattagtcaatggaggtaggacccgtaagaattgctctttttcccattcgctctgattggttccttctctctcccaaaccttttctttttttttttgtttcctcttcagcttttctttttggccaacgtcaggtttcttaaatgggctcattcgtaactccaaattttgcgtaggttttaagttttacctgtaaaatactagtcaaacctagcaattattaacacgaattcatagacaattgtcatgtccatttcttgttgttctatcaaaaatgtgaaaacccgtaatactagaatattctaatagatcacgtttaaacggcattagaatatcaacattgttttatttactacagaatccactttttgaagggtaaaaaatcgatccccttgtgcatatgaattttctaaagtaggctttttaaatctctcaaatttacacccatcaactttatgagaataaatgacgttgcaggccttgtagagaaaatgtacaagacaaagaaaatgtatagaactttatttttttggtttcacgtgaatgttatcacaaaagaaaatctatttccacgaaaagtgtcatcaaaagacagtaatagttcaggatgctactgtactatataccacttcatttgtcattgctgtcggtggtggtagccaatttacgataaacccaagttcaacagcattatttcccttacgaaattaataaatgaagtgggttcatttttttttgttcttgtcaatttatgaattggattcggattttaaaattttagagttcacaattcccttgcgtttgattacagcgtggaatacaaataatgcaaatgatatcttctcacggaggaatgtcaaaagatatttatatcactttagatataatattggatcaaaaaaatctcatgttaatctgttgatgcctaaagaaaaactgatcatgttaattacctttgcttaatgtcaacctcatgttaatttgaattaaaatatatttaaaatgtcaactttataaaaatgttggttactaatgcacatatcccaaaccttttttaaaaaatgtgaacattataaaaatgttggtatctaaaaagtagaaaaacaaggtgctttatgaaaagttgaaaataagaatggagttacccaatatataattaactaatcagaagtttaagacacagatgtaatgtagtaatctaatccaaccttattatctcctgcacatccaaacagaatccaagattacaatagctttatccaatgactgatagacacgtgtcaaaaggtaccatcactgtcagctttccctctcgctccacctacatacttctgagtgagcgagaaaatgagaacaaaacttagaaagcagagaagagttaaagtgttagagagagagagagacagagatcggagatgtgtagcaacaaagcaagtccggtcgtcggagaagaaaaacagagtacgagatcatcgaagaggatcaagaagagaaaaaacagagaagctaccaccaccatg

SEQ ID NO: 28898 - DNA, 3000 bp, Unknown
  misc_feature (1)..( 3000): 2750-1469P.txt file - cDNA_ID_2999279; gDNA_ID_2926231; Annot_ID_142664
aaagattgcacatactttgtctaattctactattgacataaacagtacacatttttttaataataaaaaataactataaaagataacaatatatttagaattgacaatcaaaatggtaaaacggcggtatgcaaaacattattatttttattattattattattattatttatgtacaatcccaaaacattgttatttaataataattttcattgggaaaaatagtgttaacaaaaactagaacacataaaaaaaaaaattgaaattatgaaaacaataattttttttttttgatactgagaataaaataatgttttatatatattcttgtcctctcaaatgatttcatggttaactagctagtaaaataacaaaggaaaatctaaatacttcgtgtaaacatttttttaagagaacctcgtaaatttatcgagtcaatcagacaaaataattgagaatgcagatcgcagaagaacaaaaaagtatataagaggaatgtaagaaacttttattttttttgtcaaaagaggaatgtaagaaactaaatgatgaaaaattgacgcacgtgtacgtaatttgggaccctcatgcaataagtttgttggtataaatttatgttctttcaaagtaaactctctatcttcgtaaatgacacttttcgttatcttttgacttttatttacattcgttgttgttttcatctataattcgcttttcattcacttgatcgcatgctattcacaaaaataacagctaattaaaatcctatataatcgtttgattatagatatgtgatgatgtactcaacagacataaattatttatatatattaagatttttttttgtcgaagtaagcaagtaagaccatctccatcggtggtttctcactgaaaaactccaaataaaaataaatcaaaaatatgaaaataataattttttaatcagtttttctcagaatcgtttttgaaatgagaaacttggagaaactttctctctcttccatatgtcaccttgttattaatttcttttctttgttataaataaaattatctatactttataacatcaattaaatactttatatgtttgttattttttttatttttactttaaaaattcataaaattaaattatctatataacaagctctatcatgtatatgtttaaattatatacgaatattatttaattggtgttagttaagcattaaacataataataacttaaaaatacaatagctttttttaattagaaaacaaacatttaaaattttctatttttattttgcaacattctcggcaatcgaattcgacttcgtgatagagatatgcaccaacaactaaaagatgacctagttgagcatatatgacaaaagtttggtgcatcatcaaatgaagagtaaaaccataatagataatatagttagctttgatttatgttatcatggttttatatgtaatttctgtttaatttatatattttttctatttaatttatgttatcatggttttatatgtaattttatgtttaatttatatattttttattatgattttatatgtaaagtaatgtttaattatgtttaattatggttttaaaaataataaaactatttaataatataatttgtaaaaataaataattgatatgtttgaaaatattgtagagatattaaatttaatataaaaacatataataatatgttaatgttaatgagatactcataccaatggaagcacaattttaatataagtttttctacttaaattaaacataaacatattaataatatattatgagatactcatgaagtatctcaccaatggagatgctctaagattcttcttctaacaggttaaacaaaaagtatgtgagtttcacttgtgttcttttaaggttcatttttcacaagcttgacttgttgccaccacgacgttaaggttttcctcgacgaagcccatgagtacaacttcttaggcccattatataacaagatttgtgttattaattaatttatcattttcagaataatatcgttttccagaggtttgattttttctaatagcttttttttttcaacaacagtttgtaaaataattttaaatagtatatatcatgagaagaagaaaaatagaaatataagaaattacagcacaagtttaaaattctttttacgaataataataattattaaattgataaaataacattaaaaatgataagctgtcacacaaggcatgaatgagtgaagacccaccactccaaaatttgctttccgcttctaatttttcatggacccgcattaagcaaaccaacatacatacataccccttccttattcttttatttttcttaacaataaaaagcttactaatattattattcattcttttgtcatcttatatttatatttttatcgttagttgttgatatttatttcttgtccaattaaatcataacatttaagtgcctttcatgttctctcactcttatatttcgccattcctagctataaaaatacacatgtttatgtttaatcataagctttgatttatcactccaccaacgctaaattattactctaaacccctttttatctgcaaaagtaacattataaaaaaaatgtaactccattgacatataaactctaactcgtctgcgaatctctatagttttaatatcttaatctcttttaatttcagattgcataaaaaaacatttttcagggaaagtaatcttcaattttctgtagttaaaatatggcaattttaaaataataataagccaaagctcgaaactttaataaacagtttttgttcattctcttgctttaccatttcaaagtgccactttttcttcctaaatcctctctctctctctccgttcccgagacaagcaaaagcttcaatctcaaatctttcagcagctacaaaaatgttcttcatctaaaagagactgtgaagcagagagagagagagagagagagagagagagagatg

SEQ ID NO: 28899 - DNA, 3000 bp, Unknown; identical to SEQ ID NO: 28898
  misc_feature (1)..( 3000): 2750-1469P.txt file - cDNA_ID_2999279; gDNA_ID_2926231; Annot_ID_203689

SEQ ID NO: 28900 - DNA, 3003 bp, Unknown
  misc_feature (1)..( 3003): 2750-1469P.txt file - cDNA_ID_2999287; gDNA_ID_2926231; Annot_ID_142668
tgcaagagcctccgtcacctaaaacgaaaacagaacataatgtgaatcttttctgtcaaacccatgagaatctacagttttcaagttttgtaatcatcaaagaacacacactagattccactaaaaaccaacgcgagactcagctaacctgctccaaagaagagtaatcatcagaaattttcgaatacttgcgctccaacctcttcttattatcactaccataactttgagaaggcggtgcagaataagacggagcagagtaaggctgagtactatataaaggaggaggaggttgcgtatactcaggaggttgggcataagaaggtggaggagggtaattatagctttctgcaccatactgaggataactttgttgagaagcccatgaagatgaagatggtgatgctgatgaagcagaagttgacctaaacgatgactgtctccagttttctttagaattccctgtccccatcaaacttaacaaaaaactaaacctttttagattcaaatcaaacctctcaggtcagttccgtaccctgcaaaacaaagatttagcctttagagtatattcatgaaaccccagaaaaaaaaagcagaaactttgtttaagattctgacattattagaagatgcaatttacctatacctaattcgttaagaaaaggtgaaagctttatctttgacagatgttgaattatctcaccgctctttaaaatcgaaggttggtagagatgtttatataaagaaaggagattcaatcacgtcacgtaattttccacaacaatacgcgatttagtgacttctagattaagataaaagtcctattacgaaaacctactccaacactctaacccacaataagtaaaacaaacaaaaaccagtttctgacaaatctacgagctttccaatttcgccgaattgaactgaaacattctctgattcatcaaaccaaagactaccccaaaatcgaaaaataacattaattcgagattgaatctcccgacattcatcagaaaatgacccaattcgattgagaggaaaagttgtctacctttaaactaaacgaagcagaggaatgacgaatcagagaagtactttgagagagagtcagaggagcttcaatggcggatcgaatactaaagagttcgcctttaaagtttcctccttttgttcgaaagcaatttcacttttcttctgtttgttgtatttggtttgtttctatgaaatcattaggagactaatcacttttctgtttttaaaaaagtgtgaagcacgctaatggtggaaacttcttctaattttaccccacattttattctctcttccaacaattggccctataatattattatcgatatccaaagtcataacatggtatcaattgacaatttcttttgattacttgaaattcttaaattgaccatttcttaaaaagtacaaatagtcaataactaaactaacattttttaattccaaatttttaatctagaggattgtattatacatatgtaaattatatgaataaaaaatacttaaagaaggaaaacataatcaataattagtttaaaaaattgcaactcagaagtttagaaatgatgtatcatataaataggactgccaaacaaaaaaaacttcttctgtatgatttgggcaaatactaatagtataataacaatgcaataaatacctttggggatgaaatggatggttatcagaagtttccgaccacgtgacaatcctatcctatcttcaatatctttccttcgtcgtgcggttaaattgtcaatgttccttaactacgtcaattttttcccttttcggatttactcgataggtactgttgaatattgcaccttgtagactacaaatattgagagtttgacttttaaattatcatccattcgtcttcttttttctttgctcgagagttctcgctcatgatgcactcatgcttataattgattaacctttttttcttcttgtgtgcaaattattgattaactaaagttgtcttaatttcagtataaaagtttttgcttccttcggtgagcaagacacaacacgtgaaacttaaatggacttacattaaagtatgaaacttcgtacccgtgatttatgctactcttttttttctttcttggacagttccttcaaggagcaaacaagaaatacgtggactgcactttcaaaccaaataattatagaataaaatcgtattagttcctctatatagttcataaaagcatttcgaatctaatggactggagtaaactagaataacgaatgttaatatgcattatataagtgtaatactgactagtgaacgccacgacattcttaatatccattatataaataataaatgtaacacaaaccactatattcatggttgaataacaaatgtatttattttcttaacatttacaccaaaaaaattaaaacaaatgttacctgaagaagattcactgaacctagtaattaataagtactctccattttgtttggtcaacttattcatatactttccataatagtataggaacattaaaactgaattgaaatcaaagaaatctattgatgatttattatcttctacaattgaatgtgttcgagtgtttgaccgtttcataaaaatatataaaagttacaactataagatacaaaaactaaaaatcgaaaacacaagtataaagcccaataagaaactatataaagcccaatattattctttaaaagcacatgtatgctacctacaggcccatttagttttaaccgcgtgttttagttaaggagcatagaaacaaccctagtccttgccacagaggatcacagctaaccaaatattcccttgcacgtaaaatccgacactggtctatttcgtcgtcttcgacctcgagggaatctactgtagctctcacactatccactcttcatcggcagctagatttccgggtcctcagtatcgggtcagatctagatccggatccggagacgctgagaatg

SEQ ID NO: 28901 - DNA, 3003 bp, Unknown
  misc_feature (1)..( 3003): 2750-1469P.txt file - cDNA_ID_2999303; gDNA_ID_2926238; Annot_ID_142800
cagtttcgctgggacgtgctctattcagtgccattcccattcttccaataactcatggcatcaagtgcaatggtaatgtttgttaattttgatcttctgagtcattctttggcacgggttacacattattaacagtattccctaaaaatatgtagatctgtatgctttcgtcattggcacatatgccttttggactaccatatctggggccaggtatgctatcgagcatgtcaagtcaaagaggacttcagtcttgcttaaccaaatatggaaatggtgtgggattgtattcaagagctcggtgctgttagccatatgggtaagtgttttgtgctgttaaattttcaatatacgagaaactctaaactctactaaatgtggattctgtacttttcaaatggtgattgaacaggtttttatcattccggtgctaattggacttctgtttgagcttttggtgattgtcccaatgagagtcccagttgatgaaagccctgtgttcctcctgtatcaagactgggctcttgggctcatctttttgaaaatctggactagactggtaagtaattttctccaacaatcagcaacttatttccgcagaagaagatattttgtcactaaaaaacaacgtcaatggacaggtaatgctggatcatatgcttccaatagtggatgatagctggagagcaaagtttgagcgggtaagagaagatggcttctcgaggcttcaagggttatgggtacttagagagattgtgttcccgatcgtcatgaaactcctaacggctttatgcgtgccttatgtgttggcaagaggagtgttcccaatgctcggatatccgcttgttgtgaactcagcggtctacagattcgcgtggataggttgtctttcagtgagcctcttctgcttctgtgcaaaaagatgccatgtctggtttagaaaccttcacaactctatccgtgatgaccgttatctcattggtcggagactgcataactttggggaagctgctttagctaatcaaaaccaaaaccaaagtagtgaggatgcaggagatggtgtcttgataggacgagagggagatgttgataatggacttaggctcagacgtgcaatccaacaagaagcttagaaagaaactgtgcactgaggcgtttaacattttgtgtacttaagccgttaagagatggctttgaaagatttattattagtcgatgtgtaaattattatatccgttgatgattctcttttttttgtttttgtgtacgaaactaaaagatctttagaataatgcttcgtttgtccatatgccttgtgtgtttctatgataatgcttctagaataccttcgcttactgcaaattcttgtcttttgtctcttatgttagtgcatgtaagccttaaggaattggcgttgaagatctatttggccgatgtgtgattgtagacatactcgttgatactgtttttggttttttattttccaacagaataaaaataagaggaatgttataaccccattagatagatgtccatatcaggttcatctcagacccatatgcttcaagggttatgggtacttagagagattgtgttcccgattgtgatgaaactcctaacggctttatgtgtgccttatgtgttggcgagaggagtgttcccaatgctcggatatccgctagtagtgaactcagcggtctacagattcgcatggataggttgtctctcagtgagcctcttctgcttctggtttagaaaccttcacaactctatccgtgatgaccgttatctcattggtcggagactccataactttggggaagctgctttggcaaaaccaaagtagtgaggatgcgggagatggtatcttgataggactttagggagatgttgataatggacttaaggctcagacgtgcaatccaacaagaagcttagaaagaaactgtgcactgagtcgtattaacttaggcttggaaatatttactagtcaatgtgtatcccgttgatcctcttttgtttgtgtataatatccaaaggatcttaagaaatgagtaatgacgcttcgtatatatatatgccttgtgtgtttctactttctattgtaatgctttttgaaatgattgcgtattgcaaaatctcatctctcatcttatgttctttcgtgtcacaattctactggaaggccaatcgtgtattaagttgaattgttttgataagtcaaatcttaacatattggttatttaattaagatactttttgcataccatataaaatcgtgcggtaaatattaatattaacaacttttactttaggaaaatcaaaattcatcaagatccagtgagaatattgctaatcagagttaagaaatgttaagataaatcaaagaaaatatcatcactgtacaaaattttaacaaacttggttactaattagattcgaaagtgtcaaacacgcgcgtatctgtttgacttttccgaaagtgacgagaaggaagacgaccttatcaattcaccagcaactctaaaatcaatcctacgatttacttcagactcgatccaacggctgagatcaatctcacactcctagggttcttctaggggaattaaaggtttcttttttttgttgggttaataatataaaagcaaagaaaaggagaaaccgtaatgcttctttttcatctatcgtaattgtgcttgtttcgcctagaatctctcggcccccaaatatctcactcgccgtcgcaggcttcgccgccggcaatttcttaccctatttcatcttccctctcctctgatatacccataaaaacacaaaaaaaacgaaaagataaaaactttggctttagttttgttgattttgtcattcgattcgatttctttttcttctttcaaattctagggttttcgatttggtttcagtctaataacgagaggggagggaagagtaactaaaaccccaaaaaaagtcaaaaaagtttcgaaaatccaaaaaaagataatg

SEQ ID NO: 28902 - DNA, 3003 bp, Unknown; identical to SEQ ID NO: 28901
  misc_feature (1)..( 3003): 2750-1469P.txt file - cDNA_ID_2999303; gDNA_ID_2926206; Annot_ID_141760

SEQ ID NO: 28903 - DNA, 3000 bp, Unknown
  misc_feature (1)..( 3000): 2750-1469P.txt file - cDNA_ID_2999314; gDNA_ID_1621108; Annot_ID_56015
gaaggtggagattgtggtggcggaaacaggttgggcgtcaagaggggacgctaacgaggttggagcaagcgtggataacgccaaagcgtacaacggaaacctaatagctcatctaaggtctatggttggcacacctctcatgcctggaaaacctgttgacacttacattttcgcactgtatgatgagaatctaaagcctggaccatcttcagaacgggctttcgggcttttcaaaactgatctttccatggtctatgatgttggccttgccaagagtagcagcagtagtcaggttagatactagaagttgtggtttttatttagggaaagtaatttattataacatgtaaacgcaaatgcagataaataacaatgttttaatttgtgaggttatgttttgatcataaaattagacaccatcaggaaaagtgacatcgtcggggtggtgtgtaccaaagaagggtgcaacgaatgaggagttacaagcgagcttggattgggcgtgcggacatggaatagactgtggtgcgatacaaccaggaggggcttgtttcgagccgaacaatgtggtctctcacgcagcatatgccatgaatatgtattttcagaaatctcctaagcagcctacagactgcgatttctctaaaaccgcaacagtcacttcccaaaaccctagtaagatttctctccccgttactttcacaccctaccaatagtagtttcaacttagtaacttagtataaaaagttgtaacaaagacttagtaattgcttttgtttgttgaaggtaatgatcaattctcttctactatgttttattgtagctaggccttgtaaatgctttaattgaccaaataatcggttttctacatgctttattatactaattgggtttcttaattatcttgaatctgaatttgataggttacaacaattgcgtatatccgggaggaggaggaggaggaggaggaggaggaggaggaagtaaagcagtaatgaacaagtatgtgagctcagacaaagtagagaagaagaatggagcaactgaaccaaaagtctcttcttctctatcttttctactcatctttttgtcccttatcttccatgtatatatgtaaatggctcaattagctcttggaggtaagtaattaattaattacgcctacttgttaatctcctctccttcctctgtattaagtgtaatcgagtttgttattagtttataatggttacacacattctatctcaattgtattatatagtctgtaacggctatatctactagacttcttttggtttcttataaatgaatctgaatattatctttggataaagtttcctatattccaatgtatatctatatccctcttaaattgttacattttacgccgtacctttataattgggcctattgtaaatttaaaccggtttagctggttcactttactgaatttacattttctgaaaataaggatttgagccgaacctacaacaaaaaaatgaaaatttgacccggtttattttggtttactcatctgaaattaccttttatgaaaaggagtcgacaaataatttacttattttcttcggttaaggaaaataactatttccttcttaaaaaaggaatggttgatctcaccgactctagctagggcttataaatacaaagacgcatagggtttcacaacttcatcaccttaacacaatttgttcgctctctaaattcttaaatctttcatcaaatttgcttcacagtgaaaaacctcctccacaaggaacacacaatgtcttcgaagatgatcgtgttgatgagctccgatggtcagtcgtttgaggtggaagaagcggtagcaatccaatcgcagaccatagcgcatatggttgaagacgattgcgttgctgatggaatccctcttgcaaacgtggaaagcaagattcttgtgaaagtgatcgagtactgcaagaaataccacgtcgacgaggctaatcctatctctgaagaggatctcaacaagtgggacgagaagttcatggatctcgaacaatccaccatctttgaactcatccttgctgcgaattacctcaacataaaaagcttgtttgatctcacatgccaaactgttgcggacatgatcaaaggcaagactccagaggagattcgttcaactttcaacattgagaatgattttacacctgaggaagaagaagctgttcgtaaggagaatcaatgggcttttgaatgagcccatgaatcaaaaacctaactagctttctttttcttttttccttttagtgttcttttttttttttgcaacttcttgatcaataatgtagatgatgatcacttcgtctactttttaaaatttttttttttgatttgtattctcttgagataatcttttgttggatattgatatgcttaaccaatgtgtttttattttattttctcttgagacaatcttaattttattggattattgatgttcttgtagccaattcagaaaaacagaatctattagacaaattaaattcacgtagcaaaataactaacatgttttctcttttcttgtactgtaaattacgtttcttaaaaagaaatatgtagttaaaaatccttcaaattcattatattgaatcgaaaatctcgtccaaaaccaaaaacaatcatagctcttaaacgatatcgtttaatcattgtgagagggtccactttaatgggaacagtcaatgtctattgaccctcttctctctctctagctagtctcaggtcagagaagccatcatcaacattcaacaagagagccgtgtttgtgtcttgactgattcttctctcaagcttttttaatctctctctcttttcccacgtaattcccccaaatccattctttctagggttcgatctccctctctcaatcatgaaccttcttctcttctagaccccacaaagtttcccccttttatttgatcggcgacggagaagcctaagtctgatcccggaatg

SEQ ID NO: 28904 - DNA, 3000 bp, Unknown; identical to SEQ ID NO: 28903
  misc_feature (1)..( 3000): 2750-1469P.txt file - cDNA_ID_2999314; gDNA_ID_1621108; Annot_ID_171659

SEQ ID NO: 28905 - DNA, 3000 bp, Unknown; identical to SEQ ID NO: 28903
  misc_feature (1)..( 3000): 2750-1469P.txt file - cDNA_ID_2999314; gDNA_ID_2926207; Annot_ID_141795

SEQ ID NO: 28906 - DNA, 3000 bp, Unknown; identical to SEQ ID NO: 28903
  misc_feature (1)..( 3000): 2750-1469P.txt file - cDNA_ID_2999314; gDNA_ID_2926207; Annot_ID_202316

SEQ ID NO: 28907 - DNA, 3000 bp, Unknown; identical to SEQ ID NO: 6837
  misc_feature (1)..( 3000): 2750-1469P.txt file - cDNA_ID_2999318; gDNA_ID_1621108; Annot_ID_56031

SEQ ID NO: 28908 - DNA, 3000 bp, Unknown; identical to SEQ ID NO: 6837
  misc_feature (1)..( 3000): 2750-1469P.txt file - cDNA_ID_2999318; gDNA_ID_1621108; Annot_ID_171685

SEQ ID NO: 28909 - DNA, 3000 bp, Unknown; identical to SEQ ID NO: 6837
  misc_feature (1)..( 3000): 2750-1469P.txt file - cDNA_ID_2999318; gDNA_ID_2926207; Annot_ID_141811

SEQ ID NO: 28910 - DNA, 3000 bp, Unknown; identical to SEQ ID NO: 6837
  misc_feature (1)..( 3000): 2750-1469P.txt file - cDNA_ID_2999318; gDNA_ID_2926207; Annot_ID_202334

SEQ ID NO: 28911 - DNA, 3003 bp, Unknown
  misc_feature (1)..( 3003): 2750-1469P.txt file - cDNA_ID_2999324; gDNA_ID_1620655; Annot_ID_47845
tttctttccaaaagcttgccttgacaccgaagcacaacaagatatgctcaagtctctgtctgcgacccttcagcaggatttcaggagcttaaatcttttcattgataaagagcttgagctagaagttgtatttcccgttagagaggaagttgtttttgcagagaacccacttatcaacgcaggaaccggagaggatatgaaaccattgcctttggaagaaatttctcaggaagattcttcatggatctcacacatgataaaggcaaatgagaaaggtaaaggcgtgtcactttcttgggagtaccaaaaagaagagccaaaagaagagtttatgcttacatctggatgggataacaatcagattggatcaggccacaataactttctttcagaagctgagcagtttcaaaaggtgacaaattcaggactcagaatcgacatggatccaagttttgaatcagcttcctttggtgttgggcagacattactaggcagtagaagaccaggtgagaagagaagaacaaaaacagaaaagacaattggtttagaagttcttcgacaatactttgcaggaagcctcaaagatgcagccaagagcattggtggtaagaaagaaaacttatagttattatgtctatcttatcaatctctcagaaagtgatgattcattcacgcagtttcattttcatgttgcagtttgtccaactaccttgaaaagaatatgcagacaacacgggataacacgatggccttcccggaagatcaagaaagtggggcattcattaaagaaactccaacttgttatagactctgttcaaggtgttcaaggttctattcaacttgattcattctatacaagtttcccagaattaagctccccacatatgtctggtactggcacttccttcaagaatccaaatgctcaaacggagaacggtgtttcagcacagggaactgctgcagctccaaagtcaccaccatcatcttcttgtagccacagctctggttcaagcacctgttgttcaactggagctaatcaaagtaccaatactgggactacctcaaatactgtaaccactctgatggctgaaaatgctagcgcgatcttgaagagagctcgtagcgaagtgagacttcataccatgaatcaggatgaaacaaagtccctctctagaaccctgagccacaaaacattcagtgagcatcctcttttcgaaaatccacctcggttaccggagaatagtagcaggaagttgaaagctggaggggcctcaaaagtgaaagccacatttggtgaagccaaagtacggtttactttgcttcctacttggggcttcagagagttgcagcatgagattgctaggcgttttaacatagataatattgcaccctttgatcttaagtacctggatgatgacaaggaatgggttcttctgacatgtgaagcggatctcgaggaatgtatcgacatttatagatcatcacagagccgcacgatcaagataagtgttcatgaagcttctcaagtcaagctgggaggttcttttggtagcatcggtcttggtccctcgttataagctatcaggtataaggttgttacctgcaagaaaagaaaagaaaagagcaggagattcgactaatttactagtgtgttagaaaaatattactcaccattttatagcaatgggcatcgtttgtaaacatattttcagtgcccccattttgcaagcagcagtagtggactggtttcctgcatcggcttagcagattttttgtataataaggcgatgcgtaccagagaaacatgcttatatgtatgtattattattgtctgtacatcatttgtcttctggattctactaagctctgcaagtatgttaaattgatatatcttctacatcgtcacttgtatttattttcttacttaactatgcatgaaattcttaagggtgctttttggggcatcaaagcttactgtgtacaaacattacagtcaataaggagttagtattcagaaagaaacaagaaaaaacattatgccagtttgaaagtaagaaaaggctagacgttttacttatataggcaatgatagtcatataaacacagaagctatttttggcagaaaaagtagagaagaaagtgtatacttggatggtgaggacacatgatatttatagagattctcttggtttttaagcaggaatatgtgttcaagagagagaaccacctagtggagtgatcttccaagttcctaaccagagtatctctgttaaatcctcaaatcagtatttgttaaagaaacaagtaagcctgcagacaaaaggttctcgttttggtttgtttttgtttctttctgattcagtgagtgacacaaaggaagatattgatcctgaacctatcattgccacctaaacttcagagacaggagaaaacaacatggaaaacaaaaaacctatgtcaagagaatcagaccaagtgtacctgattgtaccatttggtactaaaaatcaggatgacgaaggagttgattcacgtgactatgcttcgaatctcttaacattgccaatctccgtgtttctaagacttctttcaccaaagccttgatgaaattcgagggtgcaagttatgattttgcaaataatgtagtactctgcatgatcaatgattttgcggcaattttgtaaatatctgaagtgaaaaataagcaaatgtcaaactaaattaattactgagtaaatgttgatgaagttaaatgattggggggatttgtataaatatcttaattgacgattctgaaacaaagtggtctaatcggtgattatctattgttttatggaaatatcttaatgagatgaagattttggggcgaattgtgtaaataactaaattttaacaataaacgcttttcgtccgcctccagctcccaaaagccaaagggcgaatcttcttcttctctttcgatcaaatcttttcagattcaacccaaaattgaagacaaaaatg

SEQ ID NO: 28912 - DNA, 3000 bp, Unknown
  misc_feature (1)..( 3000): 2750-1469P.txt file - cDNA_ID_2999324; gDNA_ID_2926209; Annot_ID_141875
ctttccaaaagcttgccttgacaccgaagcacaacaagatatgctcaagtctctgtctgcgacccttcagcaggatttcaggagcttaaatcttttcattgataaagagcttgagctagaagttgtatttcccgttagagaggaagttgtttttgcagagaacccacttatcaacgcaggaaccggagaggatatgaaaccattgcctttggaagaaatttctcaggaagattcttcatggatctcacacatgataaaggcaaatgagaaaggtaaaggcgtgtcactttcttgggagtaccaaaaagaagagccaaaagaagagtttatgcttacatctggatgggataacaatcagattggatcaggccacaataactttctttcagaagctgagcagtttcaaaaggtgacaaattcaggactcagaatcgacatggatccaagttttgaatcagcttcctttggtgttgggcagacattactaggcagtagaagaccaggtgagaagagaagaacaaaaacagaaaagacaattggtttagaagttcttcgacaatactttgcaggaagcctcaaagatgcagccaagagcattggtggtaagaaagaaaacttatagttattatgtctatcttatcaatctctcagaaagtgatgattcattcacgcagtttcattttcatgttgcagtttgtccaactaccttgaaaagaatatgcagacaacacgggataacacgatggccttcccggaagatcaagaaagtggggcattcattaaagaaactccaacttgttatagactctgttcaaggtgttcaaggttctattcaacttgattcattctatacaagtttcccagaattaagctccccacatatgtctggtactggcacttccttcaagaatccaaatgctcaaacggagaacggtgtttcagcacagggaactgctgcagctccaaagtcaccaccatcatcttcttgtagccacagctctggttcaagcacctgttgttcaactggagctaatcaaagtaccaatactgggactacctcaaatactgtaaccactctgatggctgaaaatgctagcgcgatcttgaagagagctcgtagcgaagtgagacttcataccatgaatcaggatgaaacaaagtccctctctagaaccctgagccacaaaacattcagtgagcatcctcttttcgaaaatccacctcggttaccggagaatagtagcaggaagttgaaagctggaggggcctcaaaagtgaaagccacatttggtgaagccaaagtacggtttactttgcttcctacttggggcttcagagagttgcagcatgagattgctaggcgttttaacatagataatattgcaccctttgatcttaagtacctggatgatgacaaggaatgggttcttctgacatgtgaagcggatctcgaggaatgtatcgacatttatagatcatcacagagccgcacgatcaagataagtgttcatgaagcttctcaagtcaagctgggaggttcttttggtagcatcggtcttggtccctcgttataagctatcaggtataaggttgttacctgcaagaaaagaaaagaaaagagcaggagattcgactaatttactagtgtgttagaaaaatattactcaccattttatagcaatgggcatcgtttgtaaacatattttcagtgcccccattttgcaagcagcagtagtggactggtttcctgcatcggcttagcagattttttgtataataaggcgatgcgtaccagagaaacatgcttatatgtatgtattattattgtctgtacatcatttgtcttctggattctactaagctctgcaagtatgttaaattgatatatcttctacatcgtcacttgtatttattttcttacttaactatgcatgaaattcttaagggtgctttttggggcatcaaagcttactgtgtacaaacattacagtcaataaggagttagtattcagaaagaaacaagaaaaaacattatgccagtttgaaagtaagaaaaggctagacgttttacttatataggcaatgatagtcatataaacacagaagctatttttggcagaaaaagtagagaagaaagtgtatacttggatggtgaggacacatgatatttatagagattctcttggtttttaagcaggaatatgtgttcaagagagagaaccacctagtggagtgatcttccaagttcctaaccagagtatctctgttaaatcctcaaatcagtatttgttaaagaaacaagtaagcctgcagacaaaaggttctcgttttggtttgtttttgtttctttctgattcagtgagtgacacaaaggaagatattgatcctgaacctatcattgccacctaaacttcagagacaggagaaaacaacatggaaaacaaaaaacctatgtcaagagaatcagaccaagtgtacctgattgtaccatttggtactaaaaatcaggatgacgaaggagttgattcacgtgactatgcttcgaatctcttaacattgccaatctccgtgtttctaagacttctttcaccaaagccttgatgaaattcgagggtgcaagttatgattttgcaaataatgtagtactctgcatgatcaatgattttgcggcaattttgtaaatatctgaagtgaaaaataagcaaatgtcaaactaaattaattactgagtaaatgttgatgaagttaaatgattggggggatttgtataaatatcttaattgacgattctgaaacaaagtggtctaatcggtgattatctattgttttatggaaatatcttaatgagatgaagattttggggcgaattgtgtaaataactaaattttaacaataaacgcttttcgtccgcctccagctcccaaaagccaaagggcgaatcttcttcttctctttcgatcaaatcttttcagattcaacccaaaattgaagacaaaaatg

SEQ ID NO: 28913 - DNA, 3003 bp, Unknown; identical to SEQ ID NO: 22720
  misc_feature (1)..( 3003): 2750-1469P.txt file - cDNA_ID_2999328; gDNA_ID_1971868; Annot_ID_58447

SEQ ID NO: 28914 - DNA, 3003 bp, Unknown; identical to SEQ ID NO: 22720
  misc_feature (1)..( 3003): 2750-1469P.txt file - cDNA_ID_2999328; gDNA_ID_2926209; Annot_ID_141893

SEQ ID NO: 28915 - DNA, 3003 bp, Unknown
  misc_feature (1)..( 3003): 2750-1469P.txt file - cDNA_ID_2999332; gDNA_ID_1620674; Annot_ID_48193
tgattcatgtagattattggataagatgggcgttattttggatcatcccatccgatgttgagttaaactaatctgagcttacaaattattaaagattataaagatctctatgttcatatctatccaatgcccaatggaatcttttaaaaaatataaggaaaaacattatcttctgcatattaaacggataataacagcgaaacttgtggatggatcattacaatagaaaaataccgaggaggcacattcaaggaaggtattcaatagggcaccaaatattgtaaacgtaattctctaagtttcccatacatcatatatctgctactactctacacgcatatatatacaaaatacatgtgtgactctcttatatagaccatacttttagacattatacttacataaagccagtactagatggctgtagattctcgaattaatagtaccctaacattctttggaagaacctatgaatctttcaattataaaatagtgatgctctggtgtaggctaagtgatacagatgaagttgtaacctcctatggcaacaataagcactttcattacttgaatttgtatagaacaccctatagctatcaggaggatcaagtaaacaacatttacggattcaccttaatattttctgcaccaatacaaaatttactgaagttgattggtctcatttgcctgatcaaggctgaatccagtcatctccgctagttcagcgagttctatttctccgcttaagacctaatttataaaagaggtgaaataggtactgacatgtgatgaaatgtacaaggggttcagaggatttactcaccttatcatttattatccatgttgggaatccttcgatcgcagcatctgcacatgccttgagtatcttagttcctttcttatatccatccggaaaacattccacgtagttcagttcttttgccgcttctcttccaaacatctgtagatggatggaactataatgaacatataataaaagcataaaactgattcttggcaaacaggtgatgaatgaactaactacctctttttgctctaagcagtgagaacaccagaatgccccatacattttagctccaatggagtttagatgttttgctaaagcaatagcataagggctcgatgatgaactgatctctgttctaaaatatggcagttcaatgtcaccagagctggaaggagtgaaacaaaaaacgatcgggattaaaagagaccacctgataagactcatacatctttcggaagctatttgttcactactcgttacaaatgactaaaatttctatcgggactccccaaagaaaactatgaactttgattaccgtgaagggattggttgagcagtactgtaagaagcagtcaaggaggcaactactatgattgctaagcatatctgcaatcctacaacttgctgtatttcttgcaacttcacatcctaccacatgcatggagcacattatcataatccgaagtttagaagttatcttgagtcaacatcaggaaaaaaaaagaaatggaaataaagggatacctttacagagaggaaaaatagactaaatgataagaaagcagacaccagacaatacaggcatgatgatcctgagagttttgtgctaaggatatacaggaaatatgcactagcagatgccattgcagtcgtgatcccaaataacgcgaaacgcccattgctcttactgattccaaaaggtagattcccttccccaagctctgcacttagagcggttactacgccatacataacaaatccaatcactggaagaggaacacctggcaaaatgtaaaaaaggattttcattgagttcaacttacctgcaatgcaatgttggacaaacaacgaagacaaagcactacatagagtggagtgaagcatgctatttaactctaacaattctatgcatactaagtaccaaagctcctaaatgatatagcttcaagcaaagattcacagagactatcacatgcgagtatttaatcatgcctactataaaagagaggacaattagctacataaatcaaacgctataatcaataaagcgatggataataccgaaaacgacggcataatcgctgttgaggacatcaccgcaagtgccaccaccaatagggcaaaacgcatcggagccagtgaccttgaggtaagtcaaatacgcagtgtctaacatcccaataccgccgattccggtgtaccagttgtatgtcgaactgttactagtagatacttcacttgtagacgatgaggaggaggaagacagcgacggtgccgaatcctcaccgttttccggctcagatgaagaacatttaatcggaatcgcaggaaatctccgatcagagacctaattcagaacatctgacttcaaatgaccgatcacacactactgtcactgaagaaaacacatgacaagaatttacctcgaatcgtctaggataagaagttaccgacggaggagaaacctcacggaagccgaaatgaaactgacaagacgacacagaaacaaacctcgccatcatcgtcgtcgaagaatcgctattccaccattgttaacttcatcatcttctctcctccgctccactatctcagccacttgtttcaatattgggcctaaacgaggcccaaatacgataatttggatccataattagtttatcacaattgggccttacggtcttcttatccgtccgagtcagcaagttatcctcttcaacacgactcacgaggcaccgagttggacttatcatgattcattatctacgcattgtttacattttggaatcgactttggtacataattgaatttatccatagaaatgatagagactcgaagatcggacataaaacttgctgacgtgacacccatacctttgtgtctgtatgtattatataaacgctatagaactaagagaagaagtatctaagtagcatcaaagcattctaaaagaagtttcaaagaagaagtgaaaatg

SEQ ID NO: 28916 - DNA, 3003 bp, Unknown; identical to SEQ ID NO: 28915
  misc_feature (1)..( 3003): 2750-1469P.txt file - cDNA_ID_2999332; gDNA_ID_1620687; Annot_ID_48494

SEQ ID NO: 28917 - DNA, 3003 bp, Unknown; identical to SEQ ID NO: 28915
  misc_feature (1)..( 3003): 2750-1469P.txt file - cDNA_ID_2999332; gDNA_ID_1620687; Annot_ID_164668

SEQ ID NO: 28918 - DNA, 3003 bp, Unknown; identical to SEQ ID NO: 28915
  misc_feature (1)..( 3003): 2750-1469P.txt file - cDNA_ID_2999332; gDNA_ID_1620674; Annot_ID_164186

SEQ ID NO: 28919 - DNA, 3003 bp, Unknown; identical to SEQ ID NO: 28915
  misc_feature (1)..( 3003): 2750-1469P.txt file - cDNA_ID_2999332; gDNA_ID_2926210; Annot_ID_141924

SEQ ID NO: 28920 - DNA, 3003 bp, Unknown; identical to SEQ ID NO: 28915
  misc_feature (1)..( 3003): 2750-1469P.txt file - cDNA_ID_2999332; gDNA_ID_2926210; Annot_ID_202535

SEQ ID NO: 28921 - DNA, 3000 bp, Unknown
  misc_feature (1)..( 3000): 2750-1469P.txt file - cDNA_ID_2999334; gDNA_ID_1620618; Annot_ID_46923
tatgaagaagggtttccgtcatagcgagatggactcgggaaggatgatgagactggacttccgtggtacgaaggtgcaggacttggaaaagctgatgattgtggacttggttggattgatgaatttgtgctgaagtttgtaggagttcctgaaatatctgatgctggtggctaaacccctgtttccacaagaatcaaccattttagtgaccaagactagactaaatcaaaaccacatgatgatgcaaccgtcaaagtcaatgttttagtcaagactcaagaagcaaaagagatttccccaaaatttctcaataatcaaacttacatgatctatagaattagatgatccaaagcagaaaccatcgaattcataatcagttctaatcactacgaagaccagatttcaatccaaatagggggaaattgaaaattcaacccaatcgaacagtgaaaagtgaaatccaaatcgcaagatctcaagagtctctaacaattcgattgaattaaaacacaacaatcgcacagattcatcgattgaattatgagtaattgagagaagctcagattccgatctaaaaattgaaatccggaattttcagttttaccttgcgataagtggtgccatcgtcttcgacgatccaaccagcttcgagacagagagctttaagaacctcgttgttatcgcagtgcttaggaagcttatagttaccttgagctctaagaccagagtaaatcttagcagtgatggctcttcttcttctttctctcttcttattgttctctctctctttccacgtcggagtacgtcccgacgatgatcctcctcctcctcctcctcctccggcggccattgaagagctctgaatctctgaatctatctctaagtctttgtcagactggcgcacgagggatagagagagagagacgaagctttctttttagtttttttgtttttttttttgttttgggtgtgtgtgtgagtctgaagcggattggctgtaactttcattcattaagtataaataaattcaaatattcatttgtctccacacgtgtggtctgtttctacacgtgtgatcgatttatttctggaagtcagcttccacgtgtcctatttatgtaacgcacgagctgtggtcccttccccgttgtttccctcccgtccactgttcaatgaattcggatctttccttcttcttttttttcgtattttctttaatttaaatttgtatcttaaaaacaaaaacaaaaagcgttgtaagaattaagaatcagtataaaaactggatatactaacgattttgcattgttttttatgacgacatattgcacattttcatattgtaacgcattaatacaactcacaaaagctttacaccaaatttgatgttatttcttggagttgtcaaaacgtaattcgaaactgatctcattttcctaacataatttttaacctagtatagcatctaaagagttttaaaacggtcatattggattttagaaaatgacgaacaaattattccaaaaattacatgtttatttgattttcccaaattcattgatgtgaattaaaaaaatgtatccacataattagggaagctagctaaaacattttttagtaatattaaaaaggatggaaataagataacaaacagcaatttggctattgtggtcggagcacgtgcggttccagttaggcgtgagcaaagccaggaagcagaatcacccagctggactcatgccattattatttttttagccaactaattaatatagtactttaacaaatcctatttacatatttgttaaattttcacaaccttaaattaataaaagtaatttcataaaatgtcatttgttattattgcagacaatcaaatgaaacaaaaaaaagttcctaataattgtgtttattattttattttattaaaccacgtcttctcatttatagtcacaaatccaaaaactactaaagtttaaaatgaaaaataaaatcggtgacgccaaaaaaaatccaatctgtcagagtgactttggatcagatcattcacgtgggggaatctttaacataaattttcaatttgtacggcgtggtcacgtacatttaatcttacttagtacttacttttaatttaatttgttgattattctaattaatcgtgcggcgtccatttaagtcataatccaactattctcactattgttcaatgcatcggtcaatattggttagtattgcgttttaaaaagaaaaattatatgtgcttttgtaaacgtttcgatttgtttgctacattacattacatatttcttataatcacaatattattgtatcactagctcattctgcatgtagacattatgaaaattgtcagacagccgaagatctcggcattaatattaacgaatttgggcacttcgttattaaattgaatgaaacatgatttgtctagtatatgtgtccgaggcccatgggcccttaatttcagactcagcaatatttctgatattttcctcctggtaacatggaggagctaaagaagaagacttttctaataatgttatttctaacaataattttcagctctaaattgaaaattaccaagattaacatataacttaaattatacgttaccaatccattcacatcccaaaaatgaataaagataaatgtaatcacgttcccgacacttaccatgtaacgatccaccaaacaagctacgttacgtgcttaatgatctttttaaatccaataaatacgttaatctacataattaaatggcttaatggccacttcatgacttatccagaaagaatcatccaaagaaatatgacgtcagtaacaaaaagaatatccaacatgttactgtaattaatattaaattcggcggttgttaaatcgtacgagaaaactattcgtgtcggaactttagatccgatatttatagaaagcaaccaaactccggctccggttactcgggagttcaagttttggattttgatg

SEQ ID NO: 28922 - DNA, 3003 bp, Unknown
  misc_feature (1)..( 3003): 2750-1469P.txt file - cDNA_ID_2999334; gDNA_ID_2926212; Annot_ID_142020
aggtatgaagaagggtttccgtcatagcgagatggactcgggaaggatgatgagactggacttccgtggtacgaaggtgcaggacttggaaaagctgatgattgtggacttggttggattgatgaatttgtgctgaagtttgtaggagttcctgaaatatctgatgctggtggctaaacccctgtttccacaagaatcaaccattttagtgaccaagactagactaaatcaaaaccacatgatgatgcaaccgtcaaagtcaatgttttagtcaagactcaagaagcaaaagagatttccccaaaatttctcaataatcaaacttacatgatctatagaattagatgatccaaagcagaaaccatcgaattcataatcagttctaatcactacgaagaccagatttcaatccaaatagggggaaattgaaaattcaacccaatcgaacagtgaaaagtgaaatccaaatcgcaagatctcaagagtctctaacaattcgattgaattaaaacacaacaatcgcacagattcatcgattgaattatgagtaattgagagaagctcagattccgatctaaaaattgaaatccggaattttcagttttaccttgcgataagtggtgccatcgtcttcgacgatccaaccagcttcgagacagagagctttaagaacctcgttgttatcgcagtgcttaggaagcttatagttaccttgagctctaagaccagagtaaatcttagcagtgatggctcttcttcttctttctctcttcttattgttctctctctctttccacgtcggagtacgtcccgacgatgatcctcctcctcctcctcctcctccggcggccattgaagagctctgaatctctgaatctatctctaagtctttgtcagactggcgcacgagggatagagagagagagacgaagctttctttttagtttttttgtttttttttttgttttgggtgtgtgtgtgagtctgaagcggattggctgtaactttcattcattaagtataaataaattcaaatattcatttgtctccacacgtgtggtctgtttctacacgtgtgatcgatttatttctggaagtcagcttccacgtgtcctatttatgtaacgcacgagctgtggtcccttccccgttgtttccctcccgtccactgttcaatgaattcggatctttccttcttcttttttttcgtattttctttaatttaaatttgtatcttaaaaacaaaaacaaaaagcgttgtaagaattaagaatcagtataaaaactggatatactaacgattttgcattgttttttatgacgacatattgcacattttcatattgtaacgcattaatacaactcacaaaagctttacaccaaatttgatgttatttcttggagttgtcaaaacgtaattcgaaactgatctcattttcctaacataatttttaacctagtatagcatctaaagagttttaaaacggtcatattggattttagaaaatgacgaacaaattattccaaaaattacatgtttatttgattttcccaaattcattgatgtgaattaaaaaaatgtatccacataattagggaagctagctaaaacattttttagtaatattaaaaaggatggaaataagataacaaacagcaatttggctattgtggtcggagcacgtgcggttccagttaggcgtgagcaaagccaggaagcagaatcacccagctggactcatgccattattatttttttagccaactaattaatatagtactttaacaaatcctatttacatatttgttaaattttcacaaccttaaattaataaaagtaatttcataaaatgtcatttgttattattgcagacaatcaaatgaaacaaaaaaaagttcctaataattgtgtttattattttattttattaaaccacgtcttctcatttatagtcacaaatccaaaaactactaaagtttaaaatgaaaaataaaatcggtgacgccaaaaaaaatccaatctgtcagagtgactttggatcagatcattcacgtgggggaatctttaacataaattttcaatttgtacggcgtggtcacgtacatttaatcttacttagtacttacttttaatttaatttgttgattattctaattaatcgtgcggcgtccatttaagtcataatccaactattctcactattgttcaatgcatcggtcaatattggttagtattgcgttttaaaaagaaaaattatatgtgcttttgtaaacgtttcgatttgtttgctacattacattacatatttcttataatcacaatattattgtatcactagctcattctgcatgtagacattatgaaaattgtcagacagccgaagatctcggcattaatattaacgaatttgggcacttcgttattaaattgaatgaaacatgatttgtctagtatatgtgtccgaggcccatgggcccttaatttcagactcagcaatatttctgatattttcctcctggtaacatggaggagctaaagaagaagacttttctaataatgttatttctaacaataattttcagctctaaattgaaaattaccaagattaacatataacttaaattatacgttaccaatccattcacatcccaaaaatgaataaagataaatgtaatcacgttcccgacacttaccatgtaacgatccaccaaacaagctacgttacgtgcttaatgatctttttaaatccaataaatacgttaatctacataattaaatggcttaatggccacttcatgacttatccagaaagaatcatccaaagaaatatgacgtcagtaacaaaaagaatatccaacatgttactgtaattaatattaaattcggcggttgttaaatcgtacgagaaaactattcgtgtcggaactttagatccgatatttatagaaagcaaccaaactccggctccggttactcgggagttcaagttttggattttgatg

SEQ ID NO: 28923 - DNA, 3000 bp, Unknown; identical to SEQ ID NO: 6296
  misc_feature (1)..( 3000): 2750-1469P.txt file - cDNA_ID_2999338; gDNA_ID_1621088; Annot_ID_55442

SEQ ID NO: 28924 - DNA, 3000 bp, Unknown; identical to SEQ ID NO: 6296
  misc_feature (1)..( 3000): 2750-1469P.txt file - cDNA_ID_2999338; gDNA_ID_1621088; Annot_ID_170576

SEQ ID NO: 28925 - DNA, 3003 bp, Unknown
  misc_feature (1)..( 3003): 2750-1469P.txt file - cDNA_ID_2999338; gDNA_ID_2926212; Annot_ID_142041
aaaagaaaaggtaaatgaagctcattggtgcctaaatgtgaaatgaagccgaaatgtgttaggtgaacacatttaaatatacaaaaagaaatataatagaaacaaaactaattaacaaagtcgcaatttgtattgtataaaatatctttccgtctcccgtcatatttgaaaaaaaaaaaattacaaatctgttaattttaaaactttctagaaaaacacaagtatataattttctcttttcgtgcgtgtttgttttaaaataacattgttttgattggcgactcaacatattttagcatttacatatttctgcatatattaaatgatttataaactcaactatagattaaaatataatttgacatctaataattttaacaataatataaaatatgagatttataaattacgaatataaatattcaagggagagaaaaagtagaacataattcaaaagataagactttttagacttttttaacaatatttttgatggataaaaattattcaaaagagaagaaagtaagaagaaaagatgtttctgagaatttctagaaacagcatccgtttttataatttaattttcttacaaaggtaggaccaacatttgtgatctataaatcttcctactacgttatatagagacccttcgacataacacttaactcgtttatatatttgttttacttgttttgcacatacacacaaaaataaaaaagactttatatttatttactttttaatcacacggattagctccggcgaagtatggtcgtcgtcttcatcttcttcctccatcatcagatttttccttaaatggaagaaaccaaacgaaactccgatcttctccgttctcgtgttttcctctctggcttttattgctgggattgggaatttctcaccgctctcttgctttttagttgctgattctttttccttcgactttctatttccaatctttcttcttctctttgtgtattagattatttttagttttatttttctgtggtaaaataaaaaaagttcgccggagatgacggctgtgacggcggcgcaaagatcagttccggcgccgtttttaagcaaaacgtatcagctagttgatgatcatagcacagacgacgtcgtttcatggaacgaagaaggaacagcttttgtcgtgtggaaaacagcagagtttgctaaagatcttcttcctcaatacttcaagcataataatttctcaagcttcattcgtcagctcaacacttacgtgagtttcactctaacgaaaactcatttactctcaatttaatgcttcatttaattcgtttggtgaattgaatcattcttttgtagttggttagccaatttcgtaattttctcataatttgggggttggtgagaaaaccttctagaagctgagaatgttcttgttctttttttttttttttttttggtttagggatttcgtaaaactgtaccggataaatgggaatttgcaaacgattatttccggagaggcggggaggatctgttgacggacatacgacggcgtaaatcggtgattgcttcaacggcggggaaatgtgttgttgttggttcgccttctgagtctaattctggtggtggtgatgatcacggttcaagctccacgtcatcacccggttcgtcgaagaatcctggttcggtggagaacatggttgctgatttatcaggagagaacgagaagcttaaacgtgaaaacaataacttgagctcggagctcgcggcggcgaagaagcagcgcgatgagctagtgacgttcttgacgggtcatctgaaagtaagaccggaacaaatcgataaaatgatcaaaggagggaaatttaaaccggtggagtctgacgaagagagtgagtgcgaaggttgcgacggcggcggaggagcagaggagggggtaggtgaaggattgaaattgtttggggtgtggttgaaaggagagagaaaaaagagggaccgggatgaaaagaattatgtggtgagtgggtcccgtatgacggaaataaagaacgtggactttcacgcgccgttgtggaaaagcagcaaagtctgcaactaaaaaaagagtagaagactgttcaaaccagcgtgtgacacgtcatcgacgacgacgaaaaaaatgatttaaaaaactatttttttccgtaaggaagaaaagttatttttatgttttaaaaaggtgaagaaggtccagaaggatcaacgcaaatatataaatggattttcatgtattatataatttaattagtgtattaagaaaataaaacagatgttgaagttttattgttgcttaatttatgtcttcataatgtaaaaaagcatgtgaaatacttggtctaaggtcatctacttagttgaaaacttgtgaaagaggaagaaattttacttttatgtttgattgattttctttgcaagtagtagtaggtggtttccgtgtttttacgtaatccgttgaatatttttccctcgaaattgtctttataaaagtcacagaaacattttctagaactctttatcaggaaaataaaaataaagatgtcttcaaggaatcgaaaaaatacagcaatatactaaatagaaaatgctatgaaattaaataaaaatttagtaaggttccaaagacactacttaactagagagaaaaataattccaactagctctacaacaaacaaatcatttacttgtttaagaatcgaaaaatttagaaatttattcttattatttgtttgcccaattaagtcgctcttggcccaatacttgcatcacttgattgagtagaagaagatcacttaccaactctcaaaccatttaaaaattaaaaagcatagtttattttatttaaatatgtgtatgtaataattcaccacaagaaatatattacaaaccacaaaactataatcccggtaaaatagtaattaatttcttcaaaagtgtaaataaaaaagaagagacataatttagtcatagccacataaaaaatg

SEQ ID NO: 28926 - DNA, 3003 bp, Unknown; identical to SEQ ID NO: 28925
  misc_feature (1)..( 3003): 2750-1469P.txt file - cDNA_ID_2999338; gDNA_ID_2926212; Annot_ID_202704

SEQ ID NO: 28927 - DNA, 3000 bp, Unknown; identical to SEQ ID NO: 6277
  misc_feature (1)..( 3000): 2750-1469P.txt file - cDNA_ID_2999353; gDNA_ID_1621088; Annot_ID_55412

SEQ ID NO: 28928 - DNA, 3003 bp, Unknown; identical to SEQ ID NO: 23854
  misc_feature (1)..( 3003): 2750-1469P.txt file - cDNA_ID_2999353; gDNA_ID_1620678; Annot_ID_164302

SEQ ID NO: 28929 - DNA, 3003 bp, Unknown
  misc_feature (1)..( 3003): 2750-1469P.txt file - cDNA_ID_2999353; gDNA_ID_2926213; Annot_ID_142071
acttaaatctatataaaagcaaatctttaatccattcaaatagcagatatgtatctctagggattaaggtagtatacaactataacatctcaaaagaaccaaattgtgactgcacaatgcaatatcataatttgtatatcgaaaacatgatatgttcacatggttcgtccataaacagtacttatattcatatttgaccactaaatatttcacattaaaaaatcgaaattagaaataattatggatttagttctgcaaactcgattttttttaaaaaagattcgaagatgcaagattgataatgaaataaaattgagggtacatcatacatgtgggggaagtgacgtttaaaaacaaaaaggaaaaagaggaagaagatagatgccaatattgttatcatgacaactatgaagcagagttagagtccgtccgtccatacaagtattttgtgtgagtaccaccgaatttgtctgtctatgttatctcccttctttttctcatgcccacgaaccaacatgacaattatgttttgttcgttttttgaaaaattctagagttttcatttattaattatcgttgagttatgatttagtatgattttggtttaaaaattccacttcttaggactcattgtttgatctttgtgtttcttatttatttctttgcacagtactaaaaatcatgcattagttcttaccattcacaaatcttcaaaacttaattagaaaaagaaaaaaaaaaatcgatcaatacaatgaaaacgttctcctatgcactatgcagaacaagtctcgaggattcgtatggtcaaatttattccgatcaaattattcgcgaaagtgtgagaaacaaatacgtactttatttctcttacctcctcctacgtcacttctacgcattcgtgccctaccttcatcagtactcttccagtttctaaaggttaaaaccgagtcgatgatccacgaccgtagagttaaatcaagtaatcaacttaagtcattgtaataagaaagcctccgctcaaaaaaaattctacaatattagtttgacataaaacttcaaatgatagaaatatgaaatcaaatagttgtagacttgtagtctagtactttcatttggctcatttggcaattgcaaagtttacgtggtgattactaaactccttgtcggtataaatgtttttgatcatgaaaccatataccgaaaatattggtatatatagtcctgcctaactccactaacaaaaagtcaggatttttaaattaccaactacaacttgaattgtcatttggaagattgattcattggaatattgtgtatcttaagccataaacaaatcccataatttaatagtgtgccagaattttgtattcatattttaagcagtaaaaacaaaaacaaaatacatatatatattctcaatcaaactataatactttagatttaaagctattaagaaaaacatttagctagtcaaaaaaaacaattaacacttttcgaaaggtccatttccaaggaagctagagaccgtccttttttactaattcgcctgcaccatccccttgtatcgagggtctaattctacaccttattccattttatattccctaacaatttttttagtttttttttttatattactttaattctaatgaaaactcctatcttccttcctctccatcctttttcatctacctttgaatcttttgacacttgtatataaagctttacttcctcctttgttactccttttctatcaatcaccaaaacacattcattgtcttaaaccctaaacctcaagaaccgaacaaccacaccaaaaaatgagaccggttggcttgatctttacggtcatgttcttggtctcggccttttcggaatcaagaaccgcggattgcagagttctccttggtggttcgacggaggaaatcgatcaatctaaaattcatggggtcgatttacgaagtgaagacttattaggggtcgtgatacatggttataagaagctaaggtggctctcatcggccggggagaggatgcatacaatggcttcaggaccgagcaggagaggtgctggtcactaaaatacgaacccaaacaaaacattatacttcgatatttgtttagctcaggtcatagaatcatatttttcattttttatagattattatatttattcagtcgctaaagatccatgtaaagtttagaagggtgatattctttgatcatacaatagtcggtttccttctcataaacaccaatttatagtacgtgcccattaatcgatatttattttagtttaacaaatttcaattttgagatctacgttaagccatcaaccatgcaaattgtatatgagtcaataatatagattgaggagatatgttatcggccattctggtgcaacttaaatgatatacagccacatgattatctcttttcctttttggtaaggttgataccacatgattaattataaagaagacattgattagttcatgttttaccacataattggaattaaaagtggtcgcaaattataatcaaacgtggtcgcaaatcgaatttcgatgagatgcaaacgttttttcagctgtaccttttaattcttttcttatttgttcgaaatgttggcctttggggaattaaaaggacatttcaaaaataatttattgtctttccataggagccggaaatggaaaagcttcaatcttcatgcacactatgttttgagtggacccaatttcgacaatctttttttaaatgaagaagataaaagttgttttttttggtaataatgtcgagtatttatagttttataccatgtttagtgagtatattgcagtttcacgttatgaaatttgtaatgagaaaattaaaggactaaaaaggcccactaaaagcccatatacattttcttttaaacacaactaaaaaccagtgagcaaatcctttctctttttgcatgtgtgtgttgtaaagcagtggacagagacgacgatg

SEQ ID NO: 28930 - DNA, 3003 bp, Unknown
  misc_feature (1)..( 3003): 2750-1469P.txt file - cDNA_ID_2999357; gDNA_ID_1620678; Annot_ID_48295
ttgtgagttataattcttttcgcagttgattaattttccgtatttgtgaaagatgatattcttgtttatgaaggctttttaaaaaagaattcttgtttgtgaagttgataatcaatattggtattataatatatgatataatatatataatcaacgtctaaaaaaaagatggtaccaatcaagcaatatatattctttctttttttggttaacgccaatatatctttcatttatcaagatctcttcaccaaccgaataaacaaatcatggtgacttggcaatgattcaatattatatgtcgggttaactcatggatcatgtgacttctattatatctcattttccataataatacggtgattccaataatacgactaacatgatatctatattataatatatatatatggatcattgcaaagaagacatacacaacatgccatattttctccattaacaactgaacatacatcaaataaacttggctcattgttaaaatagtactttttctagctagtattctatgttatttaaattcgtaattcacaacaaaaacgaaatattaataacatgaaagcaatttgaataattaactatgaactatatatatattatgcatttaaaaaaaatatattaaaacaacccaccaccggtgagtgctcgggaagtttgtgtacaacaacggaaaaggaacaaaatgaccagaagagattagcaagatggatcaacaggatagtcggttaaaatctcccgattggtgtgttatgcataatctaactacaaagaaggattgaaagactcaaaaaaataaaaatgtcgctgaataagcgtcatggtgctttccattcttccatctcgaacacggacacgatatgtccctctgctcaatataagaacactcactcaaacaaaataaatgcttacttaaaaaagaattagttgaacaaaaaaaaaaaaaaaaaaaaaaagaattagttgaaccaatattcgaactcatctagtatacacaatttatggctgaacctgatctcttttgtcagcttgagtgagtttgtgtgaaatctcatgtttttctcgtttgatacaaaaaaacatttagaggtaataatctgatagccaacaaaaaaaaaaaaaaaaaaaaaaaaaaaaaaactgatatgatacatgtatccatgtatgggctaatccatggcttatggcgacaactgggccacatgcctaatgttgctgctagcgtcgtggttaattggacctgacgtgtaacaggcttggcaggtttttttttttttcaatttgtgtcaagcctgtgttttttttttccaatttattaacacctcgatacagcaagcatgtgaatgtgacttgttgccgcctattagcactactatcggaacttttccggttttcccacacaatatttttttaaacgaaagttccatatctaccatatctttttgttttgctaaaaaattctgatttgttttaccaaataaagaggactattaaactaaagctaataacaacgtaacgggttttcaacacccggaacaatctggaaaaaaataaagaataccaattagaaagaagtggtggaaccatatcaaccatatgttaccctaataaaaaaatcagtattcctataagttattcataattttagggtttatcaaaataaattattcataaagcttttgtcaagcttaggtttcgggaacacgtgatttacgtgttgccaggtaataatagcatacaataattcaaagattttcaaaggtaattttaatctaaaggcttgagggagtcgttgatagtgggggttagataatcctaatgaacccttagtttcgtggaggttgagacgtatctttatcctagatttcacagtacgaaaataattcagttttccagtggatatttcattgttcactcttctggttttgatatcatgttccacaagtcttccgaatactatacatcacatagtgatccaactatccaagaatgatgtattaactctgtaaattaagataacgttctttgtattttatatgtcattttaagaaagtattttatatatgatttgtattcattttaagaagtatacgaagagagtttgattttattttcctcgtgacgaaatttgtttctgataaatttgaaagatatgatttattttctgtcttggtaaggtcagttatcacattaaagactaaatagtaaattttatgtttttttgtttctgaattatttcagaatttcttgttttattcatttaatatttaataatatatgttaaatgatactattacactttagaaaaatgtgcttatttctatcgtaccaaacttctctttttttaccgaacttgttactgtttgttttgtgaacgatttttgtttataaaaacattactcgtttgtgataaatttaacacatttttgcataaaaatgtatcaatcatatacaaatgaaacattacatttttagtcatttttagtcaataagtagacgtgtgtatcatgattagttgatttaatcataattatgatatttaaaataaacatagtttaatgttattatgttggtttttaatatttttaattaacgtcaacctatttttttttatttttttttacatataactatgttgttatggaagtcactattaatttaactgataaaatatacaataaaatagaaaaaacaatagattttaataaaagaataaaaaatttgaagatacaaaaacagttcctttttcttaataaatcaaaatcaaagagatagtgtactgaagtgaagagccagccactatacgacatacgtatgtaattacgttttaataacctgatggcaaataataatatattttcgtcaaaataaaatggtcgtatctctttgctaaaaccaaaatgtcatgatgtgattactcaattttctactataaatagattaccaaatcattcgatcggagacaatcaccaaagaaagaagtacaaaatg

SEQ ID NO: 28931 - DNA, 3003 bp, Unknown; identical to SEQ ID NO: 28930
  misc_feature (1)..( 3003): 2750-1469P.txt file - cDNA_ID_2999357; gDNA_ID_2926213; Annot_ID_142081

SEQ ID NO: 28932 - DNA, 3003 bp, Unknown
  misc_feature (1)..( 3003): 2750-1469P.txt file - cDNA_ID_2999361; gDNA_ID_1620678; Annot_ID_48297
caagaggctgggttctcccacgcggcggtgtatggaaacgatacgtgcacctggatgatgtatcttgacgtagacgagtttctcttctctccggcttgggataaacaatcacaaccgtcggatcagatgattaggtctcttctaccgtcggatcagagcatgattggacaagtgtcgtttaaatcacacgagtttggaccgtctaatcagacaaagcatccacgtggaggtgtgacacaaggttacacgtgtcgacgagaagaagatcaacggcacaagtcgatcgtgcggctaagcgcggtagagcactcgctttacacggccatccaccacttcggtttgaagagagagtacgagtggcgcgtggcggacacggaggagggagtggtgaaccattacaagtaccaagcgtggcaagagttcaaggccaagtttaaacggcgtgtgtcggcttacgtggtggattggactagagtctctaatcctaagtcgagagatcgaactcctgggttgggctttaggcccgttgaaccggaaggatgggctcataagttttgtgaagtcgaggatttgagattgaagatattaaccagaaaatggtttgggtacccagttaaaaacggttataggatggcatggcagagatgatttttttttttattagatgggttcttttgttaatagcatagttgttttggtaacagttttttttctgtttttgtgaacaggtttgaagttttttgttaggtgaaagtacggaactcaaaatagtttgaaatgtgactagagttatttttgtctagtaatcccaatgtcccatttaaaatatctgaaattcggtttcaaaatataatttttcttcgtgatacaagacaaaagtaaagtataaaaaggtacattcagaggcctggctaccttatctgtaacaatcattgtattctaatcaatgaatgtattttatgagttcaaagaaagaaagaaaaaaagaagattggaaacgtacgtacgtataagtttctgtgatttggtgcgatgataatagtttacgtaattataaaccttttaaccatcttggacctcatcaataaaattcagaagacaacaacttcaaaggatatgaatagttgactaactgaaaacgtacgatgaagaaaatgcaaagcaaacaaaagaatgttatcaagagcggtggaaaagaaatgctttaatgatgtgattcaacatcagtacatcaccatactcgtgtacgcaactttaaaagttgtcaaaaaaaacagacatgtgatcaaatatgattcgcaaatgcatcgtacacatgtgacatgaacaattatatgacagaattttgtttttgttagtgacaaattttcttcttttttttttctttctgtagcggtagattccaattagtatgataagaaaccacatacatatatatacacctttttttcacgaccacaagaaaatatattattgtttccttcttctgcctccaacattgatatgctttcaaaattctctaatatgagttgtcttactgtttaggtgacttttgattcaatagaataattttcttttaaatcaatttatgaacacctcacggaaaatcatctaagcgcaatgatgtatgaatgaaacggttgaataattcttgattttatgtttaaaaacatataagcacctcgatcgcagcaagcatgggagtgtgatttgcacgtttcatatattctcctagtccaattctctaagagaaagatatcgatctatgagatgagttctatttattgttcggtgagttttaattgatcaaataaataactttctttgttaattaattaaacaccatgcgactatagtattactccatatacagagatgtatgattagtgaacacgattgtagtatcctcgatttctttttgttatcaatttcttttacaccttgatcacaatctgagtggttgttactacttattagcacgtttcatataaagtaaataattttatcaattaataatacatatatgcttcaagttgagagcaattaacgctgtcaaaacaacacaaacaaacattaacaatgaattttgggaaggtgtctctcatctatgattgattttaagatttgtttttccttctatatttgcaggaaggaatagttctatacaatcatcagctaaacttcaaattctttgtaatcgtagatgttaatagtaaactcgaatattccccaagtcatactaataaacaatgaaaattgaagaaaataaaagtcataaacaatgaagaaataaacaaattgcaatataacaatttcttacaattctcgacttttgcgcctttgagacatggtcaattaatattatgtatagtaatggtagtggacgagtggttgatatgtgaatccgaatttaatcccacatcacgaatttgaatgttttcgaatttctatattaaaaagttttaaaatggttgccaagttgtattggttcgagtatctttattccgagactagcatatggaaaagattaaagaaagaaattctagagtttgagtttagtagctttattggtggagttttgaattagattgatttatatggaaaacgtgaaaacttgcatgtgttcgaatttccatgtgaaaggttaaaaaattgttttcaagctggcatgggttaatatctttaatcttcgacgagcacatagaaacaaatttcagagtttttatttaacttaataatggagttttgagagaaatgataatcataatatggagaactcgaaatcgtagaagatgttttttgtttttttcctctggtcttttaaaacgaaaagcacaactttcaagttccactactaattgtcacgttacagatatgacatcactactttgatttgagtaaaattttctctataaataaaagaacaaacaaaccataagccaaatcctcgcacaagtagaaaaaaacacaaacatcctgaaactagaagagagagacaaaatg

SEQ ID NO: 28933 - DNA, 3003 bp, Unknown; identical to SEQ ID NO: 28932
  misc_feature (1)..( 3003): 2750-1469P.txt file - cDNA_ID_2999361; gDNA_ID_1620678; Annot_ID_164313

SEQ ID NO: 28934 - DNA, 3003 bp, Unknown; identical to SEQ ID NO: 28932
  misc_feature (1)..( 3003): 2750-1469P.txt file - cDNA_ID_2999361; gDNA_ID_2926213; Annot_ID_142083

SEQ ID NO: 28935 - DNA, 3003 bp, Unknown; identical to SEQ ID NO: 28932
  misc_feature (1)..( 3003): 2750-1469P.txt file - cDNA_ID_2999361; gDNA_ID_2926213; Annot_ID_202765

SEQ ID NO: 28936 - DNA, 3000 bp, Unknown; identical to SEQ ID NO: 3379
  misc_feature (1)..( 3000): 2750-1469P.txt file - cDNA_ID_2999369; gDNA_ID_1620643; Annot_ID_47534

SEQ ID NO: 28937 - DNA, 3000 bp, Unknown; identical to SEQ ID NO: 3374
  misc_feature (1)..( 3000): 2750-1469P.txt file - cDNA_ID_2999369; gDNA_ID_1620643; Annot_ID_163108

SEQ ID NO: 28938 - DNA, 3000 bp, Unknown; identical to SEQ ID NO: 3379
  misc_feature (1)..( 3000): 2750-1469P.txt file - cDNA_ID_2999369; gDNA_ID_2926213; Annot_ID_142101

SEQ ID NO: 28939 - DNA, 3000 bp, Unknown; identical to SEQ ID NO: 3374
  misc_feature (1)..( 3000): 2750-1469P.txt file - cDNA_ID_2999369; gDNA_ID_2926213; Annot_ID_202786

SEQ ID NO: 28940 - DNA, 3000 bp, Unknown
  misc_feature (1)..( 3000): 2750-1469P.txt file - cDNA_ID_2999373; gDNA_ID_1620720; Annot_ID_49177
taggtacaaaagagcaggatgaataattaattttaacgtaaaagaacagttctaatgttaaatacttaagcccaagccaatagtaaaatcaaagttttgaagacgacaaaatacataaatttttttttttttggtcgtcagataaatatttctttcttgttttaaaagtgacaatacaatacacacaaacaaaaataaataaaagcaatatgctaaaatacatttttgtctataagaattttgtattgtacaattgttataaaaaaatatgaaagttgctttttgagttctggtttctgcggtttcttgtggtaatagactgactggagcagtagaaaggaccctacttcacctgaccgaccaataccgtgcctctttgccttttcgtattcttctaaccaaaaacttttatatattttatatatgtaatttatgggtcatattttatctaaaatatttatatagaactgtctcaacacgtttcgctcactcttcccaattgctttttccaatgatttaatcaattatatgctcaatggatatgtccagttaaccgctgttaaacattttttctttaattgatgatactagcaaaaatgtataaacccatctgttatagatatttgaaatactttaatttgaaattcaggcacaagacacattaactttgaaatatattatgctttattttaagataaactatttaacaaaaaaaaaaagcattcaaactgaagtatcatgtgagtattaacattcaaaacaaagatgcatcatttgtaaacaaggttttttggttgaatatatgtgagtaatatatgtctctgttgggcatacaaagcccatgattgtataaaaagccgaagaaagcccatttacgaaaagtctatcattggcatattctcaatttctaaagacccaacagattcagcaattacatatataatatagtacatgcaatttcttcaatttgtacagcacatacaaaactggctaaacccacaaaaatccccaatcttgtgtaaaatactaaaatgctttaaaacttaccgtaggaaaactaaattgtttttttcagtttatttggatacatcagagtgtcgacattaagtgcagagtattgatattcacagaaattgacatctataaaaactttaagatatgtttaccaaatctactattaacgaaaaagaaaactactactagtgttttttgtttccaatatagctcaaatcatttttattgtcggccgtgttatgttactattttaatttttaaacaagtacgacaagaaaaaggtggcaaatggatgaaaaagatggatatcatattaaataaattataatgcaaaagttaaaatcattcaaagacatgacattaaatttgagtcgaatagagtcttcgttcttcttctttttttttttaatcaaaaaaacatagagctttgtttcatgaaatttatggagtctgtcaattacttatccatagttcttacttccatgtggatttgtccaatgttgtgtctccttctatattaattagacttaattcttttgataaccatcgttttcatgcaaaaaaatccagggtgtattttacattgttattacatgatagcttaacatagccaaatattgcatcaaaacggaatgtgtgagtttaaccttgccatttatatcaatagttttttgccggagtttttcaaagttgaagtatacaattggctctattaattagtaggaatctaatcaacttatatgctccatagccaaaaccgtatttttcacttagaataggattccaaattttatttttataattagaaaatattttgttctaagatcctaattatacgattggataatttttttgcacataagtaacaaatagctcaagagttgggacctgagacttgagatggtcctgtctagagcgatttagccaaccaaaaatggttgtactacaaatgtcaaatgacactagaatgcgaaattgcctcatagaatctttgttttttttaacgatgtttgctagctgggactaatattgagtgagaaatgatataaatgaagatggggataagaactattcatcgaacacgacttgtgtggtgtggataacaaaatgaaagctacatattcataaattaacatagacacatccctactctcacgcctctccacatttaacaactttcatatctttattttcatttaaaaaaaaagaaaatcatattagaaagttcatgcacaatcataaatactgcacctatactctcattgattaaagcaataatgtataatttattggaaaaggagcaaaatgccaaaatatgtaagaaaattaaaaaaaaattacaaatttatcatctcgaatgagaacaagataaactgtatatactaatgaaacctctttctatataacaaacgaatataaacatgtatttaaggaaaaattaatctaagaaacgatcgtgtggcaacaaataataaaatctaagaatctacgaaagatacgacgatcgtatcatatctgcgagacatagcagagtaatgtaatgctgacacgtgtcccagtaaaaccgcaccacgcctttcagttatgctatacactgggaaattcttatgcttcaatcattgcgaggctgagagccaagaaaatattttagcttttatcacaataataatgtgaatagttctaggagaaaaagtacacagaataaattgaattctaaaaaaaaagtgaaagaacagtaagattttggaaagaaaacaaagacatattcagtgaatttaaaaacataataataacaacaataatagaaaattggtaggtccaaaatcattgtgacaaatcgatcagtgattagctgtactgaaaatctaagctctaaatgagaccgttcctcaataattgtacatacatttgcctgcatgcatctccatataaatatgccttcgatcttctacttccaaaacaaactcatcatcataagcaacaatg

SEQ ID NO: 28941 - DNA, 3000 bp, Unknown; identical to SEQ ID NO: 28940
  misc_feature (1)..( 3000): 2750-1469P.txt file - cDNA_ID_2999373; gDNA_ID_1620720; Annot_ID_165777

SEQ ID NO: 28942 - DNA, 3000 bp, Unknown; identical to SEQ ID NO: 28940
  misc_feature (1)..( 3000): 2750-1469P.txt file - cDNA_ID_2999373; gDNA_ID_2926214; Annot_ID_142120

SEQ ID NO: 28943 - DNA, 3000 bp, Unknown; identical to SEQ ID NO: 28940
  misc_feature (1)..( 3000): 2750-1469P.txt file - cDNA_ID_2999373; gDNA_ID_2926214; Annot_ID_202835

SEQ ID NO: 28944 - DNA, 3000 bp, Unknown; identical to SEQ ID NO: 3479
  misc_feature (1)..( 3000): 2750-1469P.txt file - cDNA_ID_2999381; gDNA_ID_1620648; Annot_ID_47649

SEQ ID NO: 28945 - DNA, 3000 bp, Unknown; identical to SEQ ID NO: 3479
  misc_feature (1)..( 3000): 2750-1469P.txt file - cDNA_ID_2999381; gDNA_ID_2926214; Annot_ID_142133

SEQ ID NO: 28946 - DNA, 3000 bp, Unknown
  misc_feature (1)..( 3000): 2750-1469P.txt file - cDNA_ID_2999389; gDNA_ID_1620648; Annot_ID_47665
acgatattaaggtatctatctaattaacattaatatcttgagatgatgggaatgttaatacactggttgttatgcttagagttgtattgttgtatcacgattcaatagactagataatgaaaccatttcatttcagttctttaagcttgatgttgcgattttgtcaatgtagctggactcagacaagacatattcaatcctgctctatgggagtggtgcgatagttgctctctacttaacgtctgcaatcgtcagttcactcgaagcaatccctctggtaagtactctcaagcccccgaaacaaactctgtttgatataattgtagtaacctttcatatttgatgttacagtttcctaagctaatggaagtagttggtctcggatacacactctggttcactacccgttatctgctatttaaggtaagctaaacataggcttaatcgactgagttttaaacttaaattcacgttttttttctcaaaactatttatttatttgcagaggaacagagaagaactcaagacaaaagttagtgaaatcaaaaagcaggttcttgggtctgatagtgagtgagtagttttgcttcttttttttttgctagcagaaattattccccacaagttttgttttttccactgatttttaagttttgtttttttatgccttgtggtagttttctatggcagtgtggagaaaatgattggattttagaaatgagtaacttgaattcgatgttatatatgtgtattttccaacgttcagactatacaaatcacaaaattctataacatatggccagtatcagataacaacatatatgcacctaatgctactcaaactaaaaatgaaagtacgaaaaattacaaaataatgaagatacctgatagaaaaagacttccttctgggcaggagtaaactcaagcctgtaagaataatttattcggattagaggttcccttggatgaacaaagcaagcaagaaaacagaagtagctaactaatttgtctagatttctttgagctactctatttttccagaagctaccgatcataattgtctgtgaacgacaacatccttttcatgaatcctctcatatgcatagcatcagaagtgacagctaacgtccaacatctaatgtgcatgttttaaaaatttaaataccataagcagaagaagcccaccgcagcttaccagctgtgcagccacagaagatacttttgaaagcacatatccctcggatgaattagcatgctgcatgacatagccaaggcagaagctgcagaaagatttcgccatattacttatttttttttttttatataatccaaaacttcataataaaaacctatattttcttatatagtcatgattatctcggaaaatgatgtgaccaggaaagcagcagtattctaaaactactatattgtgaagcatgaatgctctcagttgatttgcaaagccaatcaaaaattacaaacttaacaccaagggttgcttcctgatagagcagagggtgaccaactggaagcttaagcatatatcacccaaataacataaaagaagaaaaaatacctaatcaagccgcctttatcatcggtggcaagaaagctccattccctgatagctgattttcgaatagctgcagcagcttgaaacctagcatttgccacctgagaattttctggaagtagaaaacactttcagtcaaacagatgaaacttcccaagtccacttggccggttctggattcatcagaaagacttaccaagaatatatctacacgccttatacggctgtggggattggtgaagcgacaaaatggttgcctcagcagcaactggattactattaatctgtacgaaagaaagggaaatgtcaagtacacatgaggtgagcacaaacaaagaccatgacaagccttttataagcaaagagacttcgtacttctataaactcagaaagacggtaatagtaaactagttcagtgagacatgtagtctctaacaacttagtcaacagagacgtggagataaacaaacaccataaaaaagaaaacttgataattttcaatacgctacagtgacttcaatttcaagccaaacaaattacaagaaaacataaaaaaaacaatttcataaatgcaaccacacacacacatgttcctccagtatattaggaaaccaaaacgatcaaccaggaatagagcgaaccacttgtttatgcatatatgtatgaagaaagaagaagcaacaacctgaatatacatggcaatgatacatataaacctaaaaggggattttccaaaaagttgttttttgatcctctgttttttactctatgaaaacagaatcgtttataatgatgaaacattgccagcatacaaattcacaaaatttggtgttttgacatacaattgatatcaaaataacccaaaaactctattagaatcaattgtatgtgaaaaaaaaactgaactttgatcagattcatagaagaaacaaaaaagtaaataataacaacaggagctagcaacatgtatactatttcactttttttagagtttctaagccaatcagaaggctctatttcacacccactcgcacaaagtgagcgttgagcgcgtgagagcaattctgtgggtgtacccctttccaaatcatgcctttttcaatctactcactagtctccaaaattctatttcgcgtgaaaatttgtttgttttcttctctaaaccaatgtaaaccaaaccgcaaatcaattctaatttcaataccaatgtataccgaacctaaaaatcaattttaatttcaaatgttactatcaaatgttttctaatctagtttagcaattaaattgagaagattataatatagctagctagacggcaaaaaggcaacaatcagatgtgggtgggcgtaccggtagcagcagcagtaaccaccgtcggcggccgcagaataccggtgttagtggctgcatcaggcaagaggtcgatg

SEQ ID NO: 28947 - DNA, 3000 bp, Unknown
  misc_feature (1)..( 3000): 2750-1469P.txt file - cDNA_ID_2999389; gDNA_ID_1620648; Annot_ID_163341
atggagtagttgttgcagccgaagagaaaaactcgaatagtgaagctcctcaagctgaagatgaggaaactcaagccctagagtttttgaacgatattaaggtatctatctaattaacattaatatcttgagatgatgggaatgttaatacactggttgttatgcttagagttgtattgttgtatcacgattcaatagactagataatgaaaccatttcatttcagttctttaagcttgatgttgcgattttgtcaatgtagctggactcagacaagacatattcaatcctgctctatgggagtggtgcgatagttgctctctacttaacgtctgcaatcgtcagttcactcgaagcaatccctctggtaagtactctcaagcccccgaaacaaactctgtttgatataattgtagtaacctttcatatttgatgttacagtttcctaagctaatggaagtagttggtctcggatacacactctggttcactacccgttatctgctatttaaggtaagctaaacataggcttaatcgactgagttttaaacttaaattcacgttttttttctcaaaactatttatttatttgcagaggaacagagaagaactcaagacaaaagttagtgaaatcaaaaagcaggttcttgggtctgatagtgagtgagtagttttgcttcttttttttttgctagcagaaattattccccacaagttttgttttttccactgatttttaagttttgtttttttatgccttgtggtagttttctatggcagtgtggagaaaatgattggattttagaaatgagtaacttgaattcgatgttatatatgtgtattttccaacgttcagactatacaaatcacaaaattctataacatatggccagtatcagataacaacatatatgcacctaatgctactcaaactaaaaatgaaagtacgaaaaattacaaaataatgaagatacctgatagaaaaagacttccttctgggcaggagtaaactcaagcctgtaagaataatttattcggattagaggttcccttggatgaacaaagcaagcaagaaaacagaagtagctaactaatttgtctagatttctttgagctactctatttttccagaagctaccgatcataattgtctgtgaacgacaacatccttttcatgaatcctctcatatgcatagcatcagaagtgacagctaacgtccaacatctaatgtgcatgttttaaaaatttaaataccataagcagaagaagcccaccgcagcttaccagctgtgcagccacagaagatacttttgaaagcacatatccctcggatgaattagcatgctgcatgacatagccaaggcagaagctgcagaaagatttcgccatattacttatttttttttttttatataatccaaaacttcataataaaaacctatattttcttatatagtcatgattatctcggaaaatgatgtgaccaggaaagcagcagtattctaaaactactatattgtgaagcatgaatgctctcagttgatttgcaaagccaatcaaaaattacaaacttaacaccaagggttgcttcctgatagagcagagggtgaccaactggaagcttaagcatatatcacccaaataacataaaagaagaaaaaatacctaatcaagccgcctttatcatcggtggcaagaaagctccattccctgatagctgattttcgaatagctgcagcagcttgaaacctagcatttgccacctgagaattttctggaagtagaaaacactttcagtcaaacagatgaaacttcccaagtccacttggccggttctggattcatcagaaagacttaccaagaatatatctacacgccttatacggctgtggggattggtgaagcgacaaaatggttgcctcagcagcaactggattactattaatctgtacgaaagaaagggaaatgtcaagtacacatgaggtgagcacaaacaaagaccatgacaagccttttataagcaaagagacttcgtacttctataaactcagaaagacggtaatagtaaactagttcagtgagacatgtagtctctaacaacttagtcaacagagacgtggagataaacaaacaccataaaaaagaaaacttgataattttcaatacgctacagtgacttcaatttcaagccaaacaaattacaagaaaacataaaaaaaacaatttcataaatgcaaccacacacacacatgttcctccagtatattaggaaaccaaaacgatcaaccaggaatagagcgaaccacttgtttatgcatatatgtatgaagaaagaagaagcaacaacctgaatatacatggcaatgatacatataaacctaaaaggggattttccaaaaagttgttttttgatcctctgttttttactctatgaaaacagaatcgtttataatgatgaaacattgccagcatacaaattcacaaaatttggtgttttgacatacaattgatatcaaaataacccaaaaactctattagaatcaattgtatgtgaaaaaaaaactgaactttgatcagattcatagaagaaacaaaaaagtaaataataacaacaggagctagcaacatgtatactatttcactttttttagagtttctaagccaatcagaaggctctatttcacacccactcgcacaaagtgagcgttgagcgcgtgagagcaattctgtgggtgtacccctttccaaatcatgcctttttcaatctactcactagtctccaaaattctatttcgcgtgaaaatttgtttgttttcttctctaaaccaatgtaaaccaaaccgcaaatcaattctaatttcaataccaatgtataccgaacctaaaaatcaattttaatttcaaatgttactatcaaatgttttctaatctagtttagcaattaaattgagaagattataatatagctagctagacggcaaaaaggcaacaatcagatg

SEQ ID NO: 28948 - DNA, 3000 bp, Unknown; identical to SEQ ID NO: 28946
  misc_feature (1)..( 3000): 2750-1469P.txt file - cDNA_ID_2999389; gDNA_ID_2926214; Annot_ID_142149

SEQ ID NO: 28949 - DNA, 3000 bp, Unknown; identical to SEQ ID NO: 28947
  misc_feature (1)..( 3000): 2750-1469P.txt file - cDNA_ID_2999389; gDNA_ID_2926214; Annot_ID_202866

SEQ ID NO: 28950 - DNA, 3003 bp, Unknown
  misc_feature (1)..( 3003): 2750-1469P.txt file - cDNA_ID_2999395; gDNA_ID_1620652; Annot_ID_47759
agaaaatgtttgataaagattcatggaagttcagtttaccaaaagaaaggaaagccaagaataactggttatgaacaagttcaaaggttataaatctgtgggtaaaaggactcttacggatttgtttgaaggtcgttgattggttaagatattcagaaacgaattgcagatctctagagaattgcaggttttcgaaactaagttgcagatcctagaataagttgcaggattctgaattattatgttttttagggctgagtaagctaagaagaggttattggagtgattcagtgggattcttagaagaagaaaatggaagagacaagtgcaagtgctgcatgaactgtctcaaggctactcacttcaataatgtgaaagtgtcatgtatctagtttgataaacgacacatctcaatgctggtggcagtggctgaaaagaagctctagaaggaagcaaatgcaagaaatttaaactgcatttagaagacagtaactaaggagtttgagttagctgtctgcatcatgagaagattacataagtaactactcaagggaaattcactcgcaggttagtcaagtgaacggtttttcaaagtatcagagaatcataaagaagacaaaggctctagtaccaatttttctgttatccacctgttttatatatagatttgaagagatgagatttttaaattgctacaaaagagagagtctacaatttcacaagcttgtaccaatttcagcaaaatgattggacaaacttgtaccaatatatttaacatgtttagaaaatattcaactcacttagtttgatttcttcagctgcgattctttgaatcaagttttcagttataagcttcaacctgtaaaaatggctgcagaacaaaatgatgaggaaattttttagtatcacaaagtccagattcaagttttttttcaattgtatctaaaacacacacaactttcagattgaataaaatctgaatttcattctcagcaggggctaatataaaaatgacaaaaggagaggaggaggataggagctatatgtctactatttttagttttttagccaatgagagagctccacttcataccccacttttaccgatcgtgccatttcacagtcactctcacccatgtcgcgttgagcgcgtgtctacgatttctaaagggggttaatccacaaaaatcattcatttttcgatccacgcacctcattctcaaaaacccgtcgcgtgtcttatttttttttgttttcttctctaaaccaaagtaaaccgaaccaagatcaatttgaatttcaaaaccaatgtaaacccataaaacccatcgctgtttcactttcactatccaattccaacgaaccagattgataattttgattcgattccacacagagatcataatctaaaccaatgcgattaataagagagccaaatcttacagtatagcttaaaatcttagctaaatcccaaaaacacgagattctaggcgaaaagagaagaaaaaaaaattgccagaatgcataaacagcagaggccagaggcctccattttcaccggagtgacaaattccgggattacttcctggtcggaggtgaagagtcggagtgaaacggcgacgtttatacgtgggccataaatgggctttgacggaactcaaattatattaaaagtatatttagcattcaagtaattaatttagaaattcatttgtttctgtaaaatatatatatttgctgtaaacaacgattgtgattctggtttctggatacttataaagcttttagaaggaaaaaaaattcaaataaattgtaaaaaaaatatatgtaaatgatatttatccttttaatatttttgagcattatggctcagatttatatggaaataattagttagagagaactttaattagtggaaattctcaaacgattatattctatacataaatcgtgtgcattaataacctgacttcaaagttcaaagtcttaacacttgccataaatgtttcgatagtaatatcaattttatattaggagaaaaactaaaaactatgttaaatctgtgtcagaattataataatccctttatcttaccatacatttagttgactcacatttttacttcatcacccaactgttctcagagttttactgaaatttctcatcatctctaatcactgcattgtagattctcagtcacatgacatcatctccgatgggaaaacacggcgggtcaaagactagaaccaccgtttgtttatcagatggtgttatctttctcgccggagctttcatgtctcttaccctcgtctggtcttacttctctatcttttcaccttctttcactttcaccttcaccggtttacgtcacggctgcgaatcggttcaatgttccggtttaaacatgcaattagaccctcccgagcccggtttttacgacgatccggatctaagctactcgatcgagaaatcaatcacaaactgggacgagaaacggcacgaatggtttaaatcacacccttcattcaaacccggttcagaaaaccggatcttaatggtaaccggttcacaatcctcgccgtgtaaaaacccaatcggagaccatttgttactcctccgatgtttcaaaaacaaagtcgattacgctagaatccatggtcacgacatcttctacagcaattctcttcttcatccgaagatgaattcgtattgggcgaaacttccggtggttaaagctgcgatgcttgctcacccatttatggattgaagctttaggtaattttctcaaacacatttatggattgaagctttaggtaatgaatgagctgaatttgcatataaaaaatcgatactttcattttccagaacaaaccaagatttagcataaatgttcaaaattgaaactttgattcctaacttcttggaatgattcatattgagctagatttagatctgtatgattgatatgatgggtttggtttgtttatgagtagagagaaaatg

SEQ ID NO: 28951 - DNA, 3003 bp, Unknown; identical to SEQ ID NO: 28950
  misc_feature (1)..( 3003): 2750-1469P.txt file - cDNA_ID_2999395; gDNA_ID_1620648; Annot_ID_163366

SEQ ID NO: 28952 - DNA, 3003 bp, Unknown; identical to SEQ ID NO: 28950
  misc_feature (1)..( 3003): 2750-1469P.txt file - cDNA_ID_2999395; gDNA_ID_1620652; Annot_ID_163488

SEQ ID NO: 28953 - DNA, 3003 bp, Unknown; identical to SEQ ID NO: 28950
  misc_feature (1)..( 3003): 2750-1469P.txt file - cDNA_ID_2999395; gDNA_ID_2926215; Annot_ID_142172

SEQ ID NO: 28954 - DNA, 3003 bp, Unknown; identical to SEQ ID NO: 28950
  misc_feature (1)..( 3003): 2750-1469P.txt file - cDNA_ID_2999395; gDNA_ID_2926215; Annot_ID_202909

SEQ ID NO: 28955 - DNA, 3003 bp, Unknown
  misc_feature (1)..( 3003): 2750-1469P.txt file - cDNA_ID_2999403; gDNA_ID_2926195; Annot_ID_141241
atgctcttttaatggttggtacgttatttcgaaaaatagaaagacttatctatttaaatcctgcaaatgaccacaaactgttttccattttttttgtctccatccatatcgtattgaaaactactttctagcatatcaatcctctttaaacagctcaactcaagttataagaaatagtagagcaattggtatttcgaaatacagagaaatttatttcgttgtcaataccattgtgtttgttgtgtttttgttttatagtgaatgcttggaaatctaaaaattttgttgtttagctagatcaagtaaagtaatttattgcaagagtataagctttcctctcaataattgcattgaaaaacatttggattcaatgcagctacatatattaaataaaattgttcaatggagacacaaatgcatttgtgcaattccatgtgatgcagtaaaaaaaaaatcacactcccaaaatatctctctctacaacacaagtcaacaacacaatattcacagtcacaagctatatgccttttcttatttatagcttcatctagattctgttcaattttttttccatttattattgcattcttgattacttctgtctaaaagattcacaatcaattagaacttgtttagtaggtggaacttaaaaaccattattagttaacttatcaagaacggaatcaaactagtgcatccattcaaatgacaaatgtaacaatttgtcaaaacatgtgattcaatattttacactaaaatgcattgaaataacaaagtggaacaaaaggaaaaagaagaaaaacccgtgatatgattcatgcaatcataagttgaacataaacagtaaaacttaacaatacaaaggcaaatgtgacataactacacaaggaacaaataagaactctttttgataatcttgtcccctctctcatatcatcaatgcttcttcaaccacatccactctgtttttcataatctcacactctctctctctctctctctctctctcacacacacacactcacacaaaactcattaatccactgaaacaatcactattcattctctttccttaagtgtcaaactcttgaaaaaactactttgaaggaaaaaatgtctaagaagaagaaaggcagcaacaactttaagcttctctgtttcttcctgtttttgggtggtttggttcagacagatgcttcttttggagtaggaggcggcgttggagtaggaatcggcggcggcggcggtggcggtggcggtggtgtttgggttggcggtggatacaacaacggtggaaatcgtaatgctgttccaggatcatcagctccaaacagggtagcttacaatgctcttcaagtttggaaatcagccatgagagaggatccatcaaatgttctcaaaacatgggttggatcagatgtttgttcttacaaaggtgtgttctgttctggtcaatctataacctctatagatcttaaccatgcaaatctcaaaggcacacttgtcaaagacctagctttactctcagacctcaatattctccatctcaacagtaacagattctcagggcaaatcccagattctttcaaatctttagcttctcttcaagaacttgatctaagcaacaataaactctcaggtcctttccctttagtcacactctacataccaaatctggtttacctcgatctccggtttaatagtttaaccggtttcatccctgaagagcttttcaacaaacggttagacgcgattctcctcaataacaatcaattcgtcggagaaatcccaagaaacctcggaaattctccggcttcggttattaatctcgcgaataacagattttccggcgaaattccgacgagttttggtctgacgggatcgagggttaaggaagttttgcttttgaataaccagttaaccggttgtataccggaatctgttggtatgttctctgaaattgaagtctttgacgttagctacaatgcattgatgggtcatgttccagatacgatctcttgcttgtcggcgattgaaattttgaatcttgctcacaataaattctctggggaggttcctgatttggtttgttcgttgaggaatcttattaatctcactgttgcgttcaatttcttctctgggtttagctctgaatgttcttccagggttagtttcgggtttgatttcgttgggaattgtattcccgggaggaattcgcagcggccgcagccggattgttccggttattccggcggagctatgagctgttttaggattccgacgcagcctttggcttgtgctgcgataagtgttggattgagagagagtaataatcaatactacacttcatctcctccatgaaagtttctaaagttagaagcttttttttattaatggttgatgctgaatgatctatcttttttgtaacttattaattagttgattagtgaccaaattaaacgttaattcctcttctgtgtaatccaatcgttgctaatgttgttttgtaagcagaagaattttgtaaaaatctaacgtaagaataaggtgcccagtaaatgtaattaaagcaaagacttggcttagtgaatttcaccggaaaatatcttgttttgaatcaattagatgaatgagtgatcaagcaatgtatgtagtacaccgcatttgggactttgaaagaacaatcacccacggcaaaaccttgcaagtcactccattgatcaccggtggatatagtatagatggctaaattagttatatatatatatatactatactaccaatttatgtttaggggttttcatgaacccgaccataacagaaacatgttttacgggaccatgataattctacattcccttaggggagggttgtttagttcatgggaaaagtatgtgttgaaatatgtaaatacacaccaacaaacgcacatatcatatatatatggtatacaagctcacatcaaaagtggattctaaccaaagaataatacaacgaaaaatg

SEQ ID NO: 28956 - DNA, 3003 bp, Unknown
  misc_feature (1)..( 3003): 2750-1469P.txt file - cDNA_ID_2999417; gDNA_ID_2926195; Annot_ID_141249
actaggtccgatttattcagaatcagttttgatatggatattggtcggattcgttcaacccactgattccaatttggttttgaaaaacaatgttcggccatttgcatccagagttatttaaatcacgaaaaatatagtttgctatttatcatatacatacggaatttgcatgttaacactattgatcaactagatttttctaatgttatattttttttggtggggaagtattgaacttaccttaccactctttttcgattcaaatactaagaatcacatttatcagttgtgagtttagctaaatatgtgggtggttttaaatttgtgagtattaaatttgtcatttctatcacaaaacaatgggagaaaaaaacgaaaaactagtttcccgacattaaacatgcgaattactgaaacatggataggtccaccatttttgccatttgacaagctcggtctcttgttttccttgttcataaatgattttagtttgtttgcttttttaaacgcatctttctatcacttttttcttttggttgcaaatatgtcgttttctctcctccctccttttccgggatttaacttatcacaatgtaatgaaatttgcatgttcctctctcgccattggcaagttccattgcgatgtctctatcgataggtcaaacaatccaaaagaaccaaaaccttttttcttttcttttccactcacatttaatctagggaccctttaatcttattcattttctcaacgataatgtaaaaaagtatagttagtaaactgttaactgtgtagattatacatgttttttaatcaatcatataattagaaggggtatttagccgtccaaaagctgttttcgcgtgactatgcatgaaacccacttacgtagcctccaacgtaacgaccaataaaaagctctaacttaggaacattacaacgaactaatatttaataagttatataaggtcatgaaatgaaatcttataacgtatctaacaactcacatgatctataccatgtcacattttttatcaaacatatgttaaccacctaagcactaacactactctttgatcaaacttatatttcgcatatactccaaaagaaaccaagtggcatattggcatatctcgtaatgtggtgccaaaaatgcttatcaacttaattatagttcagatattgtctccgtatcgtatcttaatatttgtattcaacaataggtattatgttgtattagctaggtgtgatttgtaacgagaagagatatctcgttctattgtgaggtaaaaataaaataaagcagtacaagaacataacggtataaacggtttttactgttaaaaaacttgtaattgtttatgtaccaaccctattgattgtgtttaagaaattatttttaaatcttgagattcttattcaaatataaacattgaagatcgatattgctcaatatcacaataatctttctaagttatgaaaagaacgtctactactatttgtttaaaactacataggacaacatcaaatcagttttgaaattcattgtaaaattcttttaatactaaaattgtttacagttaatgagaaattacaatattatttttagcagattataattagaaaatacattattattattgatcaatttaccttgcagttccacgcaaaaccaacaaaataacaaataacaaagcattgtgtggaatgacgtaaggatgagtcagcagacaaggagtgagatcgaatcgggtcaagattatctggttgggacccgtcacatgcacatggaccctctcccgtacctaatccaggttaaataatcttgattttctgtttaattaccttaaaaacacattattattgaaactaataataaatctcggatctttggttccgaccatacttgcgaaagatcattgctttaatgctaatgtttctctaattttgatattccttgagattagattccctttgcattgtcttttcttgttaatttgttagggttcatattcttacattattttttttggcaaagaaaaaaacatttataaacatatctaattcgagcctgatctattaatgggtcaaataaaagcctctttggcccaattcaataaactggccaactggggatcatcatagagacagactactagagagtagagacgcatcagaaagaagagaaattgatcccacaagtttaaacacgattacaaattaaaacgtgccacgtattcaagacggtgaattaacacgacgtggcaaggtatgattggataacttacgcagctgcctaacaaaaacaagtgatttgagttttcagatgattagaaggaaaaaaaattctggaactttcgagcttctgttttgcggtgctctcaaagcttatatcggatctcgaatcttgaatcggactcagaacctcggatcttcgaaaatcgacgaacatgtcttctcctggcgagtgagttccgttcccctctattgaaactttgcttcgattcgattttgatcgagagattcttagcttggtcttcgtacccaggattttgagtccttaggttaataattttcatgattcgtttagcttgtataggggtttttgaagcattcaactgttgattcttctcaattcgagcgtaattttgcaacaccaagcgagttctgtgaacttgagctaacgctatttttagtatatagttatcaatttgcattgtcatcatttgatattttggtgatttgagatgtaaagaaacatcttttatgccatggaagttagtacaagtcaactggtagttagttcttgaaatatggaatctcatagtgtcttgaagcaaaactgttctcgtttgctgtatcatagttacaaggctactttgattctcctagctacgatagtctaaaatatctctgcgtaggcttgtctcttgtggtaaagttttatgctttagctgatcttgatgacatttcctgattagaaatttatagatggatggaatatg

SEQ ID NO: 28957 - DNA, 3003 bp, Unknown
  misc_feature (1)..( 3003): 2750-1469P.txt file - cDNA_ID_2999421; gDNA_ID_2926195; Annot_ID_141251
tgtttttgtttttgtctagcaatcatctccttactaaattgaattcgataaactatagccactatgaatataatcaaatgaaatttgtgacataagaatttggacgtaacgagtttgaatatctatctagataagttattaaattcgtgaccaaagagtttggtcgtaacaagtttgaattttttaggacataatattattattggctaacaagattacgactaacgagtaaataatcattccttcggtccttcctctaaaatgccgttggtgatcgtttataaataggggaaataggaaaagggaagaaagtagacgtggcaaatagcgaaacaatgattgagctataacaaaggcgaaacttgagcggcactaattgaaaatcactccttgtttttttgaagaaaaagtaagatgtagggctgagaattcgtctatgtgatccaacggttttaaaatgatccttgttccttcctctcctatttatctgaaggacgaagtccccacgctgcacataaccggggcacttaacgtatagatcataaacaaagaagaagaaaaaaaataagaaaagaagaagaagatgtcgtggcaaacttacgttgatgagcatttgatgtgtgatgttggcgatggtcaaggacaccaccttactgctgccgctatcgttggtcatgacggtagcgtttgggctcagagcgccaacttccctcaggtatttgatttcattgcgtctgatctcaatgtgatttagatcctgatagtgttgctatccgatatgatatgtgtttttacaatgtgatttagatcatgcatcatgttttgattagattctatcaatgtttgtcatgggatatatatatagtgtattttgtgtgtgtgtgtttctttttatatgttttgcatagatttgaaaacaaatgatgcatgttgtctcatggtaatcgactaatcgtgatttggtctttcatatagttcaagggacaggagttcagtgatattatgaaagatttcgacgaaccgggtcacttggcacccacgggattattcatggcaggagcaaagtacatggtgatccaaggtgagcccggggctgtaatccgtggcaagaaggtaacctaatcagtagcttcatgatcagatatgcaaataccatgttgaagagggttctaattcaatatatgcttctttcaattagggagcaggaggcataacgataaagaaaacaggacagtcatgtgtgtttgggatctatgaagagccagtgacaccaggacagtgcaacatggtcgtcgagaggttgggtgattacctcctcgaacagggtctctagaatcttcttacaatgttccaccacctacatttttttataaggccattgtttctcctatttttttcctttgggtgatttgcatctctttctctaattgatattataagttttgggctaatggaccttcctggtttctccccatagcaaacttttaagaaagctgaagcctaaaaggcttttactctctttgccttggtttcttatttatatgcatgttttagttgttttctctttgcttttttgtcaattgcattctgtctactacactaaatattaacgtattgattgagaaaattgcattatcataatctatagaaaattgtatgtagtgtagtagagacattaatctcacaatactaaaaacactttcaaaatttacacgagcatttaacacatacatcaacactcattatttacaacagaagaaaaaactgatacgcaacgcaatctttcctagtgatttcattcgtaagaaagaaaaaatgaacatgagaaagaaaaatggcaacaggcagaattcattcatcaactttaatctttaataggaaagtaataatagtacaattatgtcggaaaatcattcccatcccatctgtctttattatgtgctaatctaacagctcatcgagaaatcgaatctcagtcttttttccctattattacattatcacttagatataaggaaatttttgttatctcacaatattcactttgaatcaatacgatgcacatataacaaattaacaatagcaagtgattgtttctcttcaataactcaaaaacattttttttttttttggaatagaaaaaggtttattaaccatctttctaaattttgggtaattaagaaacatttattgacaatgacattaggaaaagagaacattaattgtaaagggtggacctaaataattggaatattttggtgtatggcacacaatgcaagagcatatccaccctgtaaacaaattatggccatacttcgatctcttttctttgattttggaaattaaattctctagtattgttttttttagaaaagaaaaaaaaacttttgtattgtttatttatgtaaacttcatttgttccaataaaatctaaaacgttttcacatttggtttgacaattttatttacacaaattttcaatatacttttagcgttagatcaaattataccatgcaagaattatatgcattttctatatgatcttgtttaaaaataaaaactgtagaaataatgtaaaacccgagaaatgaaattgttaatagattaaaaaaatcatttcttttaaccggatgcaaattttaatcattttaaaaatattttcttttgattatcattttaaaattatttatcgactttcacacaaaacattttgaatttcatttgtatctactttttttttttttttggtatttcttttagctgtctttatcaaattcagtaaataaataaaatatgtattttaatggaattttttgcagtagaaattaaaaaagagtttttttttattggaaggctaaatcgtgttattaataatttaagctcaaaggttgtccaagtctacaaaccaaaagcacgctacagaagaagaggaagaagaagaagaagcagagacaacaagaagaagaagaaacagtctcatctcgccggagaagaagaaagatg

SEQ ID NO: 28958 - DNA, 3000 bp, Unknown
  misc_feature (1)..( 3000): 2750-1469P.txt file - cDNA_ID_2999424; gDNA_ID_2926196; Annot_ID_141258
gagactcctacaggtcttaagtttggacctctagccagtggacttgagaatgaaacgactctcccatcttatggatcgagtccgccaagagacaagacgtcgtctaaatctataaaagagtatcttccaacagaggttgatccgtcaaggtcttcttctctgcagacagcttcttctagcagtattaggaatgaactttacactcagaaagcaagtaactcagacaaaagaccaagctctatacctccagattcatcttctagtgatgatgaatcagatatggaacttccaaagagagtttctttcagatatcaagagaaaagaactgagtcaagaacccggcccacacatctacattcgggtgtcagccataaggacttggaggaagaaatcccgactcgagcttctaccagaagtcaagataggaggacccacaagaccacccctgcctctgcttctgcttcatattttcacacaatgtccagtgacgatgaagatgagaaagaagtccatagagatactgcacacattcaaaccaggccttatatttccatctcaagaagaacaaagggccaagagagaagaccatccctcgttactgcaaaaattgacaaagtttcttttgatgaagaatctccaccaaagctaagtcctgaggccaagccactgactaagcaacaaggatcagcttcctctttaagctatcttcccaaaactgagaaagtttctcacgatcaagaatctcatccaaagctaggtcttggggccaaaccactgattaagcaacaaggatcagcttcttctttaagctttcttccaaaaaccaacaaagcttctcccgatcaagattctcctccaaagctagttccaaaggaaaaaccagcagctaagcaacgaggatcagcttcttctttaagctttcttccaaaaactgacaaagcttctcccgatcaagattctcctccaaagctacttccaaaggaaaagccagcagctaagcaacaaggatcagcaacttcttcaagctctcttccaaaaactgaaaaaatctctcactatagagaatctccttcaaagctaactccagaggctaagtcaatggctaagcaagaaggattagcttcttcttcaagctcgcttcccaaaactgtgacatcacctgacccagaaactccggcaaaggagaaagctagccatgtacatcccaaactcccagattacgatgacatatttgccaagctcggggctcttcgtcgctgaattcttcccgtttgtttatatatacatacatacatattcattgttcaattagccctcaattcttttctttgattggtttgcttgtagatttgaacttgaatttcgcatcctgagcataacttttttgccgtgagatatctcatctgttttgtattacatgtttggctttcttgtcatatatacagtcagatttgtaatgattgaggatacgattgacaaatcgagagaagaaaatatcttgattgatgtactattttggtggacgaaacaggaatgttatgtttaccatgataataagaaaactgttaacccgtctgtgtatagaagaaatatagattattcagatagctatggaagaacaaatttctcgtccaaaatataaactaacaacaagatctttgaatttagcaacaaatgtgttatctaataattgccaatctgttcaaagacaatgcaagttacaaaaaacaaaaagcaacaggagaaggaccgaaacttcaatcttttgttgaatcctttgacactagaaggttcttgccatgtgctagctcaagctattcagtaaaagaagccaagaacctgaccacccacattccgtttgattgcttcttcatggtccaaaatcccatccggagttgtgattacaacataaccccactacatggaacaaatcaaaaaggctaagctatttagctgcatttctggatatggagagagagagacaatgaacaaacctgacgtgttggaagtgtgcgttcagtgtatttctcaatctcttttgccctaacgtcttgcctgtaggtaagagctttgcagtcattaaccctcccttgcagatcaactgttattctcccaactctatgtggatcatacacttgaaagttcttgatataacctacatttaacattaccattttgtaaagttaaaacacactaaggaaaagctgattccatcaaacaatctgtaacatgtaaagctacttacaactataataaccatttgaaatcgctatctagcaacattacccaaaaaaaaatccatttagcagaagaattatctaaccatccttaatatgaatcaacaggtatatatatacataagtagaacaaagcaactcagaccactgatagcatcataaaagcaaaaacataaacttggaagcaaaaaacattaaactttgtttcaagtttcaaactttcaaatgttgtagcttcacaagtaagtaagcccaacaatctcacgaactaattgcagcttctaaaatactactaaatctagtgtccatgagaattgatgagcttccgatcccaaaaatgataaatgggtaagcatcaagaaccaattagaaaacaaaagggagaaaaatttcacctttctccttcatgattctcaagaacgaagacataacggtggagattggtttgagctccaccgaagcttttcctcgtctctcagcattcacaatcgtcctcaacgcatcgttcaaaatcctcctccccatttctccggtcaaaaaatcccgacgatactacacaaatcggagaaatctagaaaacaataagggtttttcttcactctatgacacgtttgttattttccagaattcataagggtagtttagtcgtttacaattttaacacgtgcgggattttaaccacacgtacctccaaatttctataactccttctctccttcgtcttcttcctttccttcaatttcccaaatcaagaaacaccatg

SEQ ID NO: 28959 - DNA, 3000 bp, Unknown; identical to SEQ ID NO: 3790
  misc_feature (1)..( 3000): 2750-1469P.txt file - cDNA_ID_2999432; gDNA_ID_2926196; Annot_ID_141304

SEQ ID NO: 28960 - DNA, 3003 bp, Unknown
  misc_feature (1)..( 3003): 2750-1469P.txt file - cDNA_ID_2999446; gDNA_ID_2926197; Annot_ID_141345
caacgtcaagtaacttatttatgaatcaaagaatcaatcatttagctgcactctggaggaacacctcgaggaaacctttttttatcggagcaatagttgtaaaccatgtatttactctgtacccctttcattcttgtctggccattcgaatcgagtttttgagtgaaccattgggaatttgcgggacaaactgactttccattaacccatacacatccctcgacattgtagtttctgtaataagcggtgaaaggagcttttgaccaatctgttttctctaatcctccccttgtagcccaatgctctgcttcccatagactcgcatatagcctcattggttgctttgttgggaatgggactccacgtgactcggcattcataaactctctaattggaatcccatcaacggtaaaactggagagaataaaagattcttggttcatgagtttatatcctcaaacataaatattatgtatggtacaaaggaaggagtttcgacacttacataattctttgtggattccatgtgatgcaataagtgtgaaagttagcggttgggtcaaaccatagatgaaattgttgttctttgtctcctgagccttttgtgtaaacattagtatggagagtatatggatgaccacttatgttccccaaaaactcgaaatcaatctcatcccatgtagttcccggagatttaagctacacaaattagaacatcatataagcaagtggtacgaacattttatgaaatagcaaaacatgacaagaacgttacatgttacttacatagaatgttgtgacggttccagcagagttaccagggacaagtttcatttgaacttcggctttaccatagagaaactcttgattagattggaaacctgaaccagaggatttgtcaagcgagagagatagaagtttcccttgattatcgtgaatctttccacgaccatcaccccaatgtatcttaacgtctttgtggaagctgcctgcatagacgctgatagattgtgctgcaaagagaaagagaatcaagaacgtaaaagacttcatttttattagatctctctaggagttttgatatctcagatgtatattgttgatggaatattgaggtaagtgacattagtttatataggggaaaaagagagatggaagtttcatgggtttgatcatttatggtgcatgtgcttttgtctactcggaggcacattcacagcttctaatataattatgtatatagattatttgattcgttgttggctgttgccaagtgaatccaataaaaaactctttctttatttgtttattgttatcaaaccgaaataatgtttggacatttgtacaaaattgaatggtcccaatgttttgatatgtcaacacggcttcgactttcgagcgcaccgcctaactaatgagaagctcaagatgtctgagaacactccgaatgaggaagcatattcgacaatcgacatcatccgatgccttgtgtcagacaaaacagcaaaaacgacagtgtttcaaccaaagaaaagattgtgttgggcttaagtgattcagacccaaaccaaaagaagcccatgacattacaacggtcattcattctcaactaaagacaaaaacagatgaatgcgagttcttcttctacgcaatcggtttgagattctcatgtgtgaagaaaaaaactagtctaatatatgggaacgattgaaacaaaccgaattcaaacaccataatatattctcaaaaattaaactccagatggatctaataaaattcaagagatcttataatagattgaaggggctaggaaagatcaaaacgtgagtttctcactacttcaggttttctccggtgaaagattctctcaatgtcatctctctcttaatcatccaagtagtaataacatcccgcaagcttctggtcactatccttcatcgaatcgagtttattgattcttggtctgaaattcgtaggatctcgtctgaaagtgatgttcaaacgagacaagaacaaattcattccactacgtagagactgaggagaagatgccgtgcaatccacggaaggttctccttcatacacaataactttatctgccaaatacgtagccattatgaaatcgtgcaaaagccgccttcttcatctgaagaatgaatctctttatgactttggaagctataattctctgctccgaatcaagaaacgcgctcggttcatcgatcaagtagatatccgcagatttaccaaggcataaagctaaagcaaccctttgtttctctccacctgatagtttgttgaagcttttatccatgagctcctcgatcttgagcggtttcataacgtctgacacgaattggtgttctgcatatgcgttagggatcttcctgtgtatcaaatctctaacagtaatctcaaatttacggtttgacatatgttgattcttgtaagaaacagagaactgtggtatctcatgtacttgagatccttcttcatcaatatcaagcttcgaacccgcaagcattttgataaacgttgtcttccccgttccattctctcccaacataactataatctgagaatccgtgaattctccttggttcaatctcagcttgaagtcccctcgagttatagtcattgcagggtaattgtaccttgcataagaagctacttcttaggcttgcaacagtctgcgttgacgacagggattcgagtcatacgatctgccatctctttttcccgatgaatcgagtaagaagactcaacttggagaattattttttaggtcaaagaacggacttgtagggttttattagtcataaaacaggggaaaaaacggagcacgtggaccgtggttcgaccgatccaaattagctaaatccggctctctactaaccaagaacaatccggttatgatgtataaaggaaaggaaagtagataaaggaaggtgagccactaaagtcatcgtcacctccgtagcttccgccgttgccgttcagatg

SEQ ID NO: 28961 - DNA, 3000 bp, Unknown
  misc_feature (1)..( 3000): 2750-1469P.txt file - cDNA_ID_2999450; gDNA_ID_2926197; Annot_ID_141347
gcgaagcatcgacgactaatttcgtggcggcgagaccgtcggcgaagaccgatgatgcagtgacgatgagaggttgtggttttgctaatcttgccttggttggtatagacaaagaagagcttcgagggagactagcgatgcctgagtatcttcgtatagctatgagagattgtatcaagaggaaagattcaacagagatttctgatcatttgttacttcctggaggcgccgccgctgatatggctcctcacgcgccaatggttgtgtttattaacccgaaaagtggtggtcgtcatggtcctgttcttaaagagaggcttcaacaattgatgactgaagaacaggtctgttttttaaaaaacaaaaactttttttttgtttgcaacttatgaaatgagctcactttacttaacttttgaaatgaacttgagatcatatttttgtttgaagaagattttaaatcttgatttgggagtttactttctttttgacttcactagatttgtggttagattgtgaatggaaacactctgttttggtttaatgagtataactatgagcctatggcattcttattgttctgacatcatcaaatgttctgttttttttttctctgtaattttgtttagaagaagttataaactgttttgtcttaaaaagactgtgattcctccttagttagtgagctcatgttaatatttgcaatgacaggtatttgatctcacagaagtgaagcctcatgaatttgtacggtacggtttggggtgcttggacacattggctgctaaaggagatgaatgtgcaagagaatgcagagaaaagatacggatcatggtgagtatctatttccaaagtattagttagcaattggaattagatttgctaagttagcggcgatgattgatgataggtagcaggcggtgatggtaccgttggttgggttcttggatgtctcggtgagcttcataaagatggtaaatcacatattcctcctgttggagttatacctcttggtacaggaaatgacctctccaggagttttagttggggtggttcattcccttttgcttggagatctgctatgaaaagaacattacatcgagcaactttaggttccattgctcgattagatagctggaagattgtagtgtcgatgccatctggagaagtcgttgatcctccttattctttgaagcctacaatagaggaaactgcacttgatcaggctttggatgctgatggagatgtacctcctaaagcaaagtcttatgaaggagtgttctacaactacttcagcataggtttggaatttggatacatgaagtaactttatctttcattgttcttaataaatttctacaaagttaaaccttttgaagtaatttggtattttcttgtgttgtttaggtatggatgctcaagttgcatatgggttccaccatcttcgcaatgagaaaccgtatctagctcaaggccctgttacaaataaggttgctatatatcagaatcttcattcttgtctaagtttcattaattagctgtttttttggtttgtaatgagattatgaatcacactcgtttcggttttgcagattatctattcgagttacagttgtactcaaggttggttttgcacgccttgtgtcaacaatccagctttaaggttagcattttctgtgaagagagtaaaccaaaagccttttctttactcaattcctgtctcttgttgtgttgacatgttgtggtaagatgaatttgcaggggactaagaaacattatgaaaatccatattaaaaaggcaaattgttccgagtgggaagagatccatgttcctaagaggttcatataaaactaatcttatctttgattaaaactaaaaaaatggcttcacttataatctctctggttttgttttggtgtagcgtaagatctattgtggtgttgaatctttataactatggaagtggaagacatccatggggtaatctcagaccaaaatatttagagaaggtaataatgttttattcagtacactaatcttaggttttattgctttctctacaagctttaacagaacgtgttcgggttttataacagagaggatttgtggaggcgcattgtgatgacggactgatagagatcttcggtttaaagcaaggttggcatgcgtcatttgtaatggctgaaattatctcagctaagcacattgctcaggtacaacaaaatacatccaaagtttctttataagaatcggtttaacctcggtttgatattaaaccgtttatcgttttaggcggctgcgattagatttgaactaagaggaggtgattggaaaaatgcattcttgcaaatggatggtgaaccatggaaacaaccgatgaagagtgattattcgacttttgtagagataaaaaaggttccttttcaatcgttaatgatcaatggcgaatgatcgaggaaactcttttcaagaagttgtaaaaggattaaaaaagcatgattctttatgtatttctgttccatcaattagtcaaaatagtgatctatgttgagcttttgctacggctgttgttgtgctagtgaagcatttaactttgtgtattttatcaaaaaaagatggttatttattcaatagtcattaatatacaattaagatataagcaatcatcttcaggtagaccttgaaatcttgtaaacatgattttgctgtctttaaactctgtttcttaagtcgtttttcagtgttttggagatagtagtaatgggtctaaaaagttaaataatgtttttgtggggagaaaaatgaaaatagcagattttcgaggatgggaagagtaaaacatatatttgagaagtcgaaaagtgtgaaatatttgttctgtctcgcgaggaagagagaaaaatcgaattagaaattgcaagttttagggttttagaaaatctatcttcttcactgagttttccagctccgaagaacacttgcaacttcaggcaattatg

SEQ ID NO: 28962 - DNA, 3000 bp, Unknown; identical to SEQ ID NO: 28961
  misc_feature (1)..( 3000): 2750-1469P.txt file - cDNA_ID_2999450; gDNA_ID_2926197; Annot_ID_201563

SEQ ID NO: 28963 - DNA, 3000 bp, Unknown; identical to SEQ ID NO: 24278
  misc_feature (1)..( 3000): 2750-1469P.txt file - cDNA_ID_2999453; gDNA_ID_2926197; Annot_ID_141348

SEQ ID NO: 28964 - DNA, 3000 bp, Unknown
  misc_feature (1)..( 3000): 2750-1469P.txt file - cDNA_ID_2999465; gDNA_ID_1621125; Annot_ID_172254
tgaaattgaggagatgatcagagagatggaaacaacagaagagagattagtggtgtacgatgtagatgtgttggattatcaaagcatacttgtctctctcaagacatgtaacgttgtcttctgttgcttagacagccctgaagggtacgatgtgagtgactaattcatcttgaagtgttttgtgttgattcgttctgagtttggattgaaatttgaaactgagattgatgatttgtgtgaatttatcatcaatcataggagaaggaggtggatttggaagtgagaggagcgatcaatgtggtggaagcgtgtggaagaacagagagtatagagaagattgtgttttcttcttcattaacagcttcaatttggagagacaacattggaactcaaaaggatgttgatgagaagtgttggagtgaccaagacttctgtcgcagcaagaaggtttctaatttttctttatttatttattttggttattaaatattaatcctcattagtttaagtgaaatttaaaattttggggaataaattggacccacaatttaaatattataagctggattggaataactaattatttcctgacatcttatttaatgtagctagctcatattattatttattatacatataaaaaaggaagccagttctataaattttgaattttgaaacactatataaggaattattttgtggtatttttttaatagtcaaatgttggtcttcatcaaatgtatcatcacattatctcgaatcattttattggacgacatagaaaattcgtaaggggtcaggttaattgaatatattcatttccatgactcttaaatacattgtacaactcttgattcggttatagttgccttttggaaatttaaagggcatatattttaaatttttttccttcatgttttgaataattagatacagatgatttagtagtagtgtcttttatgactatcacttagattagacggtgacatgttttttttttgatataattatgattgtcattactggacttagctaactttatgcaacaaattattcggagacaatattaacgtgtatagctgtctgtcatcaaacggaacagtcaacaaaacgaaatcgaagactattcctttacttttttgttgctgcaatttttaggaatttcattaccctctctttttgtttgttactactatttactgtagtagtattagtacaagctcaaactcacgtgctaacaaactgtatgtggatgcagttgtggcatgcactggcaaagatgttgtcggagaaagcagcttgggcattagccatggaccgtaggctcaacatggtctctatcaaccctggtcttgtcgtcggaccatctgtcgcacaacacaacgctaggcccaccatgtcataccttaaaggtacacacacatagagaaatttcataaacctcacaaaagagtttatgagcatttaatcaaagttccggaattagttgcgaaggttttgtgaatgttttaagaaggcttttttaatagcataactggaatttgtttttaaacaatcatagtgttgaagaacgagacatactaattcatattcatcaattgtgatttgaatttgatgaaatagtgtttttggtaacaggagctgcacaaatgtatgagaatggtgtgttagcttatgtagacgttaagtttctagcggacgttcatattagagcattcgaggatgtttcagcttgcggtcgatacttctgcttcaaccaaatcgtcaacacagaagaagaagctctcaagctagtggagagtttgtctcctttgattcctatgccaccgaggtacagtttcttgtttaattctatcttgtgatttattgtttaatgcaacttatagtctaatactatatatgtcaattaggtatgagaatgagatgcacggaagtgaagtttacgaagaaagattaaggaacaacaaattaagcaagctggtagaagctggctctgcttgttaaagaaagatttcacaatttaaattgaaagagacgagattatacaaaaaaaagttgtaatttgtatattgatcttctcatagatgcatgtgttgcttgtgaactattaaaaagaaagaaaaaaaacacatttcatctcattttataactaatagtatatgagtagttttttttttttggctgggggcacaatatgaatgttttctaatttttgttaaacatattaaatcttggtgggagagttgtcgtatacgaaccttttaaagcgatgtttcctataattgtgcaataataatatgaatgcattacgtgaaagattgtgcttgtattggtatatgaacacatactattatactaaaaaatttgataaagagttttttttgttttgattttatatgtagaaattataatattttcaaattatggttgaaaacaaagatgattttcttagcaagccataagcttttcttatatgcaaatgataaagtacttcacataatatgtttccctagattacgagttaagatcatatcgttgaatatagaattttgtgacgatactaacttgttttactatgaaatcatgcacaattttgtgacagaattcatgattttgctacggaatcatcaacgtgttatgattttttttttaaatgatatgttcttacctgagaataatgtgaattggatttatactaaaaacaccaaattataagaacagtacttttgcgaacaaagatcttattcacaaaaccatatgatatacttaatgggccaataccaggcctgagattgcctaacgtcgttagtaaaacccgtttaaccagctaaagtataacgtcgtcgtttaaacaaggcatcttgacccttcttcttctctatcgagtgctctggattctgatttgatttgtgaggaaagctagatcgacgatcgaataagtctcgcgctgaaatctatctttgtgcaagcaaactctcgaagaaccttagattgaagatg

SEQ ID NO: 28965 - DNA, 3003 bp, Unknown
  misc_feature (1)..( 3003): 2750-1469P.txt file - cDNA_ID_2999465; gDNA_ID_2926198; Annot_ID_141362
gagtgaaattgaggagatgatcagagagatggaaacaacagaagagagattagtggtgtacgatgtagatgtgttggattatcaaagcatacttgtctctctcaagacatgtaacgttgtcttctgttgcttagacagccctgaagggtacgatgtgagtgactaattcatcttgaagtgttttgtgttgattcgttctgagtttggattgaaatttgaaactgagattgatgatttgtgtgaatttatcatcaatcataggagaaggaggtggatttggaagtgagaggagcgatcaatgtggtggaagcgtgtggaagaacagagagtatagagaagattgtgttttcttcttcattaacagcttcaatttggagagacaacattggaactcaaaaggatgttgatgagaagtgttggagtgaccaagacttctgtcgcagcaagaaggtttctaatttttctttatttatttattttggttattaaatattaatcctcattagtttaagtgaaatttaaaattttggggaataaattggacccacaatttaaatattataagctggattggaataactaattatttcctgacatcttatttaatgtagctagctcatattattatttattatacatataaaaaaggaagccagttctataaattttgaattttgaaacactatataaggaattattttgtggtatttttttaatagtcaaatgttggtcttcatcaaatgtatcatcacattatctcgaatcattttattggacgacatagaaaattcgtaaggggtcaggttaattgaatatattcatttccatgactcttaaatacattgtacaactcttgattcggttatagttgccttttggaaatttaaagggcatatattttaaatttttttccttcatgttttgaataattagatacagatgatttagtagtagtgtcttttatgactatcacttagattagacggtgacatgttttttttttgatataattatgattgtcattactggacttagctaactttatgcaacaaattattcggagacaatattaacgtgtatagctgtctgtcatcaaacggaacagtcaacaaaacgaaatcgaagactattcctttacttttttgttgctgcaatttttaggaatttcattaccctctctttttgtttgttactactatttactgtagtagtattagtacaagctcaaactcacgtgctaacaaactgtatgtggatgcagttgtggcatgcactggcaaagatgttgtcggagaaagcagcttgggcattagccatggaccgtaggctcaacatggtctctatcaaccctggtcttgtcgtcggaccatctgtcgcacaacacaacgctaggcccaccatgtcataccttaaaggtacacacacatagagaaatttcataaacctcacaaaagagtttatgagcatttaatcaaagttccggaattagttgcgaaggttttgtgaatgttttaagaaggcttttttaatagcataactggaatttgtttttaaacaatcatagtgttgaagaacgagacatactaattcatattcatcaattgtgatttgaatttgatgaaatagtgtttttggtaacaggagctgcacaaatgtatgagaatggtgtgttagcttatgtagacgttaagtttctagcggacgttcatattagagcattcgaggatgtttcagcttgcggtcgatacttctgcttcaaccaaatcgtcaacacagaagaagaagctctcaagctagtggagagtttgtctcctttgattcctatgccaccgaggtacagtttcttgtttaattctatcttgtgatttattgtttaatgcaacttatagtctaatactatatatgtcaattaggtatgagaatgagatgcacggaagtgaagtttacgaagaaagattaaggaacaacaaattaagcaagctggtagaagctggctctgcttgttaaagaaagatttcacaatttaaattgaaagagacgagattatacaaaaaaaagttgtaatttgtatattgatcttctcatagatgcatgtgttgcttgtgaactattaaaaagaaagaaaaaaaacacatttcatctcattttataactaatagtatatgagtagttttttttttttggctgggggcacaatatgaatgttttctaatttttgttaaacatattaaatcttggtgggagagttgtcgtatacgaaccttttaaagcgatgtttcctataattgtgcaataataatatgaatgcattacgtgaaagattgtgcttgtattggtatatgaacacatactattatactaaaaaatttgataaagagttttttttgttttgattttatatgtagaaattataatattttcaaattatggttgaaaacaaagatgattttcttagcaagccataagcttttcttatatgcaaatgataaagtacttcacataatatgtttccctagattacgagttaagatcatatcgttgaatatagaattttgtgacgatactaacttgttttactatgaaatcatgcacaattttgtgacagaattcatgattttgctacggaatcatcaacgtgttatgattttttttttaaatgatatgttcttacctgagaataatgtgaattggatttatactaaaaacaccaaattataagaacagtacttttgcgaacaaagatcttattcacaaaaccatatgatatacttaatgggccaataccaggcctgagattgcctaacgtcgttagtaaaacccgtttaaccagctaaagtataacgtcgtcgtttaaacaaggcatcttgacccttcttcttctctatcgagtgctctggattctgatttgatttgtgaggaaagctagatcgacgatcgaataagtctcgcgctgaaatctatctttgtgcaagcaaactctcgaagaaccttagattgaagatg

SEQ ID NO: 28966 - DNA, 3003 bp, Unknown; identical to SEQ ID NO: 28965
  misc_feature (1)..( 3003): 2750-1469P.txt file - cDNA_ID_2999465; gDNA_ID_2926198; Annot_ID_201598

SEQ ID NO: 28967 - DNA, 3000 bp, Unknown; identical to SEQ ID NO: 15657
  misc_feature (1)..( 3000): 2750-1469P.txt file - cDNA_ID_2999468; gDNA_ID_2926198; Annot_ID_141363

SEQ ID NO: 28968 - DNA, 3003 bp, Unknown
  misc_feature (1)..( 3003): 2750-1469P.txt file - cDNA_ID_2999472; gDNA_ID_2926198; Annot_ID_141364
taaacagatgtccaaagagtcggtttagtattagagcatctgcaacatcagttacctataataacagaaacagtagccgaaaaaatcaagatgtgttgatccaaagatgatcactttcaagaaaataaatatatgaaatagtgtacataccatgaactcatctagacatagtaagattgcatcatgagctatctcttgggcaacaacttcaagtggatctgataaacccttgtgcttctgcaaacattatgaaccgaaatcaaacaacgtatctcaaaaggctaaagcttttcctactaaaatcaatagagaaacaatggaaactcaattatccatacttgcaagcggctatgaacactcaacatgaaatcatggaaatgtatcctctgcttcttccaagtacaaggcctaatgaaacaagagaattgtcatgaaaccgcaatgctcgaaaaaaaaggataagaatttgatcatacaaacttacagttgatcaaagaataagtccatcaacatggtttttcctgtacctacacctccataaaggtataatcctttgacgggtgagtaagaagtctgtggcatgagccgagaccaaaaccaacgacttctgtattacacaaaaacacagttgtgtgagactcaagttctcaatcctaaacagagaaggaaaggtgtcaaggctaagagaacagaacaatcaccttgaggatttatcagaagtattataccgatctaaacgacatgtatctactgaatccacaagctcatcatatagtctctgaagctctctcaatgcactaatctacaacatttcaaacacaaccttaagccgcaagtaacacgaatcacatttaatcttatagctcaaaagcttcaatgaagtaaaaaagagtggctattatttttatcatacttggcagatatcaccagtcatgagttcaccattactgattcttctctcatactcaacaagaggacctgttctattcacatctgtcatcattcaacaaatatcagcaaaccaataaacacgaactctgagattgatagaatttctttgcaaagagaaacaaaacctgagacggtgaccctagtagtagcaggatcagctgcttctactgcttctgctgataagcctctaaagatacttgaccttgaatacaaacttgaattatcagtgtttgtattcagcagagcttgattttgattgacaccgatcaaaagtttgcggcttttggagtagaaagttgaagaataacgttcttgattgttccttagagcccatctaattctactgagagatgataacctaatgattggtctcatctacgatcaatgcaaattcaattcagcagctgaaactttgagatacggaaacagagcaagaacaataacccaagaagaaaaacagaatctttgtatgagagaaatcggatccggataagaattagagcacaagaggaaaaagtgaatgagaatattgaaaagttaagtttgatgtttatatgtaatgacgatgataaatctggataagagagatagagagagacccaagaataaacggagatgtagtcaaataaggaagatagagaagaagatctttaactgttaaactcttaaaacagagagatagaggcgtgattaatgagttatttatcaactaagacacgttttttatttttttatttttatatactttcaattttttaaccaaaattgattgtgttgtacttctaattacatttgttaatgttgattgcatagttgttttccaggtcattagaggattgtatttgtcccttatttaagagagttgactatttttattcctatgaaaaaagtaatttcttgatatatctttaccctaatgatgtctacaagtcaaattacaaattttataaacaatttttaacatttgtaattatagtatagaatattggaaacggaagcttctcgatgttgcgtttgcgtacaggatactggtggacctagcgaatgtgtcccatacataggctaagcatattccaagtgggagagagatacgtgaatcagacatggtccttaaagatgatccaacggtctataatttttctagttttgttctcaatgggtaagttgaacaatggaccttaatgatgacatgttgcattgcgtatgattccacgtgtccacgtcatttcttacactgcaaacatgtctttttctgaccaacccctaacgctacttttctttgatacatctttgtttttgctataatggtgcttgttgacaaaataatactatgttgaattgacctaaaaccatactcagattgggatatccgagaaccattgtgtaagacgtgatgtttgatccaaatatgggctacactcaaatattggatataggcccacaagatatgatatcttcatttttttttgtctatagaacaacataaaacagggaaaaaaatttacactacttttgttcttgttccgttataaatatcgttttaccgattgatcatagaaatggtatactttttagtttttggaacagcggtaaaaggttttatgttgatgtcttctccgagcgccggtgattttcacacagaccttgttattggaaaactgaaataatgcagttttctgttgataggccttaagatgtcagattttatgggccttttaggttgttctggcccatttagatagaactgtttcagttttccaacaacaactgataaggatagacgaaagcccaaattaagaatctttgtcctaaacccaaggaaaagcgtaattacgacacgcagccaaacaaaacatttcctgcgtgaaaaaagtatttgagaaaagaggacgacaaaaaggtacaggtgtcaatatataattggattaaacaagcttagacacctaaaagttttctctcacaccatttgtgaagatccaaagcaaaagaagaattacagaaactgaaaaaactatcttcctcgtctctttgatcattctcttttaactcatg

SEQ ID NO: 28969 - DNA, 3000 bp, Unknown
  misc_feature (1)..( 3000): 2750-1469P.txt file - cDNA_ID_2999480; gDNA_ID_2926198; Annot_ID_141366
attttgtcataagttttatcaaaccatgtgtgcgaataacatattatgaaagttaattagggcatttatgtaatatatatgtgaaacaaagtacacagatgcatgcatgatgtaaatggatcattgatataatgtgacataaaaaaacaaggtaattggttacaaagcatctcgatgcttacctcatcttgctcaacctaattcggcattttttgccactttcaactccgtacttctttatggtttgtgacattttaatgttgtcattcactaacattttcggtgaacacaagattcattttctttataaaaagccatacaaaatttccaataacacttgttttttgtagtcaagacctttttcttttccttattgactacgagtttgagtgcaccgttacgcacgatgcaaatgggcaatgcatgattgattatttattagtaagtacattttaacaaaaacttaaattcattttctagcatatttaccgaaaactttatcaaaaaacatacattcgaaacgtgggggtcatgaatgttcttgcagtaaagtaagatgtgattgaaagggaaaaagatagaaaagtaataaaataagataaaaagacaaagatgtaattattagacccttcaattaaattaatacgaaagtaggaggaggtgggccaaaataatgacaaagaaattagaaaggcgaaaaaggaaagaaatcaaaagtatagggacttatcataaataatgtaacaacacaacctcatcagggcaagtgtgtggattcacctatttcaggcatttgttacttgttgcaagtttctcttcgtatcactatctcatgttgtttcgttttgacatatttatacaataatttctttatatgcgaatcattaaatatcattatcattaaagttcaaatttaggtagggagatatcaaatatcaaatttcatcttatggtgaaatactgttttcattaagatggatttctttagagaagaagacaaaagaggaaagaggatgaagctattttagagtgcatcagtcctctagcctgtcactggtagtcctactacattacatcaatgttctccaatttgttttataaaatataaattatttttttacacataataaaattagaaaattattgaatgtaaacccaagtcgattttggtcaattcatcgtccatgtacaatatgcagatgtttctttttaaaaatctttatatataacttctatgtaaatttttttttaccccttctgtaccatttgctcttatcatagtttagcttaccgtttaaccaatccattttaatagaaataatagatctatcatgccggtaaaaattaccaaaaaatattgggtttagttgttaactaaggccctgtttgtttgatcagttagcatttgcattctaatgatccatttacatgattcatttgaatggtttatttgaatatgtttgtttgattatttgatattttttctaaatgatgcatttaaatgaatatttttttatttgattattttgtaattcatccacattttcatttagataaaaataactaaaatactcatgctttcactttgacaaatgaaagtattttacggttttggcgggaaaaatgattctacggttttggcgggaaaacaaaattttgcggttttagcgggaaaacaaaattttgcagttttagcgggaaaacataattttgcggttttggcgggaaaacatgattttacggttttgacggaaaaacatgattttgcggttttgacgggaaaaataattttacggttttggcgggaaaacatgattttacggttttggcgggaaaacatgattttgcggttttggcggaaaaaataattttacggttttcgcgggaaaacaaaattttgcggttttggcgggaaagtatgaatttaacgttttggcgagaaaaatgattttatggtttttgcggagaaaatgaatttacaattttgacgtaaaataatagtccgcgatttcatgattcttagaatgtttttttggtttaatatgtaattaaaatttttatattaaattagaaagttatagaaaattaacattattaaaagagggtatatttgtcatttgttgtttttgagtaaaccatctccattcaaatggtcctatcaagtctatccaaatgagtttcataattttgcttaatttttaaaaatcattgagatggatcatccaactgattcatccaaatggtctcttaaattgtcaaaagcaaacatcatttttcatctccatctaaataatccatctggatgaagaaacaaacaggccctaagtatcgtaattatataccgctttttttttttttgcgttttacatctattaaattttttgtactgttttaaaacttagtctaatttagttttaaaatttatatgtaatttagtctaatttagttttatatctattaatcggacttattaagactaaattagaaaaacatatatggttccaaatatacaaaaaaattggcattaagaagaacaaaaaagacaaagaaaaagagtgagagagagactggagtagaccagcatccaccatcccgggtccgacagtccgtatcagcatcccctgattcactctctacaaatgtcactctcttgcctctctctccctctcatttaaacgtttttcggcttaaaccttttctcagcaacaaactcatctcctctgagagagactgtttgtttgagaagaagacgaacgtaaagacttgtttactaaacccgagatttctttctttcttgttttcaaaataaaaaagcagagatctcttctccttcttcttctttttgctttgtttgcttttgctttctcttctttttctatgtgtgtttgtggtcactaccccgaaaaaaaataaagtaatgctgtctctcttctcttcaaaattattgttaacctctcgtaactaaaatcttccatggtagtagtaacaaagaagaccatg

SEQ ID NO: 28970 - DNA, 3000 bp, Unknown; identical to SEQ ID NO: 7066
  misc_feature (1)..( 3000): 2750-1469P.txt file - cDNA_ID_2999484; gDNA_ID_1621125; Annot_ID_172246

SEQ ID NO: 28971 - DNA, 3003 bp, Unknown
  misc_feature (1)..( 3003): 2750-1469P.txt file - cDNA_ID_2999484; gDNA_ID_2926198; Annot_ID_141367
ttttttttgttctttattcgtttcgtctgagagaagcctcctttgtgcctgtaaaccttttttctctctctttctagttctctctaacccttaccttcttttctctttcataattttgcatgtctgtctaattaaatacgactgtaataaaatttctaatttagtaaaacaaaattatttttagtgttaagcaattaaaaattcagcagttttacaatagttaaataaataagctagttatttaatttagtctagatttgactggaaatgacgttattaatgtatttagtggttttttcatcaataaattactaatttatatatagacgctaaaaatccagcgttatcgctaatgatttgggtgaaaatttgaaagatttggtagtataccactctgtcggtgttccgacagtataattctaacatcagtagaccattgcaatcaagttctcaagtgtttttatctttatattatatgttggtttaaagccggtttgcatccacagtgcagcatgtataccggaccaatattgttatgttaattaacttccagtcactcattgctaaacttcttttgatatgcatacaaacacgttttaacttatgaaatcttgacttccgttttttattcgatttctactaaatcgagacatgatggacaattatttaaatgaagtgatatagacaattaaataattgtatcaatacaagcttgaaaatggtctgaccaaaaacatgtgctccctagtcgaggctcggttttatcgagacaaacaccactaaaccctatactcattttcatattcatattcataaatcataatacgtactatataaaaacacactgattaaaccgaaccgaaactgaaaataattggtaggtgttgattatgctgcagaagagaaagatcgaaaggcctaagagtgacacgtgtacggagatggtatgaagaagctaaaagaatagagatagagaggttgaaagcacgtaggcaatgacttgtgaggtgaaatgacagagcaaaggcaaaacaaaaacaaaagagttacgaatgagacagaatgtctcaggaaacgtcagcttcttctgttttttggctcttcatttcgtaaaaccaattttcttttggaactgtcacggaaagcccacatggtgtgggatgatatgaacctgtccattaatttgaaacttggaaggagaaacaaatcagaagcgtgaaattaggtcacttggttatcaatgattctgttttttgggaaatcttggtgtttgttctcaaattcagatatccattgaaaatagatgatcttcgcctagtaagtattgaaaattatatgattttctaaggaggttagctggttagtgatgggaagcaacttgttagtccttttagctatggactgagacccatattattgggccataatcgaagcccataggaccataatcgaagcccacaagtccacaatattgcttcaattggtgaaagatactgtggattgtagagtgtgtagtagacgtaatcaattttctacaatagtagatgtgtacgtaactggacgagtttctggactatattcgaatttcatctttgtagtttgtttatatacttggaccaaaaaagattataactaattaaaaaacagcggaattgacaaatgagaacaccctccttgaaacggcgaagaaatagtcaaatgtgcgatacttattttttgtaaaccttaaagattttgttttttctttttgataatgaccagttcccacaaaaacaggtaagttaaatcaaccatgtgcatactgcaagaagataacatctctatatagttgcgcaagaatataaaaaccggcgttatttacgagttacagttttctaacagatttggtgaataacaaggtttattaattgtagatatctatatatatatatatatatatatatatattgaagtatgtatgtgttatatattgcataaatacattcaagatagttatttatttaattaaaaacggtaaaatatagattttatcaaatgacatatttttagtttaaatatggtacaattaattttaagatttactggcacatcaaatgatcaaaatgtggttgataattgtgttgattattgttattgataaaaccattttcttttcaattaaacaggtgtggtttggacgaatcctaatcatcttagaagaataagacgattttttttttgccccagacgattaaaacatatcttatgattggcagccacacatatgcactttttagtgagatatgatattacgaaatgctagtttacgtatagtttctaaaatacaaatttcacgcactaaactacggacacctagttaagaaataattattgatatgatgtatgatagtatttaaactatataataaaatacaaaaatcaaaactattattttttaaaaaaaaagaatcacatagtgtaaatactcatgtatttttctttagtcatcacaaaatttacttctctagatttttaaaaaagttttgagctattaaaagcatttatatcgtgtagagacataaaagtatatcaataataaaaaaataatatatatttctaatttaattatgaaatacttactacttaatttcttttgacaagtgattccattatttgtttattgtttgtctacaaatgatatccatgttcaaactgtgtcaatcattcagaatagagtcaacaacggttgccgtccacggtccactccggcctctaaacttttttttttttttaagagcctctaaacttttttttctgaagtaaacaacaaaattaaaactataatatatacaaaactgttacataaaacgtggaaaattaaaaaaccagtaggtaggtcgaccaaatcaaatctcatataaatacatacatacatacgtctttattctccactgctctatttctcaatctctctcctaaatcaatcaatctttgtattttcatttagccagaacaaaaaaaatg

SEQ ID NO: 28972 - DNA, 3003 bp, Unknown; identical to SEQ ID NO: 28971
  misc_feature (1)..( 3003): 2750-1469P.txt file - cDNA_ID_2999484; gDNA_ID_2926198; Annot_ID_201605

SEQ ID NO: 28973 - DNA, 3000 bp, Unknown; identical to SEQ ID NO: 7064
  misc_feature (1)..( 3000): 2750-1469P.txt file - cDNA_ID_2999487; gDNA_ID_1621125; Annot_ID_172244

SEQ ID NO: 28974 - DNA, 1118 bp, Unknown; identical to SEQ ID NO: 141
  misc_feature (1)..( 1118): 2750-1469P.txt file - cDNA_ID_2999487; gDNA_ID_3219; Annot_ID_146163
  misc_feature (336)..(336): n is a, c, g, or t

SEQ ID NO: 28975 - DNA, 3003 bp, Unknown
  misc_feature (1)..( 3003): 2750-1469P.txt file - cDNA_ID_2999487; gDNA_ID_2926198; Annot_ID_141369
caatgcatgaccgaatattttttgtataataggtgacaattaagctattgatcattcacataaatattgtacataacactcttttagttataaatttatcatgctaatgcaacactcaatacctagactatataattaactaacagagagagatgggagaaatctgtttcatctacatttttaccgcctttccatttcccaatctattaatgtagtgataaaatgcatctttccatttttttttttttttgacgtccatcaatgatcaaatccctttacgattgcgattcacaaagaatcaatgccaaaatacacgtcgcaaattcgtaatgatatagtataatgcccaaaaaacacgtgagtaaataagattaaaccaactgtaatgtctaatcacatatcttgtaatttaaaccggtataataatactaaaccgggaaaacctaattgttgtcttgcattttccctctatggctcaaggtataattaaaatggatatcagttagatgcatactgcatacgtttttaacatttcgaatccataaattcagttgttgcgataatccaaaactaatttgctcagtacacggaccaaaccaaaaaccggttcttttagaccaaaccgaaattgtctactcctagtcctcctgcatatatgccccaacacatctctcaatcctctcatcgtcaataatatctttatatgacaatggtgaagcagataagaagatacgctctatttcaagccacgccagattctgagttcgtgaaggagatgtacggaggctacttcaacgtattcgtgtcggctttcggagacgaaggagagcaatgggatcttttccgtgtgatcgacggcgagtttcctcgcgacgaagatcttgagaagtatgagggattcgtcattagtgggagtttacatgacgctttcacagaagaggattggatcattgagctttgctctgtttgcaaaaaacttgatgtgatgaagaagaaaattcttggcatatgctttggtcaccaggtttgatattattatcatccaacgttttcttcttcttctatcatttaaaatatatcatacttgtataattttttaattacttaccactaggtaaaatctttacataaaagtgcatgttttttctttcgtaatttctctttttaaaattcgatgtacataactgttttgcctaacttcataagctatgttgtagactagcgttagactagatgaatctagttctattcaaagtaataaattttaaattataaaagcatactgcataattgaattagaatcatcatgccatattcataacatatcgcatgctatatcattttcaagttttttttttcaagttataatgcagtattgcatgctatatcattttcaaattaaattttgcgtggaatatatatatatatatatatatattgaggataataatcatcaaacatcatgttttataacttgaaaatgagatagcatgcaatatgtaatgaatatggaaaagatttaggctgtgtaatgaacatgtaaattttaattttctagtcagatattattattatagacagaaagtaattaaagaagaaaaacataattttttgttgttgttgtaaaatgatatatttgggtaaaagatattagattaagtacactgttatatactttataaattctttatatgagtacgaataaatgtacttatcaaagaaataactaatgtatgtgtgtatggattagtttcatctacacatggtggttaataatcctgaaaacaatatatatacctagcttacgtttttttttcttgttttggatttagatcatatgtagagtaagaggtgggaaagtgggaagggctcgtaaaggaccagacataggcctcggtaacataacgatcgttcaagatgtgatcaaaccgggtgattacttcgatcaaatcgagtcattgtcgatcatacaatgtcatcgagacgaagtacttgagcctccagagtcggctagagtcataggattctcagacaaatgcgacgttgagatattctcagtggaagatcacttgctttgctttcaaggtcatcccgagtataacaaagagattctccttgagatcattgatcgtgtccacaagatcaaatttgttgaggttcgttttaaacgtctatctttggttttattaatcctattatgtatagattggtcggtcttctaatgtcccaacccttgggagattattccgctacgtacccaatttaaattccgttgttcaggatatatatatatatatgtagccagggtgaggaatctctaaaacgattttttaaactaaaaaatatgtaggaggaaattttggagaaagcaaaggattcgatcaagaagtttgaaccagacacgcagcgtttgcacatgctttgcaagaattttctgaaaggacgaagaacccactaattggtttagtttccacgttcatggtctaaataaattctactacgtttgtgtaatttcataactattatatggtcatggtcatcacataatgtaacatatcttcgcttttaactaaattaccgactgctataagaaataataataataaattaccgataaacaaaaagaagaagactggtatttgtaattttaatttagtcatttataagtgggtataggttacgtgtataaatagattatttgatcttcaaaaaatacacgtaaaatcgagctacggtaaacaaataaatgtgattctaaacttagataaattattaggtggagttgtcatcttatagacagctaatctcgatgtgtgattctttttttttcaactaatttttgactattttttttctgttttctttatttaacaaaaatctcacttggcgtgtctgatcttgttccccgtcgtcgtctctaacttacacatttccattctccgaatctctatctctccttttgcttcatcggtgtgatctctgagacgaaagaagaagaagatg

SEQ ID NO: 28976 - DNA, 3003 bp, Unknown; identical to SEQ ID NO: 28975
  misc_feature (1)..( 3003): 2750-1469P.txt file - cDNA_ID_2999487; gDNA_ID_2926198; Annot_ID_201607

SEQ ID NO: 28977 - DNA, 3000 bp, Unknown
  misc_feature (1)..( 3000): 2750-1469P.txt file - cDNA_ID_2999491; gDNA_ID_2926198; Annot_ID_141375
ctcggcggcgtaagatagagagcgttctgtacaatgcctgatccgaatctctgtgagacctccttcactccgatcaacaacagatcggagaaatgaatcgactttatcctcaaactcgggagtccaccagttgatcgactcagggaacgacagaaaccgagtttcgaggtcgaagatggtgtttagtgtcgggtcatagcatgcgttcatccagttcttgctgaccagcatcggtccaatccatctttgttcctggcttagccgtgagaagatgtcaagaagacattctcgagtcaactcagaccagtcagggtagagtcccgatcccatctccacctttccttccccgccgttgacttccataggattgaagaacgcttcgtcgttttgagtacgaatagacttgaaatgttgagacttttttttatcgtcaatggaataaatgtagtcaatggaaacaaaaatgctgagactttttcagcttctataatcaagcatgctctttacctattacaaaacagagcttttttttattggtcattagtaacctttccaattttgatatccagtttatattaatgttctgtcagtttgaagttggagcaaaacggttctgctcctcgactttgattaagagaatgagtaagaacatccaacaacaaatgagattccctaattaccaaattggattaaaaggataatgtagtcacttatgacaagagttattattcaaaggttttcctatgttggacatatggaagtaatgactttctaagtcatcaaatcaaatcttatatctatatacttgtataagcatatgtgcatattgggacgacaaatcattatctcaaatcctatttcatactaaacaccctaaacacttaaagccactggatcttgccatgtaaccttcctcttcactgctctatttaactctttctccacatctccgcaaatgggtaactttctttcaacatgtagatcactgatcctgttatcaagcattgcattcttcattgcttccgcgaccatatgttcaccattcacttccggctcctcttcttctctctacaaccaaaacacaaatcaaactaataaagttctatagactctaccaaaaggaagacactaaaataacacaagttgtttggctttaccgagatctggtttaggtcaaagccagggactttgtcagtgccagaagtgtttccctctccgttaaggtcaggaagtgaaacggggaatgtcaaaacatcgcttcctctgctcctttttcgcttcttatccaagtcacaacttgcaacattattagccaatgcttccttctcattgcaaattgtattcttcagtttcaaatcaaaacatggtacagatgctctcacaccagactgcttctttctttcgccacttggtttccttgggacctctaaacccccggattctgacaatctcaacatctctggagaggtttcaagagtttgatcttgcttcaagtgctcgtatctacgtctcaagaacctatcgtttgatcatcaaaaactcaataagctaatgaatgtacaaaagcttggatcatgtaagttaatacacgctaaacacgtaaattgacaagaagatcagagatcatacctaacttctgacttgagggtcaatctcttttgtttaatcatctccaatctctttctctttatctctaattcctgagaaaacgagataaggaaacaaatttcaaaactttacttcttccctatgacttcacttagaatcaagcgaacaattccaaacccaaagtcatgacaaaacatcatgatcacccaaaccagcagatccagaggaaatcgaaacaaataagaaacccagaaatttcaaacttaaaaccctaacgaaaaagcaattaccttttccaactccagaacctgcacaaaggttaatctgatcatgggatcgccaccggaagcagaggaaacgaaattagtcttcttcatcggatccgttcagtgaatttaggaatcgcagattggaaagacagcaagcaagcgagaaagagggaggtgtgaaggagaaagaaggaagcgaaggtaaaggggatgattaggttttaatggtgagagtcttattccatgtatgaaaccctctgaccaaaagacttaagaaaccacataattgattgattttcctttgggtgcccattacaaacaaaattgatattgaaaaaattaaaaattttggattttccttttctcttctttttgtgtgtgagaagtctatgagacaagtagcagaaaactaggactagtgatcaaagatggtaaagagaggaaagaaagaaagaaaaagttttgattttttctcatttctttctttctttttcacttattatttctatgtgtgtccttttggaagttgcagaaggggtattgaaatgctgaccacttaacccaaaaaaaaggttcttccttttattgtgtttgttgatgattgggttcatgtctttgtgaggtgggtttgataaattgtaaagaatttgaattaaaaagcacatctgggttattgaagagatgaaagagttaatattgttggatatgtatgtaaagaaattggggtatagagagaaagagagcaaaaaaaaataagagtttggttgagacaaacagtgaaacaggagaagaagcaactatggagatttgacaagagagatgattggtgactggtgtgtataatgtgtgtatatatgatgtacttttatttattcttttagtcaaatacatgtttttgcataattctcaatttctcatattattattggacccaaatcctgtgaaaataatctcttctttgggctttttctcatataagcatcaattttaaaagcccattaaacccaattaagggatcctcaagcttttccacgtggcacaatcttattagtctttaagaaacatatctcgttctttctgtttatcttgtcgaagcacacttctctgtttcaggagaacaatg

SEQ ID NO: 28978 - DNA, 229 bp, Unknown; identical to SEQ ID NO: 8297
  misc_feature (1)..( 229): 2750-1469P.txt file - cDNA_ID_2999495; gDNA_ID_1971712; Annot_ID_175114

SEQ ID NO: 28979 - DNA, 3003 bp, Unknown
  misc_feature (1)..( 3003): 2750-1469P.txt file - cDNA_ID_2999495; gDNA_ID_2926199; Annot_ID_141420
ctgaaccatgtccatgaagaccgtatgcgttaatcattgagctccatgacacaagatctttctcagtaagttcataaaatacttcacgcgctgcagaaagactgccacactttgcatacatatctatgagggcgtttcccaataagatatgtgacatgaagccacatttcaggatttgagaatggactgtagatgcaaaactcaacaatgtcgaattggtacaagctgagacaattgccaatagagtaaccgagttggcttcaattccttcttttctcatttgatttaacagattcataacttcagagcaatctccagtctccgcatagccgctaatcattgaactccacattacaacatctctcacttttgatgtttcgaaaagaaccctagagagacttacattaccacatctgcagtacatggtcataaaagcagctgttaaccgctcgtcagcatggcatccatgacgaaaagaaaatccatgaatctccttcaccagacttgagccataattcaattctacacatgcaggtaaaacagacaacagtgtgacacgattgggcctcaagttttctctctgcattgctcgaaacaaatcaacgcccatttcataattctgatttgcaacacaaccggagatcatggcagtccatgagacctcattcttcacctccatctgatcaaacacatggaaagccgccgcatgatcatcaaactttaagtacatatcaaccaaagccgttgataatagaactgattcctgcatcctctcatcaacaagaacaagagcatgaaacattcttgctaccttactgctgcttcccatgcgagtgcagagagccaatagagatgcaaccagctcggacttgggaataaaaccataaaaatacatctccttaatcaacttcatcgcttcatacaacaacccatcctggcaacaactattgatgatggaacaatagctaactgtatctctgtgaagcatttcatcgaataccttacgtacagcatattttctcgagaatttcgcatacatagagatgagagaattggaaacaactgtatcacaatctgcacctgctttgagacaaaggcaatgaagctgtgcgccaagtaagaaaggctcttgttgaaaagcgcaagctttgatgacagaaggaagaatagctgtgaagccattggtccctaaagaatgaatctttagcttgtacagtctcaatgcttcatcgtagaattggtccgacaccaaacccttcagcttattgccgagctccaagtttaagcgggaagacaacgcccttgacattataacacgacggcctagtttaacccatctcatcggacgggtaataatgacgtgcccactatgactgtattatctttgagaaatagtttgtgtttgattcagtaaacaaaaagcacccatggcctaatggataaggcgcttgacttctaatcaagcgattgtgggttcgagtcccactgggtgtgtatttaataaatacaatttaatctttttcaaccttattatattcaattttttgtttgttaatattcaatttaaagcccaataaagttggaagatggtgggctagtaatgggtcgaggtttttgaatacagaagcacgtggagatcacgtgcgttgacgtcaaggtgtggctgtaccggtggatctcgaattcctcccctttggcttctcgaaggagaagaaaagtgtcggagagaaagaagaagccaatcatcatcgccagttgttcttctcttcgagatattcaaatcctccgtctctagagaatttcatatcaagagaatcaggcaagtgggcgattctctgatcccgagtcaaaccatttctggcttctcaagtctcctcaggttctgatgaatagattgtttgattttgcagtggtttctgtagtttgtggtggtggtggttggaaggtaagataggatatggcgcaggagcaggaaggagcggtcgttgagaaaggtgagccgaatgattcctccgccgctgccgtggccgcaaccgcaaccgcaaccgccgatagcgtgaagaagaagcaaaatggattcttttcgcgtttgtggaatgggatatttagggttagaggtgacgatttcgagaagagacttcaatacatctcaagggaagaagctactgttttatcaaggatgaagcgtagatcgatttcatggaggaaactcaccagaaatctcatcgtttcctctgtattattcgaggtcagcaacacaattgattgtgaaatttgaatgtttgagcttagtagattgcgatgatgtggtaaatttgttacctttttagataattgctgtgggttatgcgatcctgacaaccagaacggaagatttggattggagaatgaggagtttccggatcttgccaatgtttatcttacctgctgtttctgctcttgcttattcctcaatcgtcagcttctcaaagatgtgtgagtcttgtgtttatatgctcatttcatgttaagatgttggtgtgttctcgtagcttctctgtttctaattctgtgtaaaaatggttgtatagttgaccgcagagatcaaaagaccttggaaaagcttcgagctgaaaggttggcgaaaatcaatgaacttaaagaaaggaccaattattataccacacaacaacttattcaggtgagattactagtcttgagaacacagagaatttgtggtaattccgtttatgacaagtactgattcttccaacggttatcatttatagttactggatagtgagtgactatgttttcgaagattgttgtccatattttgggataatagcaattatgaatagaaagttggaatcttagtctgacatggcagttggaattcattgtatttaatgccaacagagacatgcatctatgcctgtatatagcaatagaaatacataaagtggttttcttaagtatgtctcgtaggcgtggcatagccatgcaacgaaagagagatcaatg

SEQ ID NO: 28980 - DNA, 3003 bp, Unknown
  misc_feature (1)..( 3003): 2750-1469P.txt file - cDNA_ID_2999499; gDNA_ID_2926199; Annot_ID_141421
ggtgagccgaatgattcctccgccgctgccgtggccgcaaccgcaaccgcaaccgccgatagcgtgaagaagaagcaaaatggattcttttcgcgtttgtggaatgggatatttagggttagaggtgacgatttcgagaagagacttcaatacatctcaagggaagaagctactgttttatcaaggatgaagcgtagatcgatttcatggaggaaactcaccagaaatctcatcgtttcctctgtattattcgaggtcagcaacacaattgattgtgaaatttgaatgtttgagcttagtagattgcgatgatgtggtaaatttgttacctttttagataattgctgtgggttatgcgatcctgacaaccagaacggaagatttggattggagaatgaggagtttccggatcttgccaatgtttatcttacctgctgtttctgctcttgcttattcctcaatcgtcagcttctcaaagatgtgtgagtcttgtgtttatatgctcatttcatgttaagatgttggtgtgttctcgtagcttctctgtttctaattctgtgtaaaaatggttgtatagttgaccgcagagatcaaaagaccttggaaaagcttcgagctgaaaggttggcgaaaatcaatgaacttaaagaaaggaccaattattataccacacaacaacttattcaggtgagattactagtcttgagaacacagagaatttgtggtaattccgtttatgacaagtactgattcttccaacggttatcatttatagttactggatagtgagtgactatgttttcgaagattgttgtccatattttgggataatagcaattatgaatagaaagttggaatcttagtctgacatggcagttggaattcattgtatttaatgccaacagagacatgcatctatgcctgtatatagcaatagaaatacataaagtggttttcttaagtatgtctcgtaggcgtggcatagccatgcaacgaaagagagatcaatgtttgccgacttgaagaggttaactactgcatgtagagctggtgctaacagaattgttttgatgcagagatatgacccggacccagctgcaaaggcagctgccgcaactgtcctggcatccaaattgggtgccgattcaggcttgaaagtatatttaggagatgaatcccaactcgatccatcctcgggcaagagcaatgacatggaggttaaccaatcacgtgggttgaggaatcgaaggcaaccaaatacaagaccccacggttctgggagcacttcaacacatcattctgatgatgagtctcaccattctggaacaagcgagagatttccaggcaccacagagcaaaaccagcagatgttggttgagcattacagccctcagggatatgctgctcatgatggcagttggatctcacgcattgcggctctacttgtgggcgaagatcccacacaatcatatgcgctcatttgtggaaactgtcgtatgcacaatggtgaatgaatgtttaagcaaatcctttacctgaatctttcaactatatacttatttctaacataattttgcaatatgctttgtaaatgcaggacttgctcggaaagaggattttgcttacattacatactattgccctcactgtaatgctctgaacaaaccgaagcattcagaggagaatgtacttcttcctgctatttccgcttcaccaatcacagactctctgccactgattgagaccagcgaagtggttaatagcagcagctcgagtagtgaacgtggaagtagccccactccagaaataaaagaggaagctgcaattactgagaccgggacaccgagctgaggaagatccagtgagctaagaagaaggcttagtcgtgttggtgctacagagaagagattttgtgtgtgcatgtgtgtttgtggatgcgagtactcattcaggtaatcttatgctatggattgctaatatatgaaggtgcttacagttttgattctggtttgtttctatacaacaagacaatagggttttggtgggtaaatatgcgattctactgtcgtaaacgacgattgttatacgttttgggggtttgaattctaattatcttttaccattacagattgtctctgtttctgttaaatgtattcactcttggatgatggatcattcccttttcgattttagcactacgagcctacacctttcttattaatcttcttcaatattcaatttattggatagcgtttttttatacctaactctgctttttcattgtttttttttttgttgtattttactagttcatgatatgaatatgacttttgcgatagtagatttttaaaattatctttagtaaattaattaccaaaattgtttgcaaaacacgtgatgatctacactttaaagactttgaaatatattttaaactggtaaaaaagatgctttccgccataaagttgatctcatcaagaaacacaaagagaggtagcaattaaaatattcaaagatgaagagcattattagcacgagcaactcttttcctctgtctccacttacaaaggaacaaaacttgatctgctttatagtaaagaacaaaactcaggaagttcaaatttgcttgggcagagaaccatgagctacaaaaatacaaataactctcacttgattctcttcaagctgttacttcttctgatcctttattctgcagatctcacagcttcaagctcatgtcgaagtgaatgtggaggatgcaaatgtggaggaattgcgatcccatacccttttggaatcggtaagggctgctatctcgagaagtcatacgaaatcgaatgtcttaatacttcaggaaagcttgtcccctttctttctgtaattagcaaagaagttgttagtatccatcttcctggtaggcaatcctttgggtcagttcgtgtcagaagtccgataacatccgcaggatgttctagtgatggaaaagactccgcaccagtaatg

SEQ ID NO: 28981 - DNA, 3003 bp, Unknown
  misc_feature (1)..( 3003): 2750-1469P.txt file - cDNA_ID_2999503; gDNA_ID_2926199; Annot_ID_141422
cataaacaaccttgtgggagttggttgcagcagcaaggtgtcgttggagcatataaagcaaaacatggtgggatgtgagttgaactgcagtacgactaacgcgtcggatagcaacagcatccctttcttcgacaaaacggggtgctctttttcttatactttcgcccaggtttgtacaggaaacaaaccggaagatatgggatgcgatggtaggggatgttgtcaagcgagtctacctagagagcctcaacaagttattggtatcagaatagagagcaatgatggaaagtcaacaacaagtggagactgtagagtcgccttcttaactgatgaattcttcagtttgtcgaagctgaccaaaccagaacagttacatgctaagagatatgctacattaagtctaggatggataatgcagacgaggaatacttccttcgtcaactccttggcctgcaaaatcagaaaagacacggacactgcttactctaatgaccagagtataaagtgtatatgcgactacaccatgagcatcatttctgatattaggtatgccaattgtgaatgcaacctaggttacaaaggtaacccatatgattcggacggatgtagaggtcagtattatgttctttccttatgccctcctctttttttgtgtgtggaagcaagcatcctttctagagaagtttctttcatcgtttgactatcgtattttcatctttcaattatagatattgatgaatgtaaagagaatcccaaatattgtaaagaaacagacacttgtgtgaatttcgagggaggctatcgctgtgtgggcgataagactaaagcaataatgataggtaggtcactgatttttgttccacaaatttagagcttttaaaaagcaagtgatgatcaacctataatattcttgtgcggtttggcaggggcgggtactggttttggggtcttagtcctagttggtggagtatggtggttgagaaagtttctagtgaagagaaggatggcaaagaggaagaagaagttcttcaaacgtaatggaggactactgttgcaacaagaattgaatacaagacaaggcgttgtcgaaaaagcaagaatcttcacctcgaaagagctagagaaagccactgaaaacttcagcgaaaacagagttcttggacatggtggtcaaggtactgtgtacaaaggtatgcttgtagatggtagaaccgttgcagtcaagaaatcaaaagttatagatgaagacaaacttcaagagttcatcaatgaggtcgtgattctctcccagataaaccatagacatgtagtcaaactcttgggatgttgtcttgagacagaagttcctattctggtttacgagtttatcatcaacggaaacctctttaagcatatccacgaagaagaagctgatgattacactatgatatggggaatgcgtctacgcattgctgtggatattgcaggagctctttcttatcttcattctgctgcatcttctccaatttatcatagagacatcaagtcaacaaatatattactagacgaaaagtaccgagccaaggtggctgattttggaacatcaaggtcagtaaccatagatcaaactcattggacaacggttatttcaggtacggttgggtatgtggatccagagtattaccggtccagccaatatactgaaaagagtgatgtttatagctttggagtcattctagcggaacttatcactggagataagcctgtcataatggtacaaaacactcaagaaataatagccttggcagagcatttcagagttgccatgaaagagagaagactttctgacatcatggatgctagaataagagatgatagcaaaccggaacaagtgatggcagtagcaaatctggcaatgaagtgtttgagttctagaggaaggaatcgtccgaatatgagagaagtttttacagagttggaaaggatttgtacgtctccggaagattcacaggtgcagaaccggattgacgaagaagaagaagaagatggagtagaagaagaagaagaagttgtgacaatagtacacagaggagattcttggagcattggtgttactgctccagcctcaagtattgtggcttcacctccatcttcagatgttgaaccattgaatcctcttctcacatggtgacactcaatcagatcttaaagtaatgatgatgaatgaatttgatgtatctcgttagaaatgttttctgtaataaatttgagtagttgttagtctgtgtttcccgcttaagaacgtttgttgtgtgtttattattcctaacgttcacctttgtgcctcaccgatcacagactctctgccattgattgaaaccagcatagtggttaatagcagctgtcgagtagtgaacgtggaaatagccccactctagaaataaacagaggaagctgcgactgctgcgaccggtactcgttcagataatctgtttttgctaacgtagtcactcttgaatttggatcattttcgattttaattctaggagcctaaagtttcctcgtgtttttctcgtgttagtttattttattcagaaatgaataaagttagttatggacggtgtttttatacccaactctgcttttcaagtttttattttttatttttttgtattatacgatttcatgatgatatgaatatgacttttgcaagaaactgcatttttgccagagtagtttttttatctttcttctgtaatcaattaccaacaatgtctttccaaaaagaattgatgatctccactttacagactttcaacaatatttaaaccagtaaaagagaagctttccgccatataattgatctgatcaagaaacacaaagagaggtatcaataaaatatccaaagatgaagaccattagcacaaggaatcttatcctctgtctccacttacaaaggccatctgctttatagttaatacaattaactcaggaagatcaactttgctctagtagagaaacatg

SEQ ID NO: 28982 - DNA, 3000 bp, Unknown; identical to SEQ ID NO: 8301
  misc_feature (1)..( 3000): 2750-1469P.txt file - cDNA_ID_2999507; gDNA_ID_2926199; Annot_ID_141423

SEQ ID NO: 28983 - DNA, 3000 bp, Unknown
  misc_feature (1)..( 3000): 2750-1469P.txt file - cDNA_ID_2999515; gDNA_ID_2926199; Annot_ID_141426
ctgaagacaaaagcagcagcaaagaataaagctgaattttttctggcttgatcctgggaacagtcgagaagttcgatagctaatttaacaacttgatgtatgacaaccaatggaagtgcacagacacgctccattataccctgagaaaaaaaaaattgaaggtaagaagaagcaggatttgtactaagtcaacgattgacggtgaaccaaaattgtgttaaagtcatgcaaatttgctgtattattacctgaagagagccaatggtgtataagcaagatgagagaccataaaaagtctcagagacccttggaacagcaagtaattttagtatgccacgccgttcaacaaacattgctgcaaacttccggtgcgcagccaaagcgcaaattaacttcatgacatcaggtaacaaaggagacactgtcgaacgatcatctaactgggatgtacgttccagcagcacaatgcatacatcaacacctttttcatggagtacaggcccgagaacctcaacatattctcccagtatctcaaggcactggatgcaatatttttcttgtaactgagccaatgattcgatatctggaagggaaacttcactaacatccgttgtctgatcagatgtgacacaagtaggatttctgccaccaaccaaatagcagagttaaagccctaaacaactcagagataaataattgataaacagcaacgataatatccacgacatcatagcatgaccaaccttgaaacctctgcggcatctatgactgtaatagctgctcgagtagcagcagacacagcagcttcttcactgccagaagacttgaattcctggataatttaaaagaaaagacaatcaatataaatatcaggtcaccctaatccaccgtttcattagggaaatgaaatcactaacagctaagcaaaaaaagaaaaacatacctccaaagcagcagttttaacaagctctgcagcagcatcgccagctgctttagctgcgtcatcaggagcatgggcagctctagcttcggtttcagcagctccaacggctctctttactagatcagttatgtttttagttcctattatgcaaccttgaaagcactcatcgttatcctctctttctatctccataataccagacttcattttcccaagacatacggtcacgtcttctgcatttctgccatctgaaatttttgatagatccctatctctgacaagtagacgacctaatctaggagatgccaagagaacttctgtatcaggtgcaccttcgtgaacccttcctctcccccttgattttgatcggttcagtctgtgtcttgaagggtcatctctaacactattgtcatctccaggtttaattttacaatcaacaacacctgaaacattaaatacatctctgccatcgatttcgaattcgccatcaggctgtacatcagtttgtcccatctctcttccggagtccgtctcaagaacatggtcaccttcaactgtatccacaatcttacgcaccctacttcgaccttcttctttggtttttaaggagacgtgcttagtctcagttgtgtgtatacggcttgtgcttggctctttaagaactcgtactcgaagataatgcataagcttagcagatagtcctgatgtcaaaacgtcttcaactatttgcccacgacttacatgagtcacacaaaaagaaaatgttacaatttcagctgtgggcgttgcaaaaatgggaagaagagacaacaagttgagaatgtttaatcaatacctcgccagagagagagcaagaagtcctgtagaataagtttttaacatttcaaaatctgaggcttccttcttggcagagtcttcaccaggaaacttgactgcctcttccataacccaatttttaaagttttccgttacagcatcgtcgaaaacatgaggatactgaaaaaaaagaaaaattgcgtcatgagtcaacaaacaagacatccaattaagggtaaagagaaagaaagtagtaaaaaatttaccatccacgtaagcgaacagttcattagcaaccttgcagaggctgcctttactgcggttgagtaagaattctcagatagaaaagtcgacgatatcaattcaaaaaactcatcgttttcctgccaaaaatcaagtaacaaaataagaagaaagaacccacacaagagaaaaaagaacaatctttttttaaataaacttactcggatgagaatacacagcttgccactgttatgactaccacgagcattggagaaatgcccattctcctctaagaacctgcgaatacaagtaagcgtcaaaactaaagacaactacaaaagaaaatcaagaagagagactgattgttgagctagaaaggaacatacagagactcctgagattcgagaagctgactaagagcgtgaaggatattaggattagggttattggcaacggaagtaatatcttccataagcttctgcgccttcgctataagctcgtcttcaacactctgttcttctccttcttcaggattaggttcgccggttgaattcgccaactctgcaatcgcctccgccgcaacaactgattggtcatcctcaaccatcgaattagggacctcggcatgctcttgcccgtccatgatgaatacctctcttttaaaagaaaaacccagaaacggcgatcaattcaaacgttgggatcacggaaaaagaaaaagaaattattgaaagggaaaacgaaaaaagagcttatagttgtagagtaagaaacgcagcagaacaaggagggtggtagatggagacgacaaagctgaaccgactcatactaaaatatgacccgacccgtttctttcactaaacaaaccctaacccatagttttttttaataatgggccttttaaaggcccatagttttactgtcaataactacgacgtcgttttcaattgttccgattaggaacttcctctccggcgactgaactttttctggaaatg

SEQ ID NO: 28984 - DNA, 3003 bp, Unknown
  misc_feature (1)..( 3003): 2750-1469P.txt file - cDNA_ID_2999519; gDNA_ID_2926199; Annot_ID_141427
tggtaacctgaatctagcacagaatgtttcgtatgcgttcaatagctattaccaggtaagtaatcagctcgacagtgcgtgtaagttcccgggtctctctatagtcagtactagggatccttctgttgggagttgcaaattcaagataatgatcaagtcagaagatgctagtgaagcaagtgccatgatgcctataacacgatcaacggcagtgctgctacttctctccatctgtctgtatattgttctgtgaatactgaagaaaatttgatgggtttgattatttctttttttccttttttcttttgcaaaacttttggtgtttatggagaaacagaaactacagtgagatttatgtattacttggtttgatctcttatttctcgagagcagtttggtgttcactgtctctcttatacctctcttgttagtaatcagaaaatgataaaaatctcatctttcactttagctgttaaagcccaacccgaagtttcaaacattacaccttatattagttaagcaggtttgctgcaaaagaggaatccatgaggcttcactgctgtgaatctgtccaccattaacagtctcttaagattgagaaacgattgtgctgtcttagagcatgagaaacgagttacagctgaaccaaaagaaataccaaacccaaagctatagaattgtttgtcgagaaccccaaaatctcccaatatacagtgcccaaacaaccaaattaccagttgcctagcctttctatttacacttgtttaaggtatgtatggaaaggaaattccaatgtatcggatataacatgattaccttggttagcttgcaatcttcaagtcagtgagataaatgaaggagataattggggcggatcttcagtgcctgaatctgtccatttaacaatctttggtaaagactttggagagtttctatgtaatgtggaatagtgttcttggttgcttgagggattaaggttcagtctggtagacaaaaaaggaagcaaagagacatgtgagccagtacgaaaaaatatgacaatggttagaaatggcggagaaaacatcagaagttacctgatccggtggtcgcactgccagttctttaaaagactcagtttgatgcttctggagatatgctcttgatctaatatctgcctgcatatagtaaactgtatacttaacgactcttacttttcacttttcacatatctacaggataactttctgtttgttggtaaatgcatcacttacctgtctaataggttctggaacacggtacttgcaggttatcttgacaacttcaacggcagagtccagtgatatgcgatggccaaccgatacatatatgggctttagagaactcagagttggcctaaatccctgttgaacgtaatatgtaaaacttgatcattaaattcactatcttacacaagattatcaaaaccacaactatggagaagtttcgttgctaaaactgataagtcactactaatataacgcggtattaccaaagagacacaacaactacagtagatgttcagtcaaagtcacttactactccccatgtaattccagagtttcctaccaaagtgatagtttgctcatgctcgtttatttggagctgaagcgactgtttaacctcagattgattcagaccatccacatgatgcagctgaaaatgttacaacatcataaattccacattaacgatcagatggaaaatgcaaggcaaaacaaaaataacatcacaaatttcagagcttgagattctgaagaccgtacattctttccgaccccaatggttggtaggtgagcaagaacacctaaatgacacgccaagccaaatcctatagaagacaattacatctaacaccataattacagagcttgaaatgcaactacaaaacaaaggtaaagttgtgtgtttatacctcgtggatgaagtattccatttccatccaccatcagtacctttgcaagagcaaagcaagagacttttagaagaaaaaaaatcaacgcaaaagcaatggtttaagagtagccaattgcaaactaaagcaacttatagataaaactgaaacctgaggatagaatggatgcttctcatctctcatcttctgcagaatctgcaaaagaaccggagcctgtaacatgaaaaatccaattttgggatctgagatactttagtgaagcaaatgaatttagcagagcattgctcggggacacgaagtagtaggagaaggaaacctcacgaaaggcaagaaatccagggacataaggaacatggaggcggagaagagagaagtcatggtggactacacggagagaaggaagctcaagaacgacgagacaagcgcatgcgacggaagaatcttctttgcaaaagctcatgtctacacctccaacatacttaagtatctccgatccctgagacagttccgttgatgaagataacttccatgtgaagtcatcgtacgcgatcagtttcttcttcagctcatcctgctctctgaaagaagtcaaacaaatcatcaaccgatttgattgtgcggaatgaaactgaaatcaaatgtgaaactactctgtccacttctcgagctgatctccagaagaagaagactcgcttgaagctccttcactatccatttccagaaaaagttcagtcgccggagaggaagttcctaatcggaacaattgaaaacgacgtcgtagttattgacagtaaaactatgggcctttaaaaggcccattattaaaaaaaactatgggttagggtttgtttagtgaaagaaacgggtcgggtcatattttagtatgagtcggttcagctttgtcgtctccatctaccaccctccttgttctgctgcgtttcttactctacaactataagctcttttttcgttttccctttcaataatttctttttctttttccgtgatcccaacgtttgaattgatcgccgtttctgggtttttcttttaaaagagaggtattcatcatg

SEQ ID NO: 28985 - DNA, 3003 bp, Unknown
  misc_feature (1)..( 3003): 2750-1469P.txt file - cDNA_ID_2999526; gDNA_ID_1971819; Annot_ID_58282
acaatacggttcggtctccatctctctctctataaatgctcttcttcccacacatcgcctcctcctcattaagatacatctcgagaagcagagcagagagaaagagattccgagagagagagagaaggagggagagaaggagcttagtggtctcattaccattaccagctccatacgaaccgaaacgacgccgttcgctcaacccttttctctgcaatctctcttcctcccacgagtttctcagcttttctcggatcatctaattaagagaggagatcttgtctcacggtgggattgatttttctcttcacgaagatcgtgttccagggtaaagttttgatttttattcatcttactcattttggttaaagtagcttctgttctcagcgattttctctgtctcgtgtttatgtttattgtagttcaggaaatgttcttactgttctgtttgattatatgattattgcaccaaatctggctagaaaaagtcaatacctttttcccttctttctagaatttgggaacactgtttactagatttttgtctttgttccaaaagtttgttcattcatgtcatttacgggttataactgcaccaccattgctatggaacgcataacctacctagaaaatcttccttgcttttcaaaataaagaaagggagaagatttgattcttttatgaactctgagctgtcctgaagagaacccaatatttgagcttatctgtttacatttaaagaggaagtgacaatagaaacgctggtccatcgtgatttgtcttacttgtttagctcttgtcttgtctttactacatggtgcctttttctggcatttaccatccacaaaatcatgatttgtgtctaaatcttagattttgtctttttttttgtgtgtgtgtatgtacagcaattaactgcagaaaatggtgatgtgggtctttggctatggctctcttgtgtggaacccaggatttcactacgatgagaaagtgttaggtttcatcaagggatataaacgtgtctttgatcttggtaacccttttctgttaagataacagttttggttctttgcgtatttgattgatttatctattcgtcccagctgttgattattgattgattgatttgtgttttgatttgacttggtagcttgcattgatcatagaggtacaccagaacaccctgcaagaacttgcaccctcgagaaagctgaagaagccatatgcgtaagtagctattcttaatatgtgtataggatcttagagtctgttcatgaggcctgcttgttactcacacattattcttttcttactaacattccaatactttcttgacagtggggtactgcattctgtgtccgtggaggaccagaaaaagaacgtctggctatggaggtatgtccttgcatctgaaaactagatcgcttgatgtatcatggtcatgcctttgtgttgatctttctatttgtacacagtacttggaacgtagagagtgtgaatatgatctcaagacaagtgtagacttttacaaggtgagtcaggactcagccgagattattgaataagcctattattccttatgctactaaaaattgacctcaaaagtttcttccttacacaggaagatgatcctctaaagccagctgtaactggagtgatagtgtaagttgtttcctatgacacggatccatcaacagctgttctcacatcgatttttattttcttctacaaatctttgtgttgtgattttgatggatgcatttctttacaatcttcagattcacttctactcctgacaaggtctccaacaagtattatctcggacctgcgccattagaagacatggcaaggtatacacttagcttccagcccaatttcttctgttcctttagtttatgtgccagattcttgtcctcacacttagctgttattttgtatattcaaagacaaatcgcgacagccaatggaccatgtggtaacaacagagattatctcttcctgctcgagaaggcaatgcacgacattggttagtccaagctccatttgaagtctttatatgaatagaacatctgcccaggctttgtagtcaaaggttctgaccttgatggttttaagagagacattgtttttgatgtgttaagccattttttatttcacacagggcatgaggaggactatgttatagagctggcaaacgaggtgaggaaggttctggccgagtcctcgactaagaaggtgacaccggtgaaggaatcaagagcaagccgtgtagctaacaagtcgaagaacaatgtccccacggctcatcagatactacctcatcatccagaagctgttgccactacaatataactcttgtagttttcttcttaattggctttagagatgagtgaaatcaggtcttttttttaataataataacaaagtaagtttgttttctgagtagagaagtgtaatctttgtgtgtttcgaactttgttgtcttgtgtgttgtcctaacgagtgcctacttgtgcaccttttgaagaagattaaagctaaaacaaagtttataaactaacgtaagatcgaacaacatacgtcacatttcaacaaaatgcaaaaccttagagaaaacttgataacattcctaattccttcaccgtgggagcaaataactgaaatgtgtatcgagcttgtatttggaagatccatggacaagtaggtattgggcttgtatttggaagggccatgaggacaaatatgtattgggcttttatttggaaggtccatgaggacaaatagatattgggctttcacgttttttatctgtcgcctaacaaaacaaaaaaaaaaagtaaaaccaaaaaaaagaaaggagagaggccgacttggggtataagccagagttcttcttctttttcaagcttcttcttctcatcagtcatcaccggaatctaatttatactcgcaaaactcagcgattcgtttcgtttctgacaagtttccaattctacagcaatg

SEQ ID NO: 28986 - DNA, 3003 bp, Unknown; identical to SEQ ID NO: 28985
  misc_feature (1)..( 3003): 2750-1469P.txt file - cDNA_ID_2999526; gDNA_ID_1971819; Annot_ID_176076

SEQ ID NO: 28987 - DNA, 3003 bp, Unknown; identical to SEQ ID NO: 28985
  misc_feature (1)..( 3003): 2750-1469P.txt file - cDNA_ID_2999526; gDNA_ID_2926199; Annot_ID_141441

SEQ ID NO: 28988 - DNA, 3003 bp, Unknown; identical to SEQ ID NO: 28985
  misc_feature (1)..( 3003): 2750-1469P.txt file - cDNA_ID_2999526; gDNA_ID_2926199; Annot_ID_201728

SEQ ID NO: 28989 - DNA, 3003 bp, Unknown; identical to SEQ ID NO: 23991
  misc_feature (1)..( 3003): 2750-1469P.txt file - cDNA_ID_2999534; gDNA_ID_1620622; Annot_ID_47067

SEQ ID NO: 28990 - DNA, 3000 bp, Unknown; identical to SEQ ID NO: 23992
  misc_feature (1)..( 3000): 2750-1469P.txt file - cDNA_ID_2999534; gDNA_ID_2926201; Annot_ID_141510

SEQ ID NO: 28991 - DNA, 3000 bp, Unknown; identical to SEQ ID NO: 23992
  misc_feature (1)..( 3000): 2750-1469P.txt file - cDNA_ID_2999534; gDNA_ID_2926201; Annot_ID_201850

SEQ ID NO: 28992 - DNA, 3000 bp, Unknown
  misc_feature (1)..( 3000): 2750-1469P.txt file - cDNA_ID_2999538; gDNA_ID_1620686; Annot_ID_48461
cagaagaaaacaaaaattatttgaaaaaaaagtttaaaactgaattaaatagagtttgttgttgtagacaacaacaacaacaaaaaaaaaaaaaaaacttgttgtagacaacaataccatcaattatttttctttctctacgacagttacaatagtgaaaacccatctttaattgcaggagatttgttttttttagaagacggactcattcgacaagtttccatacgtttgtatatataattatacacatgattttcccagtataagatatgttaaactctgttcagctatattttatatcacccttttcgcctttaattattgttgtatatatcttaaaaacttttaggctaactgctgagtcatattcaacttactccaacagatttggttaaatatcatgctgctaatcggtatatttctctaattcaaatgtatgatcaattatattgtgacagtcatcagttatattattagagagggctagagcctggctagaagagcatccgaagagtcaaaaagaaagaaatgttaatggaaagattagttataatcttactatttttaacatgtatatgttttttttttttgataaaagacaagcagttgaaattgaataatacataaacgttaatttatcaaaacttttgaaaaggatcgttctgattacagatatgttagaacacttgaccaaattaagatactacaatttcttgtattgatcaattgtgattttgacaagaaaattgaaatgatagggtctttagaagctttggggatagcaaaggaaaattataaacaaacaccacatttcgcctaggaatagcagagaattccacattatttatgtagtttttaaacatttagttcttgaatttaagagctttattcaggaagaagagtgggataagaaggaatcaatatggaatacttttttttcataaattcgtttgtctcccagcatttagactgatgggatattcccatcctaaaaataagaatctaaaacattgtatcctaaatatctatctgtagacactttattgtgtttttataaagcaacaataatcaaatcaaagttcacaatcaatctaatgtccaagcaaaaacaattaaagtgctactaaagttccatttcttaatgatctacaaagtgttgtttatctaataaattaaggcaatttgcattcatcatataaattaaatacaacttttcagtgtaatatatatggacctcactatcaaacacttatgaaatattggaatgttgtgtaaaagtgtaaaaatcaaatcttaaataaagataactactatcaatatgacaacaatttgtgacagtacaaaatttaaactaaactataatttccattttaaaaaaaaaattgagacggccaaaaagggccaattaaaaagaaggcaaacgtgatattaattagttactgaataattaactgccattgaggccaaaaccatgtgctatgaaagctgtttatcagcgaattataacattttgtgtaaaagaaagaccaagtctacacaatttttaaaacatttcagtccagtaaagttaatcatcagttcatcactccaaattttataacttatatacgcatttgcttgaataattctgccatacaatataattttatgtgatttgataaatatatatctaattaaattaacgtgagcttagcagagagagtattatgtgctaagctaaaaccggtttatactgttcaaaacatcaaatattgagacaagctcatatagtcactatacatgcccacatgcattaaccactcagtcagacgagttatatatggttgtcttttgaaacaaacaaaacaaacttttacaattcatagttgtgcgttattatcggaacacaattatttggaaaacaaaaattatgaactcatgaagctaaatgggactgaactttaggcctacttcatattttacgataaggatgatgacgacgacttcgtggctaaaaaatagcaattaggatatgggtcgtgatcaaaaatcccaccaaactaaaaatatatcaaactaaatcaagtacctactacatgcatgattatctctttaacctaaccttaattaaagttagtttagatattgacaagaaactgtttaaaatgctttgctaagaaagtgggaacacaagatttgagagtatttttgttaaagtcacaacattttaaccttaaattacacttgcaacttgagacgatacttaatcactttttaagttaatttaatcataagcagacaaaaacatgcctttcaactctcaagtagtggtgttagccggaatccaattcgtctagagtaaagaatgaagatacaattataattgtttaacttacctcatctatataacaagattatcatttctcattccagctattaaattaaaccctcttttttcacaactggtatatcaattttgtgattaatctagttaccattcatacaactagctttgcctatacataacattcacatgagtttagtggattttacaacttaaatttcccccattttttttttttaagtaggatcgaataagagttaaatgcatgtatttgtgaaacacgaaacaaaagggtcactaaaaatttgcaccagccgggaatcgaacccgggtctgtaccgtggcagggtactattctaccactagaccactggtgcttcttgtgaattattaagacaagttagtttataatctaaatacaagttatcactgggccttaaatgacgctacagctgagcgacttaaggcccaaatattactacgtgagtacgtgacctatatatgtcaaaaatacgtgaagcttagatgggccacttaaggcccaaataaatacgtgaagcagagcttatgtgattatttcctctctcaggtcaggagttgttgtagacacagcagcttggtctctttcattggcacaaagagagaaaatctgaaattgagagagacagagaaaaatg

SEQ ID NO: 28993 - DNA, 3000 bp, Unknown; identical to SEQ ID NO: 28992
  misc_feature (1)..( 3000): 2750-1469P.txt file - cDNA_ID_2999538; gDNA_ID_1620686; Annot_ID_164620

SEQ ID NO: 28994 - DNA, 3000 bp, Unknown; identical to SEQ ID NO: 28992
  misc_feature (1)..( 3000): 2750-1469P.txt file - cDNA_ID_2999538; gDNA_ID_2926202; Annot_ID_141556

SEQ ID NO: 28995 - DNA, 3000 bp, Unknown; identical to SEQ ID NO: 28992
  misc_feature (1)..( 3000): 2750-1469P.txt file - cDNA_ID_2999538; gDNA_ID_2926202; Annot_ID_201924

SEQ ID NO: 28996 - DNA, 3003 bp, Unknown
  misc_feature (1)..( 3003): 2750-1469P.txt file - cDNA_ID_2999542; gDNA_ID_2926202; Annot_ID_141573
ttgcattttgttttatgcattttgtctagagttaatatgtgaacaagttgcattttgcagatgactgcatcatctgagaaaatggaaattcctagaagtttaattgatgatgtaccagtttcagaactatctgatgaaggcattattaagaattcaagtgaaattcctgcatctctaaagaccactgaggagccagctcctaattctttggaagctttgttgtttggatcctctgttccttctgttgtccctggaacaaacaactatgaactatggaacacaagtgatatttcctctactgaaaactataccgcagttaacctcgggacccagacaatgccaggaataccagacagtgttacctcttttgccacatcaccaacaactgcacatgctcattccggttcttcaggtccagtggtacctgttgctcctgataacttaaatacaaaagagacggctacacttgcaaataaccaggttggtctctgtagcagtttttaaacacacatttacaaatattttcttgaattcaggagtttaagctgcatcaactgttagtaacagtagatgtaaccggatcatttacagactttgaaaaagaagaaaagactatagtttcaataaaacttgttctcttcatgtgctaaccctttgcaaacacatgtggcatctacatatatcatctaagggaccatcagatttctctatggaacagacaacactggctatcacagattatgctcatggagttggatctgagcatcatcaagatgatgagacacaatctagcataagaaaggcgcttcctgaggtaacgaacccttctcttataacagaaatttggatactcttttgggaatctctgatcataagaatctaaccattggcaggaccttttcactggaggcttctcatttgcccctcagcaagttcatggtcaacatcatggcatgggatatggcatgcaatattatcaatatcctgtggtatatgttccattgacataattattacagcatctggttttatgctgatatatgtcctttttcttagcaggctatgggagccttaacatatacagcaaaagcagcaaatccctttgatcttagctatgatgatacagctccaaaccaaacaccacaagtatgaatcctagagttaatttcctgatagtatatatgatgaaaatgaatatatatatatactcagttcctttctcttttctatgtcttttacagtttcctactatggcatatgtgcaaggaggaggcttacctcacgtgtcatctccaatagggtattcagattcttcaagtccagctgcagattccattggactgatgacctctcagtcaccttttcatgcaaccgctttatccccaaactctccagctcttgcatcccatctttcccctggtgagacgaaatttatgtaaaaagactgttttcagtggttggagtttatattctaagagttgaaatctggtgaacaggtgcactaatggggcagcaatcacaggtgaatatgtccccatcattcaggtacatacatactctgactcttcttaattagtgttcactgaatggttcttgactctaaattgattttggtgtgcaaaggcaagagtatagtggtcttggtacagaaggaaatacgttcaacggagtacatacatttcatcaagcaaacaatggatatccttctgcaaacccaaatgcttatgtatccagaggaaatccctttgaatgagaaacagcttaatgcagaagttttctgattacggaaatgggatagatttcgtataatccttctaaaacatgacttgcttgacgatgaaacagaggtttcaatcatctactatttgctaattgatcaaatgaacattgatgtggaaagatattactttgtaataaaaagattatagaacttatgtaatttatctacagagcttgttctattggccatttgacaatcagattttagtgtgcatgtgttaagtgtattgtaagttgtaaacaacaaaacaaatatttcttacaaagttataattaactacgcaaactagtatcacaatttcaattaatatatattttaaaagttcatatcattcttatacttattaaatatacaatttgcgcataaacttaaagatatttaatggcgttttaacaagaaaataaaattgaataaattttgtatatttttgacataacaataccaaaaaaattctagcattcgattgaaccaaacttgacgtgtgaatgagtctggtttactacagtcaaattgataactcttttttttctaagttccaactcttcaacgttttttattcatgtacccttgcattttgttgaaattttgcaatgtgaattttctgtcttctcttacggacaacaaaattttagtttttatcagtcgtctgaatcctgtgacagacaccgacgccgttaaccgtcgtcgctgtcgctgtgtctctctttctcactctgttccatagatctgagcttctatcaatattctcggatcgctatcagtcaaatcttaagaatttcgtcgctttagctcaattcgggtacgtgtttcaattttctcgatagacccttttgagattcttgccttttttgttttttctcctttagatcagatttcggtttcctgatttattagtttattaccattgatgaagttttctagattcgtctcctttgtttatggtcttgatagggtctttatgttctgaaggaataaaaaatcttgtctttggatggataattattgtcttcaattgtatttgttgtttctaagaagaagttgtgtagttactgccaccaagtctgtgtgattgatcggatcattgttagtgtgtcagtgtttttatcttcaatttctttaattgtggcatttgctgattgattacttgaatttgttgattttcgcaagactttagattgtggaggaagttttaggatttgatctccatctcgtatccaagcatg

SEQ ID NO: 28997 - DNA, 3003 bp, Unknown
  misc_feature (1)..( 3003): 2750-1469P.txt file - cDNA_ID_2999546; gDNA_ID_2926203; Annot_ID_141582
tagtgatcaattttgttggattttcttaaacagggaaaaaggttggtaggagtactgaattgttgaagctggaagatttgattgagcaacttaatgctagaacagtagctgcgtcacctttctcctatgatgttaaaagggaagacgtggaatcctttttcagtcagtatggaaaggtaatccactatcgattgaatcataagccattgttcaaaatttagattggttatacaagtttttggtatatgtatgtgtcgtccttgcaggttaatagtgtgaggatgcctcgtcatgttgcagagtcgaggatattttctggtgttgccttggttgagttccctacagaagaggatgcccagaatgttatgaagcagaatttggtctttgctggtcaggagttggagctgaaaccaaagtaatcatacttagacatgaaaacatgtcctgtttgctgactgtttctcattttacaagtctttccattgaatgtttggatgggttacttaaaaggtgatatattcttttcaggaaagagtttgataatgaaagggagaaggatgaagtaaaatttgctaattaccaacctcagaagggatctgcaaatcagaagaatggttctgatcacaaaaacaattctgcttatgagccagagtaggggtttgactgttgctatctaattacttgtcttttcatgctaataatcctcttgatctgattatggctattttatcgtattgtagttatcccaagggtttgatcatttcattcaccctcaagcgttcagctgaagagggtaccacggaacaaaaaagttctgaggagccaactgataagacaatggaagaaagtgaaacaaagccagcagatactcctgatgctgataaagaaaacactggtgaggttcaggccgagggagcagaggatgaagatgatgagaaagaagaaaagggtgctctagccacccataaagataataaggatgttgtcttacgtgaagatcttaaggctgttttcggaaaatttggtgatgtcaaggtactacttgagttttacttagctgtctgtcaacatgaatcagattcaatatctcatataactgacatcattttcactgattcctttattctttttgttgtgaagtttgttgatttcaagatgggatctgagacgggttatcttaggtttgatgaacctgaagcatcccagaaagcccgtgcagcagcagtattagccaatgaaggtggactagccgtgaagaattttattgctgtcctagaacctgttattggtaaaaacaccttttcaacttcaatcttatcttataactaaaccttgtgttctgctttagttaaatggtcacttgtttatattgctctctgtcaggcgaagctgaaaaggagtattggactctcctacgaagcaaagatcggtttgacaagggtggccgtggaggaaggtgagttcatgtttttgttctggtttctttgttatgattttgtttcaaatgaagtttttgtttggttcttcagataataatatacttggtctatgcaggggaggaagaagaggagggagattcgggagaaagaggggatcagattcaccgggtggtcgctggaacaaatctcagaaggtggaagcatgagagatttcgctcgtgactgcttctgtttttcaatatatttctagttgcaactttaaatttaatgtatcgactggtgactcgtgatgttataactagaaatagctgcttatttggcaaattttggtttagtcatatttggtattgttttgtttagctttatgtgccttcttatgcacacatctctttccttaattattttaaatcgatgtttaggaagcattctaaaagacaaactattaatattaactgctaaaagtatattcctgtaaattctacaactgtatcaattgactcactgatgatgacactattttacttgaagtagttaaaattaattttgaaaatcaaatagttttggtattcttcttggtcttctcgtttgactttgtctacattgttattaggtttttatgctgattttagaattagctgttactggcaatttcatcttcttcctttttaatgagaaaaaaactcttctttcatacaaagaatgctttgccgttgtttagaagaagaagcaacagagaatctcgaaagaaaaatgaatgaagaaacgtataaataaataaattgaacttttatgatatgagagactaaaaagcgagattcagagattgaaatcaacggctgagatcactttcctttttgttttgatctctctctctctctctctctctcacttcgaattccgtccgcctctccatgtttgagttttgaatacctctctctctctctctcattctctctctctctctctctctctctctctctctctctctctctctctcgacttcgatttcgatttgtgttcttcttcttcttcatctggattctcagcgtcttaattacttcagattaattttggaattcgttgatctgcaaggtgtgagctttactcgtatgacctcgtctccttctcttattatggtcacatttttgttagttttcacggagacttcttcctgatttttcaaaaatctactctttgaacttctcttactttttttcgtataaagtttcgattttcttcagatgatgttcgaagcttttttctcgaggtttttgttttgggttctgaaactaattcgggcttcttatcttaggtttttttggatccaatctcaatatctaaagctaccttcttcattctgtgaacttcttccttgttttgactttagtttgctcttttgctgtgaagctaatgctgattcttagtctgagtccgactgtgtttttaattttatggtttatctttgtttcaaattacagcaatgtgcttcgcttatgatgatttctaagacatatcaaagaaacggactttggggtttttcatattgctttccttgctaactatg

SEQ ID NO: 28998 - DNA, 3003 bp, Unknown
  misc_feature (1)..( 3003): 2750-1469P.txt file - cDNA_ID_2999550; gDNA_ID_2926203; Annot_ID_141590
atacatattttttgtgccaaattagtaagtcgaatacctattggtacttgtatatatctttcgctgacatctgcgaactgaaattgaaaatctgaatatatatattttttgtgcacaaaaaatctgtttattcatttttaaaaaaaatgctagacactagttgactatatcactacaaataatgaaaaataaacagtaaaaccgcttaaggtgctgagttgacatatcatatatgaacatgttttcacttagaaataaaaaaaaaagaaatggaattcaccggcattttaatgaagaagggaaataaccaataatgattgaaggaagtgattattcttaagactagagacacatatcagatgagacaaacaaatgtggcaaacatatggacccaaatcgcagttttatattacaaggaatctcttgttaattagctagttgtccacggagttttgtactatataattcataattcgaatatggaaaactaatatgatatgaagatttagatacttttcattttcccttttgaacttctttccattttcccaattgggtatatggactaggaagaagaataatagaaggccatgtactcaaaccaataacatatatgtatatacaaaagggtagaattacatagcgaccaagataaataaacgttattctcttcttttctttttgaggtaaaaaaaaaatgtatatacattaataatagagaaatattccgacatacttatgaacaatcatgaaaataccttggataatatatataaaccatttcttgttgtaatattcatattaaaaatctaaatagtactattagagatattccacattttttgcaaggatatgcgtacttgataagtatatgaattttaattagaaaagtacaatttcattaaataaacaatatggtaaaattttagttttgaaaaggttaatagtattttagatatttagtaaataattgaaatgtattagtcaaaacatttgagttttctaaatggacgatgatttgaataattgtctaatactaatgtaaagatagagaaagtatcttatgcaaaaatttataaacattaaaaaaatatttgtatgagaaacttcttgtcgaggaccattatgaaaaaaaaatgtagtaactagttattatataaaagaataataggcttaatcgcatattatttaaaataaaatttcagttgacgcaaaaaaataatagaaaaatatattaaaattaataaaaaaagttctctctatattctttaaaacatatagaataatttaaaagaaaattagttgtaaataaattctctaaaaaaactaattgagaaaataaatatatgtcagtatttctatatattgacggttatcaaaatgtaagacattttactgtcatacaaatagacagacatatatgcatgacatgtttcatacaaacattctatgattgtatttatgtttttatatgtaaacgttacgtgtagaacaacgtttaagataatggtcatatcaatcaacctttaaatagatgaatcaaaggtgcttcctttgtttgaacttctaaatccacacaaaaatacaagaaaagtcaaataatgtggtctttatcatatttgtttgctccgaaaatatagtgtcacttgaacaaaactcttgacaaactggcctatactggttttttttcttaaccaatttatccgttaattttcaatgccgtattgggttcacttcgaagcatttcctgtcagtcattataatccaccaataatgtcagtttctctctctcgcccaaaaacgaacgatcgaggtgaatataaatgaaacatgtacattaattaatatatttatatcaaagttttttccggctttgaagcttgaaaatactccatatattatatacttctttgtgctaatttgtcgacgctttggccattttcatctatcatcgaggattcacaatttttggtgcgtatcgtttacatgatcgaagaaatagatatctgtaggatattatgacaatgtaaattaaatatagtttttctttagtctgttgattatctttatgcttagtttaagaaatagtgtaaacgcttaatatactcactttgcatgacccatataaacagtgtaaacgctaaaatataactcttcatcacccatattgatttaccttaaaatcacattcaccattgcgtctgatggaagtaatatttaagtatagaatacacccatatatatgtatatttattcataatattatatcaatatatattcatatatacgcgttgacaaaacagaaattcattctaacacgtacgtttatttaactttgataatgctagagtattattgacaggtataccgtgtacatggaattaatgtttttactcgctgctaataaaatgtatcttaccaccaatttaagcgaacgtatatcgtattattttaacaatagtttcagcagctgcaggtttccaacgactaatcttttaaattttggaatagcgatcatattcatcatatatcgttaataatcatgaaccaaatatgatttggtcgccaaaatctataatatcatcgttagaacttgtcgctatttttaaacctatcattaacttaacataagacaaacaagacttggttcttggttacaaccactagtgattgtaaaacgaattatcttaactatgaaagaggtatcctacaaattaaaaccgcatcaaaacttaccgtcaaacttcttttaaataattatcgtcatttacgcgtatctaaaaaatgaatatattatatcaacttgaataagaatccatcatttgtaacaagatcccttaagcgagaccctataaatacatcacatgcgtagcaccaaacattcactaaaacttcatttactttcttgaacttgtcttgtgccctctttccaatacactgaaatccacttcaaaatatttatttaataaaaagaaaagaaaagaaaaaaactctgccaggatg

SEQ ID NO: 28999 - DNA, 3000 bp, Unknown; identical to SEQ ID NO: 8311
  misc_feature (1)..( 3000): 2750-1469P.txt file - cDNA_ID_2999554; gDNA_ID_2926203; Annot_ID_141591

SEQ ID NO: 29000 - DNA, 3003 bp, Unknown
  misc_feature (1)..( 3003): 2750-1469P.txt file - cDNA_ID_2999558; gDNA_ID_2926203; Annot_ID_141592
gtttccgatctcggccccaatgtcttgtaagcttttctaactccaaaattttcaaggcagtctcacgactcaatacatgttcacatttattagcaatatattctagaagcaagtgacccatatgatacgcaccataattttctaaattttccttcacaaaattagaaacgacggcgtgttcagaaattggatcagattcttcattgcagaaagaaccagcagactctctgtcaaaaccccttttaaggacaaatttctcaagatattgaaggatgtcactgctaggatccttactgttatcaaattctaacccttccttctcaggtttctggttccgaagccgttcaagacgagtactccgcctctcttgggggtgttcttcagaaaacacaggctctttttcttttacagaaccaccactttctctctcgatgttgcaatccttaacagacacattacttgaatctgaatccacacaatgatccttctttttcataccttgcataacagcctctgtactaagggataattcaatggttatcggtatatcagctgatatgcccacagtttcacgcgaaggatgcactatcccaattagaatatttagcagtgccacccatgaagcttcaggaagtttaaattgcactctttttcttaacttcttggaggtagcatccatgtcctgattcatgtcagacacctttcttttgccaagaaatttgagccgaacgtgctgaggttcaagtttatctatacccttgggagcaaaaggagctgaatctgtgtcttcaatacaatgtttaacatgcaaagcacgagaatgtgatggccaatgccttaaaatcagatttgcaactgaaagacaggaaacttcatcacctacggcaatgagaacttctagaagtttctccatgcagttccctgcacattagccaattcaattttcaagagggagggaagggtaaatgcaatagtccataccacatatgagtaatgtgaacccaaaaacagagagagaaagaggagaacagtgcgtacagttattggggctgcagagaagtccctgttcaaatgcccatcgtgaaatactcagtaatcccatagaacatgatagggttccaagatggttccagagcacagaatcttttgcatctaagtctatagcttgaagataacagtttagagcattctcgtagtgacttgaaccaagctcaagaaagacagtggcaagattcttcagagccaaaaatctgcaaacagaaattatttataggcgagaccacagcactaatgaactaaaaatatatgaactagacaaaatcaattagtagacatgtaaccaataactagatgaattaaaacgatggagcttgacctgagatgatggagatgattgtcgtttgcaatagtctccacctggacataatgtcaataagaaggtcattcatcatccaaagaaatcatcagagtaagtgaagaagatgattttactttggagttggttataataggatctttaaggatagattctagcagctcccgagccttgtcatagtctttagcttgcagcttgagaagaccatcatgatatgtttgtgacagatgaaactcctgaagagggcaatttaaaaaaaaaaacagttcaatatatttttcaacaatgagctaatctaacttctttataccaaattgagaagaaagaagccctgaatcagaagaaaacctgagcttctttgctaggagctaaaggttcccacttctctgtggactccgtatcattgatcgctgcaatcgaaaactgaaaaaaaaaaaagcgaaacaaatgcaaaaaaaatcaaaaactaaccgattaaaagggggatcaaaattaaatctttgcccgaaattatcattaccatcttgatactcgaagctggtaatggttggggttttcgagttcttggcgcgaaattggtcaatcttcttcttcttctaactagggttgatgatgcacgttaaacacattactagagttttagatttcacagaattcttttctttgtttggtctgttcgtcctctactgtgtttttcttttgttttggctattttgccgtctgttaaaaaattggggttttccgataatgtattgtatatgcctgaattatggaaatatcactaaaaacacttttttgcacttttgtatatattgcaattaagatttaatttttctattttgaagactttttgttaaaagagagatttgctaactcaaaattaccggagttaataagttcgttctcatcagattagcaaaacattcatctttaaagaaatctgtttatctcacgtaaaattctactaattggcagcagcacactactttaatgggcctattactatttcaatatgcactgaaaacttcattggactgtccaataacattataacattattaaaactaaactacatttgtatttgggttacaattttataaagagtaagactcaagatactaattgggctgcagacaactttaaaagccttactacaaaaatcaaaaccattcttaattaactaacaaccaggtaaaaatctcagtacaatatttacactaaaaataggtgccacccactatgcaaaagtttagggccacgaacaaaaaaacctgtaaattgttatgtcttcacaatatgtgttttaatacacatgaattttagctacggttaatgtaaattttgtagttaaattaaggctaaacaatctcaaatataaattggtcaggtccacagacaacagcctggcaagtggcaagcactaaaaattcgaccgttattttttgcccctttttttaatatttcgaaattgtatcttttagttttattttaaagctttttagcccgctcctcctccgctccacctttaattttttcaccaattggatttggatctgtcaaaaatattggcctctttctctctttctctcttgctctctttctttgttgggttgatctcttcttccatg

SEQ ID NO: 29001 - DNA, 3000 bp, Unknown
  misc_feature (1)..( 3000): 2750-1469P.txt file - cDNA_ID_2999560; gDNA_ID_2926203; Annot_ID_141593
tcaatcggtattccttgaaacttaaatttcatgaccggaacatgggcatcgggaacaggatggagctcagtcacttcttccatctcagccaatatatcatgcaagatgatgaagaaatcctcctgtaaagagtaagtgttaagaactaaagaatcaaacttctgcatcaataagtggtagcaagagtcacctcccggttaacataagatggcccaacacacaaagtatcaatgtcagccccaggaccatgcacctgcaaagtgaacaaaattgaagtcggttcagcctcagagactaagattgcatttgcatagacaaaaacagagcgatctctcgagtaatccacaaacatatagcaaaaaacatattatacgcattttagcttcaagataaaagcaaggaagcggtaaacaagtagcacttacgccaagtcggtaggatccaaaggtgaaaatgacagcatttgcatcttccaccatctgatcagtatatcctctttgctgcgttaactgtttcacccagtgctttacaatctaaaaaaaaaaggtgggagataagattgatagtttcagacaaatagcacaatgaacagcatgtgaagaaacttaaaaacagcaaagtaaatcaatggacataagaacatatgcctgaccagtctatttcatattgaactatgatctatgcttagcccaaaatcaacaaccatacacgagtaagaaccaatacaatgaaacctaaaagaccattataaacacaataattttattcttgtcgattcagacacccaattagcacaaccatcaaaagataacacttgtaaatatacagaacaaacaatcaacgagacacgctgagtcacctgatcgatgcgtcctagaacttcctctcgccgcatggtatcatccttgctctcgtagagtccctcatcaaccaagtacttgagcatataagaaaatacacatcagataagccaaatcaacgaatcctttaaacagtggaacaatttttgtataaacaaaaaaacaaagctttaccttctccagctccacattacgcttaatatccgccgaagaaggcccagcaagagagagcggcttcgtaattccatagcttttaggagaattcagcggcggcaacgaaccacctaaattttgagtacccaccatcataacacgattgataatcctaagcgatcaaagcagaagcgcagcacaaaaacataatctcgcttcacgatatgattagagggagatcggatcagacccccaggtcaagatggattcgagacgggaattgcacaaggagaggaaacaaataaaaaggagattttgaaaatcggaaaccctaaatcgatggaaggggaaagagactacggtgtcaaaaaaagtcaaagaagaaggagaatctgaaagaggttaaatcgatggactaggaacagagagaagagagaaagagagagagatgatggatcaagaagaagaaggaggtatgagggagatggagagagagagagagcaaaggttggggaagatattaggtacacggcgattcgattttataattaaattttgattagtggattaatgtgtatgattattttacggagggagccgataagtctccgttcaaaacaagaaaacattgtaatcattttgaaaacaaatctaaattagataattttgttcagatttttaatttaaagattttaatggggttagtgggattattggtaactagaaatcatgtgtcgatggaaaccaactgatttaaaatcaccatctgttaattttaattgataaagttgaaaactggtgtgttgtttattagattttgatataattttgatactatattggattttaacatattaaagtgtttttaaataaaagatacaaaagtttaggctgtatatacaaaagtttaggctgtatatacaaacatgaatttcaattagtgatgtaataatggatttccttgattaaaaattacaaagacccaattctcatggttttgtgagattgcaaatattatttttttttagtgagggagattgcaaatatttttaataacaaatagtaacaactttcctaactgtctaaaacttatcaaattcatctaaaatttattaatactcgaatcttttctttccaaatatgtaattcattatactcctaattggagaggaaactttattattttagaatccacttgtttgatatttaaatcctaaattgattcatgaagatttgtaaagtttagattgatttgttaatcaaataaaaagtttaaaccgataatttgatagtttaaaaatgattttttcggacaattgtgtattaagatcttttttttatacttaagcgttataaagatttgtaagataaattttctcctctcagaaatttgatttttaagctaaaataactattcgatctatacattagcttgacattattatttttacaaaacaaatcagtttttataaatgctatttctcaacaggatatgatatttctctctttgtcatgaacaataccatatactaagaaaaaatgattttaaaaaaaaaaaatcttaagaaattaaagaatagaaaaattgcctatatatttttgacaccaaatagagaaattactaagaatatatttcgtaaatattaagatattcttatcgtttaatttttgtcattttctttaaaggtataataaagataattaatgagattttatccatacttctgcatttatccacgaatcaattatctgaaaaccggaaattgacaaaaggaaaaaccagccgccgtttacgctggtatttcggtaatgtccgtatatcataaagtaacggtgagccaaaacgacgtcgctttctcgttccttacttctataccactctgagctctgagaattaaaactcacatacatacatacgcttcaaattcacagtcgctttacgtcaccggagagaaaaacactcagaagaataaggttttcttcgatg

SEQ ID NO: 29002 - DNA, 3003 bp, Unknown
  misc_feature (1)..( 3003): 2750-1469P.txt file - cDNA_ID_2999563; gDNA_ID_2926203; Annot_ID_141594
cacacacgatctccctgataactgtattaagcccggggcataggccaccacaagtgacaatacaggcacgcacatcagatggcttgaagtacacctaaacacaatatataatcatatatcagcagtttttacatcatcaaatacagaagctgcagagcaaaggaaactcatggagtagatgaagtaccttttggcgcgggcctgcacgtctaaaatgtgtccctctaggagaatccttgtgaacaacaatctatacatcacacgaaagggaaaatgagcaatgtgctaaacatatcacatgatcacttacgaagagaacaaatgtaagaaaggaaagcgtcagtgagtttcaccttttcctggactgtatcatcctcatcaacaaaatactgcctgaaaatcacacagaatatgaaccctattaactaaccgtcatctttcaatcaatcaagttcataagtacaacatcaacttaccttactactgaataagcagcatttgattgcaacgggtttggataagtctgttagagaaggtatcagcaaaagtgaataaagtataaaatgaaacgaagctatagcatgatttgaaatatgaaccaaaaagcttttttttttctccatggcaagactaatttacaatccaattcttccattactctacatgtataagaacctcattacattagcatcaaatttagaaaatagtaagtgattaatagatctaatcaaacattcggtgacgagtaagcatatgtgcaccaatcaatttccacgttgacattgatttaacatttcacatttgtatgcactaatacgaatataaatatttatgtaattctctccctgatagagaccaggatctcatcaacagtccgaatcaacatataggctaaaaataggcgaaaccaattatacaaacacaacttttgcatttgctatacacgaaccaccaaatcggcaacaatatcaaattcgtaaatcgtataaccaccgatccatgaaaatgtcgatttcaaagaataatcgatggaatcgtatagagatagagagaggaagtagtacggggagatcgagaatgtaatcgctcaaatgaggaacatcttcgagtacataaccagcaggtccttccaccaacttaatctgctcgtccacgccattagaagccatcgaagaaaaccttattcttctgagtgtttttctctccggtgacgtaaagcgactgtgaatttgaagcgtatgtatgtatgtgagttttaattctcagagctcagagtggtatagaagtaaggaacgagaaagcgacgtcgttttggctcaccgttactttatgatatacggacattaccgaaataccagcgtaaacggcggctggtttttccttttgtcaatttccggttttcagataattgattcgtggataaatgcagaagtatggataaaatctcattaattatctttattatacctttaaagaaaatgacaaaaattaaacgataagaatatcttaatatttacgaaatatattcttagtaatttctctatttggtgtcaaaaatatataggcaatttttctattctttaatttcttaagattttttttttttaaaatcattttttcttagtatatggtattgttcatgacaaagagagaaatatcatatcctgttgagaaatagcatttataaaaactgatttgttttgtaaaaataataatgtcaagctaatgtatagatcgaatagttattttagcttaaaaatcaaatttctgagaggagaaaatttatcttacaaatctttataacgcttaagtataaaaaaaagatcttaatacacaattgtccgaaaaaatcatttttaaactatcaaattatcggtttaaactttttatttgattaacaaatcaatctaaactttacaaatcttcatgaatcaatttaggatttaaatatcaaacaagtggattctaaaataataaagtttcctctccaattaggagtataatgaattacatatttggaaagaaaagattcgagtattaataaattttagatgaatttgataagttttagacagttaggaaagttgttactatttgttattaaaaatatttgcaatctccctcactaaaaaaaaataatatttgcaatctcacaaaaccatgagaattgggtctttgtaatttttaatcaaggaaatccattattacatcactaattgaaattcatgtttgtatatacagcctaaacttttgtatatacagcctaaacttttgtatcttttatttaaaaacactttaatatgttaaaatccaatatagtatcaaaattatatcaaaatctaataaacaacacaccagttttcaactttatcaattaaaattaacagatggtgattttaaatcagttggtttccatcgacacatgatttctagttaccaataatcccactaaccccattaaaatctttaaattaaaaatctgaacaaaattatctaatttagatttgttttcaaaatgattacaatgttttcttgttttgaacggagacttatcggctccctccgtaaaataatcatacacattaatccactaatcaaaatttaattataaaatcgaatcgccgtgtacctaatatcttccccaacctttgctctctctctctctccatctccctcatacctccttcttcttcttgatccatcatctctctctctttctctcttctctctgttcctagtccatcgatttaacctctttcagattctccttcttctttgactttttttgacaccgtagtctctttccccttccatcgatttagggtttccgattttcaaaatctcctttttatttgtttcctctccttgtgcaattcccgtctcgaatccatcttgacctgggggtctgatccgatctccctctaatcatatcgtgaagcgagattatgtttttgtgctgcgcttctgctttgatcgcttaggattatcaatcgtgttatgatg

SEQ ID NO: 29003 - DNA, 3000 bp, Unknown
  misc_feature (1)..( 3000): 2750-1469P.txt file - cDNA_ID_2999567; gDNA_ID_2926203; Annot_ID_141597
ctaagattgcatgaagagatgaaagttcttgaggtaatcaatcacatataagattttttgtaaagaaagaaaagaagaagattcatcagcttactaaaacggtaggaaatagattcacagatattatattcctcatcatcacattatagtcttgaatagatgtctctatcaaaaatatacttattaattatagtgaaaagtcgataatttaatttgttatatgataaaaacaaaagaaaaaacacttggagaaatttataagtgaggaacgctcaatattttacattattaattttcactcttttcttgcatatttattctagctttaactaataaatacatagtgtacttgaacattttgttataagatagtgaatagtagaaactatcttcaaactctgcataaaaaattaacaaacatttttttaatatattcaaacacagctgatagtagtatatttgagttttttgtttttttgtttttgtttttgtaaaacctgtttgttaatcacgacaaaactacatcacattcccacaaacgctaaaataaaaaataagacaaggtaatcgtcatatttgagctatgatatatatatatatatgtttttttttttttactttttttttttataaaggctaactatttgttttttgttttcaaatactactagcatatataagatcttaattttttgtgtgttaaatattatattttgagtttcaactgttattagatcaacagtatctatctctttttttaacacagtatctatccttacgcagaatatatcctcaaaatttggaaccagagatgtgaataatgagtaatataagaaaatcgtgcatgggcttgaatatagtgtgccttatcacaggggacaatgtcgataaattttgcatgcatgtctcatctggttctaaaaatttcattataaatatcacgactgtaacaatgatcatattatgaaaaatttctaagtttatatcaggaatgatgattgacgataatgatgataactacatgggattttatctgcgttacaagaaatcaaggacgcatgcaactttttcatcattctgtcctttcttcaactaccatttgaattttcatttattataaggtatgttctttaaattatataccttcctttgtcccgaaattaattaaaaatgggactggatatgtacttccacttcttaatttcatatgttatttttaaaaatggtcgaaaaatgtataacaatacgcatgcaaaattttctttgcgccaaagtattaaaatggcctgcaactgtacggataaaccaattttcaaatgataatatttgtatataatgtttctgtatacaggggcggacccacgttagtcttgggtggggcatgtgcccgatactcaattctataaatcttatataagtttgcattatgtaattaaaaatgtatttagtttagtggttttttacttaatggtgccccacattaacccaagtttaaaccttgctgatgtctttttattgattttttataactgtacccatataagattatttcctggattagccatctgtatattaataaatcgtttcctgtggttgtgcgatgcataaccgtccaagaaagtcgtatatttttaatacatgtgttaaaataggttttaagtgagaatttttttaacttgtggagtgtggagtgtagagtgtagatgtacattacctatatatttatccaattctgtgtaataaagatgttggggcggcgcctgctgccacatacacattggattagaagggcaaaagaagttctaataaggagcaaactaatagccatgaaaattatgaatttaccatactgaaaacaaaggaattaaggttttgaattcaatacttgttttgttatatatgatgttgatgtgacgtatttgtgcgtttctcatagtgactttgaaaggaaggctaaacgaatttgcagtaaaagtaacagaagaaacacttcaaaattgaattaaaatgaagaaaaaaaagaatgagaaaaagtgagaagtggtggttgtctggtattaagggtactcacttctctccttttcaacacagcccgacacacatgtctctttttttttttttcatacacacatttctatttattagtttcctaaaataaaaattataaaacaaaaagcacacccacccataaactaaagcttttctctctcatcccactacaaatcttatatacaagtttcgcaaatcttgactcttcacgttgtggatctatctagagagataagtaagagagaggaagagtaaggaagaaagtggttgaactgtagcagagtctgaggtttgaatcttgtagttcccattgaagcatgcttcaccgttttttccgaaggaagttactcatccactgagagagaaagagggatttggagatagagaaagaaatttctcagatgggtttgtgagaattcacagcaagagcaagaaactcctatatcttcctttgcttccagagaccagcgtgatcaaaaacaaatatttttacggtatctataagaatcctcccctctttttctttttccttaaagagaatttttttgcatctttcttaggttccaataaatatgcagaagaaagttaaaatttttgtaccgtcgttgaaccttttaaagacctaattaagagacaagatcatactaagctcataaatcactttctatttacacatatataggttattaatcttaaacaagatctatattttatctttgagatttttcaagatttcatcaagtgtcacgttcattcattgattacatttcaaatttcactaagaaagttaaaacacggatctttttgagaatatcaagaaagttctttgaaatataccaaaagaaatcagtactttcaagaatacataactttttaggttgtgttaaataatatttgcttttgtaataaaggaacaaaattaaatagagagatcggagaggatcaaagatg

SEQ ID NO: 29004 - DNA, 3000 bp, Unknown; identical to SEQ ID NO: 3983
  misc_feature (1)..( 3000): 2750-1469P.txt file - cDNA_ID_2999571; gDNA_ID_2926204; Annot_ID_141628

SEQ ID NO: 29005 - DNA, 3000 bp, Unknown; identical to SEQ ID NO: 3270
  misc_feature (1)..( 3000): 2750-1469P.txt file - cDNA_ID_2999575; gDNA_ID_1620636; Annot_ID_47360

SEQ ID NO: 29006 - DNA, 3000 bp, Unknown; identical to SEQ ID NO: 3270
  misc_feature (1)..( 3000): 2750-1469P.txt file - cDNA_ID_2999575; gDNA_ID_2926204; Annot_ID_141633

SEQ ID NO: 29007 - DNA, 3000 bp, Unknown; identical to SEQ ID NO: 4398
  misc_feature (1)..( 3000): 2750-1469P.txt file - cDNA_ID_2999579; gDNA_ID_2926204; Annot_ID_141661

SEQ ID NO: 29008 - DNA, 3003 bp, Unknown
  misc_feature (1)..( 3003): 2750-1469P.txt file - cDNA_ID_2999583; gDNA_ID_1620712; Annot_ID_49018
ctcgaagcatataacacacagtgtcgagtagtccacatcatccgacgagctaaacgacgccgtttctacatctcccttccccgttacctccaacgactcattgatcaacggcggcgtccaatcggtggtgacttcttcttctgccaccaatggtagcctctgtgtgtcatcctccatgtcacattcgctcaggaatttcaataccaaataagtaatcgtcattattgttcctgagaaacaataacaaaaacaaaaaaacaaacaaattagctctacattgaagataaatagtactccatatgttaattatataaatatgggagaaatatagtacccaaaactgtaatataaatcaccactctagctgagaaggatagccccaagtaccatcgaacgaactcatcctgcaaaatacaagttactcgcatatatatattaatccatggtttcgtcaagtttttttttttatatagaaaattgagtagagctaggagctagaggggtactcgcgttatccgatggtaacttgatggaatttagtttacggaagaacatatatagaagctgcagacattttgagatcgtggcatcgaacattttcgagagaaaagaatgatccagtgaagatagaaatgatttgttctcatctgaagttatattgaatttcttattgtttgttagagagcattaaacaaatgaatttctgattaattccaagcaattgtcatcactctgacagtatatatagattgtgtcaaaagactcgtcgtgcaatccatatttattaatttgatcagaaaaagaggcaaaatacaagttgctgacacaaacttaaaaagaaaggtacagtacaatttcctaactctgatttaataatacctatttgttaaaaaggacaattcaagtgagaaaatgaaaaggcacccaaataattcactctgtttaagtcctaaacgactgattcttttatctgaaaatacgtgatgctaaattagtcaatagttgaaataagatttaaaaaatggattatccgttaattcacaaaaattcctagaggtctctctggtacattcaatgaacactctttttaatagttgaaaataaacatttgggaagaactaagaagaaacaacattataagatgggcttgggctttttgttgtattgttttttatgttttacaattttatttaacaaacaagatgacaaaaaaaaaaaaaaggactccaaaagtccaaaacagctatggagtatatgagggtaaagtcgtcattttacaaaaagcatttttatcttcgttttgtcgtcttcgaaagttctcaaagagaaggcatctgagaaaccccaatctctaatcttcttttcaattcaatacttttttttctcaatctctcctctcaaatcaaacaactttgattgatcttcgcaatcgattccacatgaagcgcagtactaccgactctgatttggccggtgatgctcacaacgagacaaacaagaagatgaagagtacagaggaagaagaaatcggattctccaatttagacgagaatctagtgtacgaggtgttgaaacacgtcgacgcaaagaccttagctatgtcatcttgcgtgagcaagatctggcacaaaacggcacaagacgagcggctttgggagctgatctgtactcgtcactggactaacatcggctgcgggcagaaccagctcagatctgttgtgttggcgcttggtggcttccgaagactccactctctttacctctggcctctctctaaacccaatccgcgtgctaggttcggtaaggacgagcttaaactcactctttctcttctctcaattcgatactacgagaagatgagtttcactaagagacctcttccagaatccaaataattgactacaaattattagagtttggttttggagtttgtgtatttggagtttgttgattggtaagtcagatgtgatgttcaatgctggcaataaaatttgttggtatccataagccagactgttagcaacagttgtgttctgtaataatagagggtgatgagaatttttaattactgtaatcggagctgattaaaagtagatttaatatcaaatgtgattcgattttgttgtaatggttctgtcgtgaagttaagttggtccgtagttggacaatgattgtaacaaaatcgattcgtgatccagtttggtaagattaagaactgttagtgacgattctgttttattattcaatgaaaaacaatgttcaccaatttggtaataaacctaacattcaccactttaagtccaaaccggaatcaacgtcaagctatgtaatgttgcttatttctttatgtccttcgtttgtaacatttcccggtggttactactctgtcggatccagttttgccgtctagtttttacagcggtacgataaatctcaaatgttgtttgatttggttattcttgcgatggttagccttaatttcgctagatttatgtgtatttgagtgatagctacaagcctacacatcattaccatgtaccaccatctccttattcaaatcagaatcattatcgccgtaaccacttttgtcattttctttttttatatgtcggtaaagaaagaataatgaaataaagaggtgtaagtaagagtcaacaaaataatttaagagcttgtgtgaattgataaaaacactccttttctgttcttggttttatatgaaatttataaacaaactcgagtgattacaaagaacttataaaccacttatgtggcatactaaaatttaacaaaaaaaaatgttttgcgaaaaataagaagattttgttcatcttttttggtaagatgccagtttagctaaagatatttttcatatataaaaatgacaataaacacattacaaaagacaaaccccacacggctctctctagccaaattacttggccacgaccataaacacaaaacaccgcttagcttctaaaatctgaacatcgagaaaaaatg

SEQ ID NO: 29009 - DNA, 3003 bp, Unknown; identical to SEQ ID NO: 29008
  misc_feature (1)..( 3003): 2750-1469P.txt file - cDNA_ID_2999583; gDNA_ID_1620712; Annot_ID_165463

SEQ ID NO: 29010 - DNA, 3003 bp, Unknown; identical to SEQ ID NO: 29008
  misc_feature (1)..( 3003): 2750-1469P.txt file - cDNA_ID_2999583; gDNA_ID_2926185; Annot_ID_140732

SEQ ID NO: 29011 - DNA, 3003 bp, Unknown; identical to SEQ ID NO: 29008
  misc_feature (1)..( 3003): 2750-1469P.txt file - cDNA_ID_2999583; gDNA_ID_2926185; Annot_ID_200535

SEQ ID NO: 29012 - DNA, 3000 bp, Unknown; identical to SEQ ID NO: 4519
  misc_feature (1)..( 3000): 2750-1469P.txt file - cDNA_ID_2999587; gDNA_ID_1620712; Annot_ID_49029

SEQ ID NO: 29013 - DNA, 3000 bp, Unknown; identical to SEQ ID NO: 4519
  misc_feature (1)..( 3000): 2750-1469P.txt file - cDNA_ID_2999587; gDNA_ID_2926185; Annot_ID_140743

SEQ ID NO: 29014 - DNA, 3003 bp, Unknown
  misc_feature (1)..( 3003): 2750-1469P.txt file - cDNA_ID_2999590; gDNA_ID_1620712; Annot_ID_49034
atcagatggaccacactctttctcttcttccatttctcttcatcataatcatttcttccttccatgttttgcctgtttcacccacaccttcacacaaactaaaatccgccactaccatcagaaaactcaaccgcggaggaccttacatcggtctcgtgacggtcattgcgaccgaagaaaatgcttttctccgcagtgtcgatttcagacctgaccctactcatcccttcttggatctctctggtatccacttgaatcaaataactttttcaagttttctaacgtaaatagagtcttttgttttgcttaaatggaagttagtacttttgagatgaaaatattagtagtttctgatttaataaccttatgtatacagggagacgttttcgaatagggaagattcatggaaagaaggttgtgtatgttagatgtgggagaggaatggtgagtaaccacaacattaaattatccaaaacagaacaaaaaaaactacaacaaaataaagaagtttatatggctcttatttcttatctaaaagtagtatacaaaaagggaatgggcacacaccaaaatatcctgatccgtatacaataattgaaatgatgaattgatgataaaacttatattaagttttaatatagttagtaagtagtatagtatattaaagatgcatattagtaaatgtaatccatatgaaaagtagcaaacgaacacttatattaagacaaaagaattgcaggtgaatggagcagcagcaacacaacagatgatagatgtgttcaatgtgaaagggatagtgcattttgggattgctggaaatatgaacaactcaatgtccataggagatgtgagcatccctaagcaaattacgaatgctggcttgtgggattggctggtaagtataatagttacacaagtttgattgcttcttcttcttcatattgtctgatccatgcttttggttctgagtaaaacagaatccagacaaagtaaagggagttgaggatatagcgtacttagatgtcggaaactataatgttccaaaaggagatggcgacaatgagttagggagtattggatataattacgagcaactatattcagtcactggtcacatcaatgcacctcagaatgtgttttggatcaacacaactcaagagtggcttcatcttgcagctgatctagaggttgttaagagctatacaacatactgattagattatagattataaacaataacggttccattgttaacaacggtttttcgtgtggtatacggtggcagaagatggagctatcgcagtgtgtaaatgcaagtttgtgtcttccaaagaaaccaaaattggtagttggattgaaagcagccactgcttacatatttgtggataatgcagcctatagaaatttcttatacgatacttttggagtctcctcctctgatatggagagttctgcagtagccatggtaattttgaatccattaatttttacataattttgatcgttaagtgatatgtttgtgttgtggatttgaccagacatgcgcatcaaatgggtatccgataattgtgataaggggtttatcagatttagctggagaaggaggagataacactgttcataagtttggatctttggctgccactaacactgccaaagctgttttagagttcattaggaagctcccaccgtactaattcctctagtgtaacctatttatcatgaatgtttgaatctagttctctagttcatatcaacgaacccgtgacaacaaatgatttggattgttatcaaattccattttccatgatcgtaacaatgacaacacttttatctcatatatctacgaaatgcaacattcgaaaaattaacaatctcattgcaaattccaaactttcactcattctagcgacaatctttaacaagcacaaaaagggatgtatatataccttacaagagaagccaaattgttaaaattaaggtttaacatctctagttgaatcattctcatcatcgctatcgcaattctggctttgctcatcgtcagaagacggagacggatcgagacgggctgcgtctatagcccattggatcagcttatccacttcagcatcttctccgatttcatcaccatcttctccgatttcatcctgaagaagaacagaggacgaagaagacgcggaggggagagaagttttcagagccgcgaatctaagcatgagatcttctggtgtttcttcaaccacatcctttgatttcggctgcattctcggccgttgtttctgttgttgctgctgatccttcttcttttgagatttgagagcgagaaatctagagtgaagatctggatctaagtaatcggaagaagatcgagaagtgtgagaatcaacagagagctttagtatcatctcatcttgagctgcttgaagcaactgttcaacttcgtcttcttccttgcctcctctcctcatctctcgaatctgttgatctcaaaatcgattttcaaaaaccgaattgcgactttatgatctctatacaaaaccggtttagtatagggtcgattttaattggaccaacgcctaacttacgggcacacgatgtcgtttcccacgcggtttagattccaaatttccgtgagatgtttatttgatctccaccgtccaatggaaactctgattatttcgttgccgttgatctttgaccaaaaattgccaaccaatcagtttggcccaataagaaaaggaagaaaacctgaatttcacttaatctatcggcccttttttggtatttcccatgtgcgataaatttatacgatcaaatgtgaaccacgatggttcctggaagaaggaagagatttgcagcaacagagcgttataaaaaggcgaagcaagagggaagacaacagataacaaattgtgaagaatgggaagcgaaggaagatcgattgcgaggaagccaaggtttttgtgtctccatggatttcgtacgagcggagagataatg

SEQ ID NO: 29015 - DNA, 3003 bp, Unknown
  misc_feature (1)..( 3003): 2750-1469P.txt file - cDNA_ID_2999590; gDNA_ID_1620712; Annot_ID_165481
agaagaaactatcaagttggacttggatgatatatatatatatgcagctgtggatttgaatcgtaaaccaaccaaccaatcagatggaccacactctttctcttcttccatttctcttcatcataatcatttcttccttccatgttttgcctgtttcacccacaccttcacacaaactaaaatccgccactaccatcagaaaactcaaccgcggaggaccttacatcggtctcgtgacggtcattgcgaccgaagaaaatgcttttctccgcagtgtcgatttcagacctgaccctactcatcccttcttggatctctctggtatccacttgaatcaaataactttttcaagttttctaacgtaaatagagtcttttgttttgcttaaatggaagttagtacttttgagatgaaaatattagtagtttctgatttaataaccttatgtatacagggagacgttttcgaatagggaagattcatggaaagaaggttgtgtatgttagatgtgggagaggaatggtgagtaaccacaacattaaattatccaaaacagaacaaaaaaaactacaacaaaataaagaagtttatatggctcttatttcttatctaaaagtagtatacaaaaagggaatgggcacacaccaaaatatcctgatccgtatacaataattgaaatgatgaattgatgataaaacttatattaagttttaatatagttagtaagtagtatagtatattaaagatgcatattagtaaatgtaatccatatgaaaagtagcaaacgaacacttatattaagacaaaagaattgcaggtgaatggagcagcagcaacacaacagatgatagatgtgttcaatgtgaaagggatagtgcattttgggattgctggaaatatgaacaactcaatgtccataggagatgtgagcatccctaagcaaattacgaatgctggcttgtgggattggctggtaagtataatagttacacaagtttgattgcttcttcttcttcatattgtctgatccatgcttttggttctgagtaaaacagaatccagacaaagtaaagggagttgaggatatagcgtacttagatgtcggaaactataatgttccaaaaggagatggcgacaatgagttagggagtattggatataattacgagcaactatattcagtcactggtcacatcaatgcacctcagaatgtgttttggatcaacacaactcaagagtggcttcatcttgcagctgatctagaggttgttaagagctatacaacatactgattagattatagattataaacaataacggttccattgttaacaacggtttttcgtgtggtatacggtggcagaagatggagctatcgcagtgtgtaaatgcaagtttgtgtcttccaaagaaaccaaaattggtagttggattgaaagcagccactgcttacatatttgtggataatgcagcctatagaaatttcttatacgatacttttggagtctcctcctctgatatggagagttctgcagtagccatggtaattttgaatccattaatttttacataattttgatcgttaagtgatatgtttgtgttgtggatttgaccagacatgcgcatcaaatgggtatccgataattgtgataaggggtttatcagatttagctggagaaggaggagataacactgttcataagtttggatctttggctgccactaacactgccaaagctgttttagagttcattaggaagctcccaccgtactaattcctctagtgtaacctatttatcatgaatgtttgaatctagttctctagttcatatcaacgaacccgtgacaacaaatgatttggattgttatcaaattccattttccatgatcgtaacaatgacaacacttttatctcatatatctacgaaatgcaacattcgaaaaattaacaatctcattgcaaattccaaactttcactcattctagcgacaatctttaacaagcacaaaaagggatgtatatataccttacaagagaagccaaattgttaaaattaaggtttaacatctctagttgaatcattctcatcatcgctatcgcaattctggctttgctcatcgtcagaagacggagacggatcgagacgggctgcgtctatagcccattggatcagcttatccacttcagcatcttctccgatttcatcaccatcttctccgatttcatcctgaagaagaacagaggacgaagaagacgcggaggggagagaagttttcagagccgcgaatctaagcatgagatcttctggtgtttcttcaaccacatcctttgatttcggctgcattctcggccgttgtttctgttgttgctgctgatccttcttcttttgagatttgagagcgagaaatctagagtgaagatctggatctaagtaatcggaagaagatcgagaagtgtgagaatcaacagagagctttagtatcatctcatcttgagctgcttgaagcaactgttcaacttcgtcttcttccttgcctcctctcctcatctctcgaatctgttgatctcaaaatcgattttcaaaaaccgaattgcgactttatgatctctatacaaaaccggtttagtatagggtcgattttaattggaccaacgcctaacttacgggcacacgatgtcgtttcccacgcggtttagattccaaatttccgtgagatgtttatttgatctccaccgtccaatggaaactctgattatttcgttgccgttgatctttgaccaaaaattgccaaccaatcagtttggcccaataagaaaaggaagaaaacctgaatttcacttaatctatcggcccttttttggtatttcccatgtgcgataaatttatacgatcaaatgtgaaccacgatggttcctggaagaaggaagagatttgcagcaacagagcgttataaaaaggcgaagcaagagggaagacaacagataacaaattgtgaagaatg

SEQ ID NO: 29016 - DNA, 3003 bp, Unknown; identical to SEQ ID NO: 29014
  misc_feature (1)..( 3003): 2750-1469P.txt file - cDNA_ID_2999590; gDNA_ID_2926185; Annot_ID_140748

SEQ ID NO: 29017 - DNA, 3003 bp, Unknown; identical to SEQ ID NO: 29015
  misc_feature (1)..( 3003): 2750-1469P.txt file - cDNA_ID_2999590; gDNA_ID_2926185; Annot_ID_200551

SEQ ID NO: 29018 - DNA, 3000 bp, Unknown; identical to SEQ ID NO: 3597
  misc_feature (1)..( 3000): 2750-1469P.txt file - cDNA_ID_2999594; gDNA_ID_1620653; Annot_ID_47787

SEQ ID NO: 29019 - DNA, 3000 bp, Unknown; identical to SEQ ID NO: 3597
  misc_feature (1)..( 3000): 2750-1469P.txt file - cDNA_ID_2999594; gDNA_ID_1620653; Annot_ID_163546

SEQ ID NO: 29020 - DNA, 3003 bp, Unknown
  misc_feature (1)..( 3003): 2750-1469P.txt file - cDNA_ID_2999594; gDNA_ID_2926185; Annot_ID_140773
atccttcgaattccgtcgctggttagcttaggactttctgattctgtcgctttaatcttcttctctccatgacacaacgggtattccaagtctggaaaggaagcaatgtaagtccttttttcatcgaatgattgagcctggaattttattggttttttgtgtgttttctctttgttgggagatgaatattctctgaattctgttctctggtatgaatatgatttggaattcgttttttctcgagtttcacctgtgtagcataatcttagttacgcaattggtttactttggtacgtgtaaactaatgttgttgagctgaatcgttgaagtatctcttgattcactctcaaagcatgaccatgcatttttgcataaccttgtatcaagttgaatgttccttgtaatttattaacaattggaagtatcttcaatgcttgactcttcacatgttttaaattcagtatggtgataccaataaatggtccctctctcttttgcagaaattcatcctgggtgggagattgatatttggaccagatgctaggtcactgcctcttaccttgctattgatcatagttccggttgttttgttctgtgtatttgtagcaaggcaccttcgccatgagttctctccctacaatgcgggatatgctatcatggtggtagcaattcttttcactatttatgtaagtcttctccgatacccaatctgatagtcctatatatctcattgttgtaaatatttgatttctgattttatgtttgtttcctgtttgcttactgcctaatcgggtaatcaacaacatttatcagctatttcattgtttgtttcttacccggcttagaagcttaaaccctgtcctcctgttctgtcacttgttgtgtggcattcaggcgttgttattttttgcttttctgaatcacgaatttgggtttgataggtattgatcctcctcttcttcacatctgcacgagatcctggtattgttcctcgaaattcgcatccaccagaggaagacctacgttatgagacaactgtatcagctgatggaagacaaacaccgagtgttcaaattcccaggacgaaagaagtcattgttaatggcgtttctgttagagtgaaatactgtgatacatgcatgctttacaggcctcctcgctgctctcattgctccatatgcaacaactgtgttgagcgctttgatcatcattgcccatgggtgggacaatgcattggactggtaagctcaatcaaaagcatattgactttgaaaaatataaagttcgtaaatttttatctcccaaaaaagtgtgaggtttctgtttctgttatctgaaaggccaagatctgttttatctgccgattggccaatctgttgtctgccattttgtcctgtgattctgactgggaaagttctgtccattggcagagaaactataggtatttctttatgtttgtttcttcgtcaacacttctctgcatctatattttctcgatgtcggcggtatacatcaagattctgatggatcatcaacaagcaactgtgtggagggcaatgaaagaatcaccttgggctgttgtgttgatgatatattgctttattgccctgtggtttgttggagggctcacagcgtttcacttgtacctcataagtacaaaccaggtcagttggtctctattgttttaaaattctgttttctacttgttatccctgttattaccttcccgtatatacatattaatattgtatgcaaattgtaagtcaactgatagcaacaccgtgcaagtttttcagacaacctatgagaaactccggtacaggtcatcacacagcaggagcattgtctataaccgtggctgtccaaacaatttcctggaagttttttgctcaaaggtgaagccctcgaggaacaactttagagccttcatcgaagaagaacccccaagagttattactctgcctagcaccaccagggaatcaggggaagcagaagacgaaaatgtgacccggcgacagaaagtggaagacgatctagacattggagacgatctaatgaatctctcacggcgttgtaatgcagaagatgccaacaacaatcagcctcatcacacattggacatagaccatgagagagcaggctcgataaggacagaagcaagacatgaaagctggggaagaagaagtgggagctgggatgtagcagcaacagatgtgagggaaagtcgaagctacgcaacagcaaaggatggaaggggataagggtttgtggggtttctcttttaggacagaagtcggtagatgtgaattggtttcagggatttggggatcagttaatgtaatcttgagtgtactataccaagagtagtagttcttctatcttcttttcgttttctacaatgtgtattgtgctattttattaatattatgtggatattccattctgtatttgcgtccatgacatctaccttaaacattgtcatgctgtcttttagctcggccaaaatccaatttataatcttctcttacatgcaattagcagcactgcgattaaaggaaatatcaaatctaacaaaatttgtattttatgactaaaataagtttttcgtactatttaaatctaaaaactaataaatagttattttttaaagtaatccctagggcatttacttgtctaattttgctcaacacttatgagttatgatcacgagtcacgacatccattttctaaacaaagtaagacgatactggacgttgtctttgactaaatttgtacaaaccacgaattatttacattggccaaatttagaaaacataagaaaaaagttactaaagtttaacgttatttgataccagttataatatagcacattctaaagttatccagccctagatgaaaccctaagcatacatatatatccgccttgaaccaaaagccaaacaacacaaaactgaataacaaccggaaacttgagcaacaaaacttccgacgctaagagaaatg

SEQ ID NO: 29021 - DNA, 3003 bp, Unknown; identical to SEQ ID NO: 29020
  misc_feature (1)..( 3003): 2750-1469P.txt file - cDNA_ID_2999594; gDNA_ID_2926185; Annot_ID_200579

SEQ ID NO: 29022 - DNA, 3003 bp, Unknown
  misc_feature (1)..( 3003): 2750-1469P.txt file - cDNA_ID_2999597; gDNA_ID_1620653; Annot_ID_47773
acacatatgttggtttagaaaaacttcaagttgcatttcttcttttagccaatcgcactatcttccgtgaaaaggtaaataatatatagctttatgacaatttcacaaaaatggttcgttagttttgacttagcattaagatttttttccagaaatctaagtattggtaaaataattctatatctactactaggtcaaaatacaattctatattatttaaaaaattgtaactgaggtaattgatcaaattaccaaaatgatgaaagagctagttaagaatttaacaatgtacaagttttagtgaaatggtcaaaactaaatatccattcttttggcccgttagcatcattaaaccaaccactcaatggagacatggaagatcaaaattcgtcaaccctagcgctttgtttctctacaaggatcaagtatggaacaacaacaaccacaagaaatcgaaatgtgctaaggtcgcatgagttcgctaggaataagtctataacatttcgttttgtcaacaaaataagattttagtatatatattatttacaattttaccagacttccattgtcaacaaatgacattattgttgttgtcgaagaaaaaacaaaggtgacactatttgctgttttactttttatttcatgaggacggaggacccatttttttaatttagtttaaaagagcaaccgtatcagttgattacggagtccagcagagaaaagcatgctcaactgtcaaaaacaacctaacaattagggaatcccgtaaaaccggcaaatcacgagggcagcattacattacattacattacatgtcccacaaatcactttccctcccatgcttttccacttccacctatcattaccaacacctattacctaaaggactttaagccagagagttttcaaatcccgtaccgtgattggtgcactatgaagtggaaaggaatacgatgaaaaacaaactgttttctcaatacattttcaccgacaccaatcatgaagcaaatagctgcaattaattttttctacgttttaagacaagaatatatattaaactacttattttcttctacatcttaattaagtagttagtattcttacaaacacttctgattatcatttttgtgttcaatatataaactcctttctatttaaaaaattccctcaacactataatatcattcagtccctatctaaaagttaggtgtccatagagatatacggatattgaaatttaaatgatatatggcggagatcatgcaaggacaattatcttcaatagaatcattacgacttattaaatgtgtgttcccgacattttattacatgattctactgttttctttctcatcatctcattccattatttgtttttctatttgtgtttctagattacttgacatgtacgttaaatcatttatcttccttttcccttgatatcccactcgaatgacatgttgctgtagtactattactatggttggaaatcttatttctctgaataataaaagtttatattcagataactgctatgatacgtaaactttccaatggttatttaattttgttttgcaattaatatatgcaactataagtaaagcctagtgaattctttggatcggagttatatgctatgtgctaataatacaaggaaccccgcaatattgatataaaatttaccaaactgtatcccacactttaaaagttgtcatcatactttatgtgaatgcaataggatccaaatcgtttggggaagattttacattttaaattcttatattccgcaagtgcccaatggtgccgcacgaattatttagtgtatcaaactattggtaggagcaattagtaaagcatatacagtgcaacaatctatttaaaagtatagaaatatctaactaaaacatattttgaagattccctcgtcctccaatcgtcttccatcatcgaaatatccctttgaagagctaagaaacttggtgggaacaaatgatgctattcgataattttcttcgattctatggtatatttggaaagattggaacataattaatatatatatcccacttgatgcataaagaatgttgtttaagaaacggagttctgaggtaactgactgacaagtgcttcgactcaaccattactacttaccaaatccacggctcttggcataccccatacacgcttagtggatatggttgaatcgctagttcccaccaccagcttctttatcttgacttaaaagagggcacgtcgatgtcttcctcccctacacgacaatgtagaacatgcatgttcaaacaatttgcaaatggaagatatattggaaatttgtgaaaggccatgaggtagatacacaattaaattcatgagttcataggtcagaacaaagctgaagcatgttctacatgcccaatcaagaaaaagtcaaacttttctcaatgccgactttactgttctaaaatgtatgaaaatacacattaatatacaattataaatacatgcaaatatatattgttataaactatataatggttacttgatatggatccttatacttaactaacttaacaccaactccctggatctataatgtatatattgggctaaacaggtcatgtggaagttatttgaaaagtacaccatatcgacctaattagattggaggctttttatttagttttttgtcaacaattagatttgagtaacggatgtaaccatattatttgttcctacctcctaggcattattatagtataaggtttttttttaactaaagatgatttaaaaaaaaaaaagtgggacctaaaccttaaaaattccaataacaaatagtatagaggtcctttttctctttatataaacccccaaaatttcctcttctctgtattctccactcaatacttatttcctctgtcttccttcgcttccctcttctctcaccacaatccgagagagagacagtactgtaatccaagtgagagagagagagaaatgaaaatg

SEQ ID NO: 29023 - DNA, 3000 bp, Unknown
  misc_feature (1)..( 3000): 2750-1469P.txt file - cDNA_ID_2999597; gDNA_ID_2926186; Annot_ID_140787
catatgttggtttagaaaaacttcaagttgcatttcttcttttagccaatcgcactatcttccgtgaaaaggtaaataatatatagctttatgacaatttcacaaaaatggttcgttagttttgacttagcattaagatttttttccagaaatctaagtattggtaaaataattctatatctactactaggtcaaaatacaattctatattatttaaaaaattgtaactgaggtaattgatcaaattaccaaaatgatgaaagagctagttaagaatttaacaatgtacaagttttagtgaaatggtcaaaactaaatatccattcttttggcccgttagcatcattaaaccaaccactcaatggagacatggaagatcaaaattcgtcaaccctagcgctttgtttctctacaaggatcaagtatggaacaacaacaaccacaagaaatcgaaatgtgctaaggtcgcatgagttcgctaggaataagtctataacatttcgttttgtcaacaaaataagattttagtatatatattatttacaattttaccagacttccattgtcaacaaatgacattattgttgttgtcgaagaaaaaacaaaggtgacactatttgctgttttactttttatttcatgaggacggaggacccatttttttaatttagtttaaaagagcaaccgtatcagttgattacggagtccagcagagaaaagcatgctcaactgtcaaaaacaacctaacaattagggaatcccgtaaaaccggcaaatcacgagggcagcattacattacattacattacatgtcccacaaatcactttccctcccatgcttttccacttccacctatcattaccaacacctattacctaaaggactttaagccagagagttttcaaatcccgtaccgtgattggtgcactatgaagtggaaaggaatacgatgaaaaacaaactgttttctcaatacattttcaccgacaccaatcatgaagcaaatagctgcaattaattttttctacgttttaagacaagaatatatattaaactacttattttcttctacatcttaattaagtagttagtattcttacaaacacttctgattatcatttttgtgttcaatatataaactcctttctatttaaaaaattccctcaacactataatatcattcagtccctatctaaaagttaggtgtccatagagatatacggatattgaaatttaaatgatatatggcggagatcatgcaaggacaattatcttcaatagaatcattacgacttattaaatgtgtgttcccgacattttattacatgattctactgttttctttctcatcatctcattccattatttgtttttctatttgtgtttctagattacttgacatgtacgttaaatcatttatcttccttttcccttgatatcccactcgaatgacatgttgctgtagtactattactatggttggaaatcttatttctctgaataataaaagtttatattcagataactgctatgatacgtaaactttccaatggttatttaattttgttttgcaattaatatatgcaactataagtaaagcctagtgaattctttggatcggagttatatgctatgtgctaataatacaaggaaccccgcaatattgatataaaatttaccaaactgtatcccacactttaaaagttgtcatcatactttatgtgaatgcaataggatccaaatcgtttggggaagattttacattttaaattcttatattccgcaagtgcccaatggtgccgcacgaattatttagtgtatcaaactattggtaggagcaattagtaaagcatatacagtgcaacaatctatttaaaagtatagaaatatctaactaaaacatattttgaagattccctcgtcctccaatcgtcttccatcatcgaaatatccctttgaagagctaagaaacttggtgggaacaaatgatgctattcgataattttcttcgattctatggtatatttggaaagattggaacataattaatatatatatcccacttgatgcataaagaatgttgtttaagaaacggagttctgaggtaactgactgacaagtgcttcgactcaaccattactacttaccaaatccacggctcttggcataccccatacacgcttagtggatatggttgaatcgctagttcccaccaccagcttctttatcttgacttaaaagagggcacgtcgatgtcttcctcccctacacgacaatgtagaacatgcatgttcaaacaatttgcaaatggaagatatattggaaatttgtgaaaggccatgaggtagatacacaattaaattcatgagttcataggtcagaacaaagctgaagcatgttctacatgcccaatcaagaaaaagtcaaacttttctcaatgccgactttactgttctaaaatgtatgaaaatacacattaatatacaattataaatacatgcaaatatatattgttataaactatataatggttacttgatatggatccttatacttaactaacttaacaccaactccctggatctataatgtatatattgggctaaacaggtcatgtggaagttatttgaaaagtacaccatatcgacctaattagattggaggctttttatttagttttttgtcaacaattagatttgagtaacggatgtaaccatattatttgttcctacctcctaggcattattatagtataaggtttttttttaactaaagatgatttaaaaaaaaaaaagtgggacctaaaccttaaaaattccaataacaaatagtatagaggtcctttttctctttatataaacccccaaaatttcctcttctctgtattctccactcaatacttatttcctctgtcttccttcgcttccctcttctctcaccacaatccgagagagagacagtactgtaatccaagtgagagagagagagaaatgaaaatg

SEQ ID NO: 29024 - DNA, 3003 bp, Unknown
  misc_feature (1)..( 3003): 2750-1469P.txt file - cDNA_ID_2999601; gDNA_ID_1620627; Annot_ID_47171
cttcagcgcgctgaagaaagacgcgaagctgcagaagcaagggctaaagagcttgagaaacaggtgtttattatatccagtacatttgacttttgtagacatgtttatatacaatgttgatggttacttttaagcttggtatgacttacaacaggttgcttctctaggtgaaggagcaaattttgatgtcaagctcttgaagaggtttgattttctcgtctttattatatagcctttgttcacaaaattgggttttcacgaactttgcgctgatccctccaggaaagaagcagcattgcgtcaaagagaggtccgtaatgcattcatatctaaaggatgttgttgcatttgttcttcgcaatatacatgtcctttattcttctgctagcttgtgttggcagttgctttgacagtaaagttattgaaaaggagaaacataaatctatttgcaggcagcattaagggctgctgaacagaaaagagatggaagaaatagggaaactaatgcccttagctcagaatttcaggtacaatgctctggtaaccaatactcaagctggtactaaacagtagtttactagactttattgtataaacctttcaacttgacaagggaacaatcatctcttctgtgttgtgttatgatcagagtttaaaagatgaagcagagaaatccacggaacagctccaggaggttgaagctgaaataaagtctcttcggacaatgatacatagaacgattttgagtcaagaagaaatggtttgcttacaatctaaactagaattttgtgcattgacggtttaactccaccttctttgtttcatttaactatatgattgaccaaccttgcaggaggaagttgttctaaagagatgctggcttgctcgctactgggaattagctgttcaacatggtaagagaatttttctctcgtaaagatacaattgttttatcctctgttgggtattgacctgcaatgatggatatgatgaagtaacctgttcttctcatgatgatgccaagggttcaaatggttttgaagatctcataaattggtcctattatgattaaaacatgattagagcatatgcatgtttcccattcacgcagtgtacttgtccactaaactgtatactgacatggagaacaactatgtgatccccgctagctgatcatttgcccttatttggaaatgtttacttatgcatttcattgggtcactcttaggaatatgtgaagatatatccacatcaagatatgaacattggtcagctttagctcctcttccctctgaagttgtcctttccgctgcccaaaagtctgaagattcctggcagacaggtttgatcttcaactatcctgccaatatttcccacataatcatttagtttgagtatataaaactaattggtaaaatcacatctcgcaggtggtagcgatcgcacttggagcaaagtcatcagtaatttcagtgatttgaatggagaagggaacattgagagtatgcttgctgttgaaacgggattacgagagatagcatccttgaaggtttatgcacacattttgatctgtttattactaaaaaaaactgtttcccagaaaatacacatctcattcatatcatttcttgcacctcataggttgaggatgctgtaatgcttgcactttcccggtatagacagacaaatgtggctcgacaagccgtcactggtaaaactatatctaaaactgattggcacatataaatactgatgtgatgttatacaacagacactcatctcatcttaatatccagatcccagggtgcaaggggaacctaagttctccgaaacatttggtgagtcacatccttaaactgttttcgttactatctagacagagtatcatataagtaaacaagcctctcaacaaaacctgttttcttgttcttcttcatctatattgtatttgaatcttatgactaagcaggaagggtttattctgaattttgaatgcagagttgagtcatgatgagcaacaagatattctctttaaagaggtaagttacatctttaccgggagagtttagcttttacttagcaggatcatatacattaactcaaaaaacatatatacatggtgtgtataggcatggctgctgtatttctggaaaagagctaaaattcatggcgtggaaagtgatattgcggaagagcgtcttcagttctggatcaaccgactcgggcaacattcatcttcacatgatgcaattgatggtatatttattacttgaagctaaatcagttaaagtaaagaatctgattccttttgtgtttgctgggacagtggaaagaggaatgagggagctaaggaagcttggaatagaacaacaattgtgggaaacatctcgtaaagaactcatcgactcctcttttcttccttcttattccgtttctgactacaatgacgagtgaccacctctactctcctctttgcctccaattttctttattcacgacacacgctcacataaacatacacatacacacacaaaggtaatcaaaatcattttttcctgctcgacaaagcttagaagaaacacaaaagaattcatactacatctgttttgctttcagactgtgttccaattgttgatatatgtttggcttccatgttgttacttgtataatactcttcgttacctcacccaaataacccaaatacaggttttttgagaacaaaaagctgaatttcatatagttaggggcaaaaatataaattttatatagttgagggcaaaactagaaagtttgtgtataaaaaaggtcgaaacgttaaaatatgataaagaaactggtctgtgacataccgcattaagatgggtcccatagaaatcgaaatgtggatcgtctccttccctatcttatccaggataacgataacaacactctctctctcactgcaagagcgcgaaacagagtaaggctcactttgttttagctttctcctctacttcgataatg

SEQ ID NO: 29025 - DNA, 3003 bp, Unknown
  misc_feature (1)..( 3003): 2750-1469P.txt file - cDNA_ID_2999601; gDNA_ID_1620658; Annot_ID_163693
actgatctctcatttgaatccaactcattatcattgcagttagacatgcttcaagaagaaaacgataatataatggataaggtcagtgtgaacgctctctttatctctaatgtaggttatttgtttgtgtttgctgcctttttgtacttgatgtgtatattcttgagttacatatgcagcttcagcgcgctgaagaaagacgcgaagctgcagaagcaagggctaaagagcttgagaaacaggtgtttattatatccagtacatttgacttttgtagacatgtttatatacaatgttgatggttacttttaagcttggtatgacttacaacaggttgcttctctaggtgaaggagcaaattttgatgtcaagctcttgaagaggtttgattttctcgtctttattatatagcctttgttcacaaaattgggttttcacgaactttgcgctgatccctccaggaaagaagcagcattgcgtcaaagagaggtccgtaatgcattcatatctaaaggatgttgttgcatttgttcttcgcaatatacatgtcctttattcttctgctagcttgtgttggcagttgctttgacagtaaagttattgaaaaggagaaacataaatctatttgcaggcagcattaagggctgctgaacagaaaagagatggaagaaatagggaaactaatgcccttagctcagaatttcaggtacaatgctctggtaaccaatactcaagctggtactaaacagtagtttactagactttattgtataaacctttcaacttgacaagggaacaatcatctcttctgtgttgtgttatgatcagagtttaaaagatgaagcagagaaatccacggaacagctccaggaggttgaagctgaaataaagtctcttcggacaatgatacatagaacgattttgagtcaagaagaaatggtttgcttacaatctaaactagaattttgtgcattgacggtttaactccaccttctttgtttcatttaactatatgattgaccaaccttgcaggaggaagttgttctaaagagatgctggcttgctcgctactgggaattagctgttcaacatggtaagagaatttttctctcgtaaagatacaattgttttatcctctgttgggtattgacctgcaatgatggatatgatgaagtaacctgttcttctcatgatgatgccaagggttcaaatggttttgaagatctcataaattggtcctattatgattaaaacatgattagagcatatgcatgtttcccattcacgcagtgtacttgtccactaaactgtatactgacatggagaacaactatgtgatccccgctagctgatcatttgcccttatttggaaatgtttacttatgcatttcattgggtcactcttaggaatatgtgaagatatatccacatcaagatatgaacattggtcagctttagctcctcttccctctgaagttgtcctttccgctgcccaaaagtctgaagattcctggcagacaggtttgatcttcaactatcctgccaatatttcccacataatcatttagtttgagtatataaaactaattggtaaaatcacatctcgcaggtggtagcgatcgcacttggagcaaagtcatcagtaatttcagtgatttgaatggagaagggaacattgagagtatgcttgctgttgaaacgggattacgagagatagcatccttgaaggtttatgcacacattttgatctgtttattactaaaaaaaactgtttcccagaaaatacacatctcattcatatcatttcttgcacctcataggttgaggatgctgtaatgcttgcactttcccggtatagacagacaaatgtggctcgacaagccgtcactggtaaaactatatctaaaactgattggcacatataaatactgatgtgatgttatacaacagacactcatctcatcttaatatccagatcccagggtgcaaggggaacctaagttctccgaaacatttggtgagtcacatccttaaactgttttcgttactatctagacagagtatcatataagtaaacaagcctctcaacaaaacctgttttcttgttcttcttcatctatattgtatttgaatcttatgactaagcaggaagggtttattctgaattttgaatgcagagttgagtcatgatgagcaacaagatattctctttaaagaggtaagttacatctttaccgggagagtttagcttttacttagcaggatcatatacattaactcaaaaaacatatatacatggtgtgtataggcatggctgctgtatttctggaaaagagctaaaattcatggcgtggaaagtgatattgcggaagagcgtcttcagttctggatcaaccgactcgggcaacattcatcttcacatgatgcaattgatggtatatttattacttgaagctaaatcagttaaagtaaagaatctgattccttttgtgtttgctgggacagtggaaagaggaatgagggagctaaggaagcttggaatagaacaacaattgtgggaaacatctcgtaaagaactcatcgactcctcttttcttccttcttattccgtttctgactacaatgacgagtgaccacctctactctcctctttgcctccaattttctttattcacgacacacgctcacataaacatacacatacacacacaaaggtaatcaaaatcattttttcctgctcgacaaagcttagaagaaacacaaaagaattcatactacatctgttttgctttcagactgtgttccaattgttgatatatgtttggcttccatgttgttacttgtataatactcttcgttacctcacccaaataacccaaatacaggttttttgagaacaaaaagctgaatttcatatagttaggggcaaaaatataaattttatatagttgagggcaaaactagaaagtttgtgtataaaaaaggtcgaaacgttaaaatatg

SEQ ID NO: 29026 - DNA, 3003 bp, Unknown; identical to SEQ ID NO: 29025
  misc_feature (1)..( 3003): 2750-1469P.txt file - cDNA_ID_2999601; gDNA_ID_1620627; Annot_ID_162526

SEQ ID NO: 29027 - DNA, 3003 bp, Unknown; identical to SEQ ID NO: 29024
  misc_feature (1)..( 3003): 2750-1469P.txt file - cDNA_ID_2999601; gDNA_ID_2926186; Annot_ID_140815

SEQ ID NO: 29028 - DNA, 3003 bp, Unknown; identical to SEQ ID NO: 29024
  misc_feature (1)..( 3003): 2750-1469P.txt file - cDNA_ID_2999601; gDNA_ID_2926186; Annot_ID_200656

SEQ ID NO: 29029 - DNA, 3003 bp, Unknown
  misc_feature (1)..( 3003): 2750-1469P.txt file - cDNA_ID_2999605; gDNA_ID_1620693; Annot_ID_48624
gcatcgcattctcttcttcttttgcttttgttgagttgcgtaatgacttttacgtgtatccctcgtgcgtgtgtacgaatgcgaccctttacctttctttgtctcttgagaagttggatattcacttttacattatttaaacactatatcagtaacataaatgaagtatagaaaaacctatcaaacatattttgaatgtttttattctaatgctttgaaaaagaaaaagaaaaaatatatatatcataatacttaagtactatggaatacgtaatatacaattatttttgtatgtgaatatccaatttcatttgcgatgttaatatacattttttagattttatcatcaatcatggcaaaatatagtcttttgaatagatgagcatatccttagtagaagccactcgaagcaatcatggatgtcttccaatgaccatctaacatttaagtcattattggaaacttaaagaagttgtataacaaaatacttagatgttattatgaggatgctcttaaattagtatatgtcaagtgttgttattgagaatatagcaattacttctctctctattatgctcatgttggattgtgaatccttaagaaaaattcttaagactgatatttataagaaaaaaaaactgaacatggttcagataccgggtttcaaaacattatggtgttaagtccatacaaatgtacttgttttaaagtagaaaacatgtgtggtgttggtcaagtttttctattacatcctatcaaagcatgtacacaattttaggtagacgtaataatgttgttagtattctctttacggaagatgtgtgtgatgcgtcctatcacatattgtcattgcaaagtgtgttagctcattatgcacatggtggtttagctctttatgtagattgttaggatctggtttgaaaaaataaataatagttacttaacattcatacccaaaaaaataataaagaatagttgataatatttcatgaaaatcgatttgttttggtggacatacatcgtcgtctctactctattgtctcgatcgcaagtaatatgacaaataaagcagcagccctagcaataaaacatgtgactactaaaataggaggatttatctttacttgacgaactataaattaaatatctactcttttaccttgactttgaaaattactttttaagattgccttttacaattatgtggaatagcggcacacatttacgtaaatttaacttcaatttaaaacaatgatttattcattttcatcatacaaacttttcagcacattttctcctttttaatataattttatatattatagatagagatatagatcaaacaatgtatgactttaaacttagattgtaaattcttcttactatgctcgaaaatttcatctacgtatatagatctattgtaaacctaagtttaaaacggaaatcagttattgatagtaatctagtaagtttaatcaactatgcgttataacataatgaaatcatatatacgagcttagatatctaattcagttaatcaacaagtcaactaaacaaggcttcacttttccacacctctacagatcgaaattattatatattcgaattatgtaactaatgtaagtcttgcaacgtgtggatagatacaaaatggatatgtccataggtatacatattaaaaatataactagaaatggtatattactaacaaaattttacccccaaaggtggccatccactagtagccacatgcttatctagtagacattgaacatgataaaaagtgccaaataagtggaataatcaatgggaatcttcattcctataaacaaaaacattttcaagcctatgacatagctagctactctacaacatgtatatgccaattgggatataaatgtattaaagcataaccattaatttgacaaatagaaataaatagttcagaatgtataagttgagaaaagttataatgattggtagggagagactcaaaaagaaaaaaggatgggtaatgggacctattttccccaacatcccacatgcacacttccctctccattctctcacatttatttctttcattctaatttatccattccgtgtgtaacatattcactaataatctcatctcactaactcattcattgattgtgatatgtttatctagaattagtgttttaacactgtgtctacatatgatttccttttcattgtatgtgaacatgttaactcactaatcattttgtattttcgagttaacatgagtctccacttcggtagactaaagtaaagataggtttgagtataataaagtttaaaatttgctttaaaatcaatatttataaataagtttttatcataagtgatttttgtatgttatattggaccttgtataaacagactacagaagaaaattatttatgagaacttgtaatgttagagtggacctcgtataaactaattatgtgggcttttaccataaactatttatgaaaattattatggcccacaccactataactaaagcccacatatttagcagcccagtttcattgtaagagacatgttcgctctggaactagaattttctggtttttgggtatttgttttcttatgtgtagagaaatgatggtaacgattaaatgttgtgtattacaatttacaatggtaagacgattaatatatttacacacaattttgttgttgctgtaacacgttagtgtgtgtgatgatagaatttcataaagctttaactacgaggggcaaaatgttaattctaaatagttgacagcagaaaaagatatgtatacataatataaggattaaaacgtaaataataataaataaggcgagttaaattaaaaccctgttaaaaccctagcttgaaacacatgtataaaaacacttgcgagcgcagcttcatcgccatcgccattctctctctcatcaaaagcttttctccttgattttcgcattctttagagtcttaacgcaaagatg

SEQ ID NO: 29030 - DNA, 3003 bp, Unknown; identical to SEQ ID NO: 29029
  misc_feature (1)..( 3003): 2750-1469P.txt file - cDNA_ID_2999605; gDNA_ID_1620693; Annot_ID_164848

SEQ ID NO: 29031 - DNA, 3003 bp, Unknown; identical to SEQ ID NO: 29029
  misc_feature (1)..( 3003): 2750-1469P.txt file - cDNA_ID_2999605; gDNA_ID_2926187; Annot_ID_140849

SEQ ID NO: 29032 - DNA, 3003 bp, Unknown; identical to SEQ ID NO: 29029
  misc_feature (1)..( 3003): 2750-1469P.txt file - cDNA_ID_2999605; gDNA_ID_2926187; Annot_ID_200741

SEQ ID NO: 29033 - DNA, 3003 bp, Unknown
  misc_feature (1)..( 3003): 2750-1469P.txt file - cDNA_ID_2999608; gDNA_ID_1620693; Annot_ID_48627
caagcccagtcagttcaccagttacggccaggcccatttcgattttgtatcataagatacacatcgttgttagatgatgatgatactattgacaaaaacaaaaacattatcataaaacaaatatcttaccgagcagatcatttaaaccgataaatttgttcgggaggataaaatagactcagaaaatgctcatgaggccatttcttcagtaaatgaatcatctagaatgttagtaaacggtatagattcaagaattagtttctgtataactgttatgtacaacaccatgtggactgaatacatccgatgagtatatatacgaagtacaaacaccaatatacatttcaaacaacagcatggttgtagtcatggtaatggaatgtcttgtagatgaagtgtgatagccactttgaagctgcaaaacttaaaacagccgccacaagcactgcaattctagccacattcgacattgtcgtttgcttcaacaccgccatgactccgatcatagcaacggatgcgatttgtaagatcacctctagcgcattgagatatttgtgagctttcttgcagctgctgcagttctcaacatgcgaccaatacctggaacacgcaacttttatcattaggatgtttagcactacttttcattaaacctcacaagcgagataaataacctgtcgaagagctgttctcggggaggcgtaggaggaagaagaaatggatcaaactttcctctccaatcgactcgagcctcgctgtacttgttaaaccatctcctgaatgtaaccacattagcgtctgattttgttgggataaagcaagctttttgccagttttcagggcctctctccagtatcttccgctcctacacacattccattacaagatacaaatcagtctggtacattgatcagcctctactcagaacaatgtgtgtactagatagatttggaattacctctacatgaaggaggtgcaaatctgagtctagaatcgtattttgaccaatgtgaaacacccatctagggacaatcttatcaataaatacaccaaaattcctcgggaacgtccatatcagcctactacgacctggactgaccggaatacatataaagatcaaagacaatctccgctttgacaatgccgcctgtatacagaaccatactgttaggtaactaaaacatgtgactctaaacaagaaaatcttgatacaagttaaaatctatgaccttgtcagaagcagctggtgcgggatactcatgttcctgctctggtagagggtctgtggaagagcgatacacacatggtgcaataaaattagaataaccccattcttgttttgaaaagaaccctttgttgtctagttttttaacgttgatttcgagtggtttccccccttctctgtcaatcttctctgcaagaagaatctgaaggttggtaaaaggattaaaacaactatttgaaatacaaattatgtatttgccttttggtttaggaaaccgcatcagtccataatgtgcataaggaacatgagccgggtccatgaggttttccaccaagacatcgtacctgaaagatttcagatttacacaaaaacatcaacggagaattaccacacatagttgaaatgatgtaaaagccaatagatacccgtaaggaatatcacgattccccatcaacttagtgaatgatgggtcttctaactctggaatgtaaggaggcttgttggtttcaataatgtttttgtactttggatcactgtttggccaaaaccaaatgatctcatgctgcacagtactcgggtaaacagctacacaagcttgcttgaaagtgtggacctgatttgcattaccaaaataatcattgatacaaccaaagactttgactttatgttccatataaaccatatgctaaaccaatctaaaacaaacaaatcatcatcaatagctataaaaatttaccggaggaccatcaggaggagcttgaggaatgagtttacagtcaccggaaccattaaagcaccatccatgataaacacattgcaacctcccccattgatcaatccttccatcagacaaaggagcaagacgatgaggacacgtgtcatccatcactttccattgcttctcgttcctatcccaccaaacaaccaaatcaatccccataactttcttcccatgaggaaccttcttgtcaagatcgcaaattggcatcactgggtaccaattagcgtaccaatcgaacttatccgacccgggttcgaatagggcttcaggttccggtggagaattcgttgacgtagcggctgatgatgatggtggtgatgatactgcggttgtgaatcgacttgatttgcgggtgataagggaattaggagaaatgggtaggcttggattggagaaggaacatctgaaacgaggtttcgtattgagaattcggagcgatggaagagcgcatgcagcaagagcagcttccatggcgttgtgtggtggtaacaaccggagagacgaagcaaatgaaagtcttctttaccaatctcttttgacaaatttataatccaacggttcaaattaaaatatctcaggatgtatttaaaccaattgataatcatttttctggtttaatgaaaactaaaccggttaattgaaagagaaagtgtcggttgagtgtgaaaccggcgtcggcaaagtgagggtataagggtcctttccagacaccacagcatcagtttcttcaatctcccacgtctgagattgaaaagtttgggagaagataaacaaactcaaaatacctcagctttagatcaaaatctaaaaacaagagtttcgtgcagtggtttcttagagatctagtagattagagaatttggatttgttgaagaaaagtggatttggtacgattctataggtttccttcttctctgaagctactatagagagaatctgcgagctcaatttcgtagtaaattagggttcgtgtttcttggtaaagatagaatcaatg

SEQ ID NO: 29034 - DNA, 3003 bp, Unknown; identical to SEQ ID NO: 29033
  misc_feature (1)..( 3003): 2750-1469P.txt file - cDNA_ID_2999608; gDNA_ID_1620693; Annot_ID_164851

SEQ ID NO: 29035 - DNA, 3003 bp, Unknown; identical to SEQ ID NO: 29033
  misc_feature (1)..( 3003): 2750-1469P.txt file - cDNA_ID_2999608; gDNA_ID_2926187; Annot_ID_140852

SEQ ID NO: 29036 - DNA, 3003 bp, Unknown; identical to SEQ ID NO: 29033
  misc_feature (1)..( 3003): 2750-1469P.txt file - cDNA_ID_2999608; gDNA_ID_2926187; Annot_ID_200744

SEQ ID NO: 29037 - DNA, 3003 bp, Unknown
  misc_feature (1)..( 3003): 2750-1469P.txt file - cDNA_ID_2999612; gDNA_ID_1620628; Annot_ID_47192
caattaacttactcacataatcggaatccaagttagcactaatacaaagtatgtctttatgtagcaatgttgcatcgttttcaaagaagtgttattcattgcttactttcgtaatgatgattttttcccactcgtttgtcgttactatttactatcaatgatttataaatcatcgttaatgaaaatttagatctattttagtaatagatttgtttggtttagtacaagggattgtgaaaaagataaatttgatgattaaagaggacgcaaagtttggcgagtctttactctatatagagatagggtctaagcattcacatgcacttatgaaccgtccaacatcaacgttaataacgtgtgattcgtatcaaagtttacatatatttggcaaactttaatttattatcttgaaaactatatgtttcatttttgccgttttgagtaaagaatcgtacacccatcaattttcagatatatatgagccaatccataattaatctgattgattagagagaacgttataaacatctttaagatcaacagtatattattggttgaccaaaaaaaaattattttgatggtgaaagtcacataaatcaagtataagttcttgtcaaatttaaagtaatctctacgaataataatattggatacatgaatcataatttgtgatggtataatatatggtacctttcccgtgcaaaagaaattgagtcattgaagtgttaagcaatagtttgaagtttttatattgaatattacaaagtcaaaagcccttaattacatcatacacatcaagtcatgaaatacatataatatcacacatcaacttgatcattcataaagtcttacgttccatcttctctacaggacaagagtctcccaagatatatatacccactaatacccaaatccatagacacaatctccctctatatatccatttctccaaacgaaaacaaaaaaaacattaagccaagaaccgcatatacgaaccaagaacacatcatcgttagttctaattatgaagaaggatacatgcaaggaaggatcatcaatctcgagaaactcatcggtgggatactatgatgaacggatgccagagggtgttccgttcgagtgggagatgcagccagggactcccattaatactcaaccacgggaggttgttcctccattaagtcctcctccagctatgctcagcctcggcctccccaagccatccatctccatcgaagagccaaagaactttgtgtttccaacgaagctgaagctgcggaattggaaacatcttcattgcaagagatatttttctagattgactaacaaaatggttttgtcttcaatttgtttgtaccctgataaacgctacatgtggaaaaaatgaatcaaacgtatggaaatgggccggggtcgggcaagattttttttataataataacaattttttaaaaaagttgaggacttataggcctattgacaaagattttctagtaaaattttctatcataggttttaccatctaaacagctagcgtttgcttttatgttgttctaaatctgttaacagtgtttttaaaaagtaaaaaaaaaatagtttatcagttaaacaaagtgaaccaatttcaagttagctgcgaatactacttagtagtactacgattattgttaatatcagaaataattgtttatcaaataaagaatgaaagttgttaaaatctctgatcgtgtattttttgtcaacgaaatgttcgtattaactgaaacagaaatgtcaagttatacgtcgtcttcattaactctgtctctgaccaatatgtgtcgaaataatcatgttctgatttgtttgtcagaaaatcagcggatcggaacctctgtccgggggagaggctgcttggtttatttgatacttttatcatttccttaatcatacccccttcattttctgaaactattttcttacatttcttttgtttcataattgactgcaactctccaagtattagtatcaaatgtaaactttcataaaattaattttattaatcgctccagtacacaaaaacctacttttaacgtgaaacaaacatcttacttagttaccactacaatcatctaactaaccctatttactagtatttgtttttgttttattctacaagattttgaaagtttctagacatgaccaaaccggattctaacaaaaccgactaaactaaactcttaactcttaagtgaactaaaccgactaaactaaagtcttggaccattcccctaagtgcaacacaaatcggccacgatctaagcgaacgatgagatattaaatgacgaaaagatggacctaacgaccaacgcctcctccgaatcaatagttaatgcttacccaactcttttccttattttaccatctctctctgtttgcattgtttatatataatatgatcggagccaaaaggtagagaactatcacttcggctaattgtgatgaagagtgttttaaatcattagtttttgaggttttcagattcgtttcatacattgaactcactggttctttgtcaaaagaaactatcataaaaaagattcagaaatagcgtttccttcaacagcttctcaaatggtaagtggattattctctatcaaacttgtaattacaaaaaaaaacttttaacaacgtttaataactttcaaaaacttcacaaattaatgttttaattttttaaaaaacttctcaaatgtaagggtgaggcatagatagtttatacttgtaatcataatttagtttttaacaattctaagttctaactgttagagattgtacactctaattctgatttatcgtaattttgataaatcctgaattctaactgtaaaaccctaatatagcggattttagacgtgagaaatggtgattataaattgagttaggtttcaacaagaaattagatgcttagttttgacttatatattcaattatttttgttgtgtataggcagaagaagaaatg

SEQ ID NO: 29038 - DNA, 3003 bp, Unknown; identical to SEQ ID NO: 29037
  misc_feature (1)..( 3003): 2750-1469P.txt file - cDNA_ID_2999612; gDNA_ID_2926188; Annot_ID_140871

SEQ ID NO: 29039 - DNA, 3003 bp, Unknown
  misc_feature (1)..( 3003): 2750-1469P.txt file - cDNA_ID_2999616; gDNA_ID_1620647; Annot_ID_47625
aactgttttgaataatattgacaatcatttttgtagaatgctgagtggaagattagtatgtcattcatttaattacacttaaatatacatggataattaattaggataagttttcttatcaggcgttttcgtgggacaagtacataattaggttaatttcttatgggattctactctctttttttaaaaaaaaaatctagacatttccaaatgtcgatcgaaaacattataaccgaccacctgtataactttccgtcgatgtcccccgtatgtacaaaacttaacaggtcaccttatccgtgtacgtggccggatctcattgcgtttgttagatttctgtgatgacgtggtgttttcctttacactaggaaacttcaatttggcattggaatgtaacatatggctaaagtaactttatctgcttaacatatttttcaaatatctaaaactatttctagaccgaattttagatatgtgactaagaagatttcttgatttacatcaaccaaaacaagagcaccatgtgctgtttcttatatggatataacagttcgaaataagttatcgtcttcatacatccctagaaccccaacgactggactaaaaccctcaacttctaaaataagacttattgtagaataataccaaattgtgaaaaaaaaaacaaatataaattattgactatagtttgaagtaagtcgtaattttttccgcaaggtaaattcattcaaagttaaaatgtggagagtgagagaaagagagtcgcgtggctattgggtaatgagaaacgattggacccatttggtatcattcggaagtgatatgtggcagagggcaatcatacgttttcgtcatagcgttagattttcttacagtttcttagagattatttcgattgtttgtgtcaaacgagtttagtatgttactgctattgaacagtagtattttctcatgtatcgatatgaatacgtttactctttttctttttttcacacaatcagatgaatatagggatgaatatacgtagttttgtctttgtcatatactagattatattcccaccagtcattttcctatgtatttaacaagacaagacgtagaaaaatgagaattttagtacttgagttaacatatttaaagattatattcccatcagtcattgaacatatgtgtacatatatatacgaggagaatctataacttagtaaggagggaaatatgagattttatttctatagagaaaagaaaggataaaacctctctctgccaacactggccaccgtctccaaagtccatcccagttaatttttattttttggaatcttcttatgttattactctttcttttcttatgacaacatgtcaacatgtgacctgtcgtcttctactttcttttcttcagcttttctccttttaagcagaatattcaatctatcttcaaattcatatctgagttttgtactataaaagaaaagcagacattaaaaaagatttgaatataaaacaaatgtattggagtggtaaagcacatcttcatcaaacatttttaaggagcatcaatctaattggtcgatggaaatggaagtaaaggaatagaagattgtttgtgttccatgatgatgtatatatatgcctaattaatgttactgttagttacctttggataacaaagatatttaaagcggtttaatgcttattaacggttgatggatgttaccttttctttttgacatcacggtagatgttacctttcataggtgttgaatagacagattggggacgttaattagtaatgatgtaattagttagagctaaatagtgctaataaatatatgtaagaaattgttcggaaagtaactaaaaaaagttcaattcatgcaagtagacacttcaaatgtgataaatgtataagtatgatgttaagcatgtgacccttgagagtcgattagggcactgtacaagattgacccaaatagttacaaactacaagtgaactctcttccattacatatctacgtgtattgaggggaccattatcgtacgtatacacgtatatatgttttgccctaaattcccaattttaattcagcatgggggacggactcattcaatagcatcgtctttcactttccttcttcggtttaaaatctcattttagtttctgatccaaaaaaaaatgtttgatcaaagatcaaaaacttagatagaaacaaactgtttttttttcttaaatcaagaaagtctaaaaaactaagatacaaaaagggactcgcagcggcagagagataagtatcttacgggccagcagataatttctatgttacgtccctttcatccccattgcatattgcatatgaagacaacggatattaactaaaatcttccaaaattacggtataatgaataataatacacttctgtctcatatagtattctattatattgttcgaaaatgttcttatttacatatctatttatattgttaattgattgcggctattactgtggatattcatcgtaactattttaatcaatacaaatcatgcaaaatagtgaatgacttagaaaagttgaaaccacatatgattgagtttagggggaaaagtataaaagaaagcatgactagtatgttactatgtagtaagcttcaaacatatatttaagaaaatactatatatagatacatatgatataacataacattaaaatatatggtgaaacattttttcttaatatcctaagcttcaaacatatacccaagtagagaagagttggagtattcattctttggttaaacatagacctaatacatagctcatatggacaatttttcgacaaaacaaaaatgatagcaaatgggctaaaatggtttcatatcgaaaagcccaaaccattaagccaaaacgacgtcgtacgatatgacagcggcgattcctataaccaccaccagaggttaaaaagtctctctctttagctatcttttttgtgttaccggttcaaatg

SEQ ID NO: 29040 - DNA, 3003 bp, Unknown; identical to SEQ ID NO: 29039
  misc_feature (1)..( 3003): 2750-1469P.txt file - cDNA_ID_2999616; gDNA_ID_2926188; Annot_ID_140886

SEQ ID NO: 29041 - DNA, 3003 bp, Unknown
  misc_feature (1)..( 3003): 2750-1469P.txt file - cDNA_ID_2999634; gDNA_ID_1620666; Annot_ID_48054
cgaggaagaaatggaacagtgaagagacgtctcccaaggcaacggctaaagtcttcaggaagcttcttatgttcggaaggaaaaagtaaaaccgacgttggaattcttcttctccggcatcatcgaacctttgttttgagacgacgtcatgttgagttcagttaaaaagcctctcttattctttaaatttttccttgtgtgatattaaatactgtttttcattttattgttgttatcagtttgatttgtctgtttatattacatttgttgatgtgttgtttatagcattgaaagtgggcatttgagtgtgtataaaaaattggtttggtgagttgaataatgtaagaatcttttgtatttttctaattaaactgtttatgatcattaggagaacaatatatggggatgtgttggaatcatgaatcgtaggttaaatcctacaagaggaaaagcttcaggagacagagaagatgaagagaagagaagaaaggaagaagaagaagaagtcgtgacaaagaaagtcagctaatagacatatctccgctatttaaagtcgagtctaagcctttatacacttaaaggttgagggttcgaacccttgttatgtctttttgccctaaaagaaaaaaactttctcatgaaattccgtgagatgattcttccattctaagcatttggttctgttagattgataaagaagtctcctacagtaccaaggcaatgtgccatccatctacaatttgtataactatatcttttggtaacatgttcccatcaagtgggaatctaattcccctgttattcttttcacgttctaagcatttttcaagctgtttaccattttgaaacttagtaacgatcaaaaagaataagggatttcgtcacgtaaattaaatagaatctgtatacaggtcatttaaaaaaatattttagtaagatacacaggcacagctcaacgtctgatcttggtttgtcataaacagcagagaattctaccacaaggaagctctggtactatctttctcattaagcatccgcgactacaatattccccaatttattaaataaacttttccatgatgcaaaagtaccttttattaaacactacgaataaataaataaaggtgaaacacccatttcaaagaaatggtaacgtgtctttttcattaggcgagactagccaatctaagcaaacagagtcgtctttatatctaaacgaacattttgtgaaagaaagagagactaaggtgaatccatggcgtccaagattgtctcagccatagtatttgtgtttaacctcattgcctttggtttagccgttgctgctgaacaaagaagaagcactgtgagtcacatctccacagcgatatctaatttgaacaagatgataattatgtgatctatcttaatattttggagttaaatattttttggtggggcaggcaagggttgtgcaggacactgaggtgcaatataactactgtgtgtatgactcggacagagctacagggtatggagttggagcctttttgttctcagtggctagtcaaatccttatcatgctcgttagccgttgcttctgttgtggaaagcctctcaagcctggcggttcacgcgctcttgccctcattctcttcattgttagctggtttgttattataactcaattagtacatcacatatatatccctagcttaagctagcttagacatatctggcgtttttatttcgttcaaagatgattcaaaactcacaatcaaacatttacaatagatcttagtttatagaactagaattatcattaatctatcatggtatcaaaatcgcagtaaatcttattatcagcttacacattttcattctcttttcaatgcacagttaataattcaaatctaacatgcgtctcttaatccgttatgaagctaaacgtgcttattaaacaaccgacattgtgctaatatttttacaacttgaatgttgttttgttggcgaaaaaaaggatgttcttcttgatagcggagatatgtctattagctggatcggtagagaatgcataccacacaaagtacaggacaatgttcatggacaatcctcctgattgtcaaactctacgtaaaggcgtctttgcagcaggcgcctcattcgtcttcttcaacgccattgtctctcagttctactatttcttctatttctctgctgctgaggcctctctttcaccttactagaggttcttaaccaacaaataagttttattttttttctctctaaatgtgctatttgatatgctaatatcatattttgaggtgggttttctatgtacaactatgatgaaatgttacaactatgacaaaattatttgaaagtgatggtacacatgagatttgtagatttatttgtatggttattagatcgagttgaaatgttgttttaaaaagagtggatgtaatttgacgattttgtgacatatgacataatgctcttattcattgaataaggtttgagctattctcgtgaatgcgtaaattcaaattcgtataatgcatacttttgacagagtaacaattgtttattactggagaaacttatccaaacatgagaacgtccataacaactagtagcaagcaactagctctatctatctccttctcccatgccaaagggtatggaatcccatcaacaccaatcagcaatcaccatccctttattgcaactgttccatttgttaacccaaaaaaatagtttaaagacattaaaataaaatatctaaggagaaggaaatctaattctcaaattctcattggatattaaacgacgacgtggcagatacttagttcaagataatgctatccacacatcttcggtgacctctgtggggaccaatcttcctttgtccgaatatctcatttgctagtacataaacgcacatactctctttcgcaaaatatccactacgatagttttcttcagcaatcacactctctctttgttcgagtaccaacaatg

SEQ ID NO: 29042 - DNA, 3003 bp, Unknown; identical to SEQ ID NO: 29041
  misc_feature (1)..( 3003): 2750-1469P.txt file - cDNA_ID_2999634; gDNA_ID_1620666; Annot_ID_163946

SEQ ID NO: 29043 - DNA, 3003 bp, Unknown; identical to SEQ ID NO: 29041
  misc_feature (1)..( 3003): 2750-1469P.txt file - cDNA_ID_2999634; gDNA_ID_2926191; Annot_ID_141028

SEQ ID NO: 29044 - DNA, 3003 bp, Unknown; identical to SEQ ID NO: 29041
  misc_feature (1)..( 3003): 2750-1469P.txt file - cDNA_ID_2999634; gDNA_ID_2926191; Annot_ID_201030

SEQ ID NO: 29045 - DNA, 3000 bp, Unknown; identical to SEQ ID NO: 4636
  misc_feature (1)..( 3000): 2750-1469P.txt file - cDNA_ID_2999638; gDNA_ID_2926191; Annot_ID_141061

SEQ ID NO: 29046 - DNA, 3000 bp, Unknown; identical to SEQ ID NO: 4636
  misc_feature (1)..( 3000): 2750-1469P.txt file - cDNA_ID_2999638; gDNA_ID_2926191; Annot_ID_201071

SEQ ID NO: 29047 - DNA, 3000 bp, Unknown
  misc_feature (1)..( 3000): 2750-1469P.txt file - cDNA_ID_2999659; gDNA_ID_2926192; Annot_ID_141104
aaattcttcaccagaaaagatcacttacctaaaataagactacacaagacgctacaggtaatcacagcttcgattggatctggaaattcagatgcaaaggaaaaacaaacggaggaactactaaagggaagaggaagagtcgaatcaacagagtttacttccacatattcgaggcgtattcggaacaggacttgtaggagatggtttcatacgaacaccggcaaaaaggtcaacgcgagacatggaacgatgaagatggagagaagaacgcgagtccaacgccgccaacatttccatgtatttcacgcggaactcgcgagcacaaatttctctctgaggaattcgaattgaccggagaacggagaagaaacgacggagactttgttttgtacagagcggtggtttcttgttaaaagaagaaagaacgaaaatggtttaaccgaaattgaagaaaagcttgtctcctctttttactcgtggaaattaattcttgtatttaaagtattcacggaaagcatgtgtgtatcaattattaaccgttggattttagatggacggtggagatctactttttagttttatttttgtcgtctagtttctttttattattggtgtgagattcgaattttctgaaaagagataccatgtcccgctgggatggataaacttcaacattagtttattttgttaagaattaaatgagaaacttattcctcattattttatttcgactccttagctttttatatctttcgatattcaacccctaactttagttatattcttcatttgaccacacatcttgtattgattgacacaggcaaccttgtttttgttgtgtaggcctaagttcatggctacagaacataattcttgaagattaaaatgctaatggtgttcacaaggaggagtttaacattttctaatcttttttgttacctttcaaatagaaatctcatatactaggataagtatacatatttcagtaatcatataacaaatatttaccgctgaagtcatcaaacttatatatctgtgttagtgtgtgtagtagataaagctacatatttgcaacctgatcattggctgttgttgcttgctgtgagaatattggttcaagtccatctggtttagtattcgtttctggtttaaagagctaaccgagtggagctaaaactactaaactaggttacaatttgggctgaaatagattgttaggcccaaacagagaagagcccaggtgagaaattttaacggcttgtaacagaccacaacgagaaatgaagcagagtattgtcttcatttcaagtttcaaccttcgttttgattcttactataatatctatgacaagaaatctgtctcttagtaagctcaaggaaatactcattatgaagagacaggagtataggatcaatcctgataatggtgaagctcatcaacgatttgttacctctttaataactatgtgaaactaagttctactacatgatttcgtttattattttgaaatcaaagactaacgcaaaatgttgaattgtataaagtcaatatctggtgtaaattggaagaagggtagagagggtttggtgggatcaagaatgatctgattctgatgtgaacaagataagattcgaatgtttttaaaacccacctaattaattagcattcatttatttcatgtgaatcagctgtgtcattctctatggagtatacattttgactttaacaccactctttcacattctattatcgtctaattatacaacgtatacggaacaatgaaaatctaccaaaatgacgaatcgtttctgcaattttttgtagtatccaatgattgaattttttttataagatgacgatgaatgtgaaatcttgaagtgaaaaatttgcaagcactattaatttgggtgcatacaccaaacaaatcagtcatgtctatttatatatttttgtcactactctttaaataccactatgtccctctatataatcatctataataaaaccgtaattgacgctagaaaaatctcttttattttaattctttttccatggctttaagaaagcaacgttaaagaaaagtagggttgtataatacaaagtagaaagtagtagtcatgtgcattgtgataaaacaatcaaatcgtggatccacttttattaattagattcgagcctgagtgaccaatagttactatctcttgccccaccaaagttagtaataacaaaaatataaacctaatttgtcattagaaagctctaggtggttgttcgttacatcatacaaaccagcgcaaaaaccgttaacattatcatatctatgtattttttagaacgaaatgattgatgcgttgtgcacacgagattggtcactaagatttcgtttgcgtaacatatccactcctctctattcatagactatactctatacatactgataacatacaaacagttatattgaaatgcatttaaagtatttgttctcttatctataagaaaacaaactaacttgatatcaataaatgaaaaaacatatatcgtgaagaaatctgtatcggaaaaaaaaaacagaaattaaaggattgagtcaggtatctcttaacggattcctcttctctaccacagaatctgcgggaaatttcaacggtcgaatctcataaattactaaagtacccttttaggtccctctgacaatgacacgctggatcgtgcgaaatcgacgccttaactgtcggtgggtcctaatttctagtggcatttcaccgtaaataagaccaatggcaaagggactaaaccggcaaatagaactttagaaaacaaaaagagaaaccacagaaagcagtttgcttctaccttttatttttgtctatataacaacaacaacattgacatatcaattcacacataaactcactctcactctctcactgtcggcaaactaacttattcacttttccggcactgattctgctcgggaaaaacaactccggcacaaaatg

SEQ ID NO: 29048 - DNA, 3003 bp, Unknown
  misc_feature (1)..( 3003): 2750-1469P.txt file - cDNA_ID_2999662; gDNA_ID_2926192; Annot_ID_141105
atatgtcaatgttgttgttgttatatagacaaaaataaaaggtagaagcaaactgctttctgtggtttctctttttgttttctaaagttctatttgccggtttagtccctttgccattggtcttatttacggtgaaatgccactagaaattaggacccaccgacagttaaggcgtcgatttcgcacgatccagcgtgtcattgtcagagggacctaaaagggtactttagtaatttatgagattcgaccgttgaaatttcccgcagattctgtggtagagaagaggaatccgttaagagatacctgactcaatcctttaatttctgttttttttttccgatacagatttcttcacgatatatgttttttcatttattgatatcaagttagtttgttttcttatagataagagaacaaatactttaaatgcatttcaatataactgtttgtatgttatcagtatgtatagagtatagtctatgaatagagaggagtggatatgttacgcaaacgaaatcttagtgaccaatctcgtgtgcacaacgcatcaatcatttcgttctaaaaaatacatagatatgataatgttaacggtttttgcgctggtttgtatgatgtaacgaacaaccacctagagctttctaatgacaaattaggtttatatttttgttattactaactttggtggggcaagagatagtaactattggtcactcaggctcgaatctaattaataaaagtggatccacgatttgattgttttatcacaatgcacatgactactactttctactttgtattatacaaccctacttttctttaacgttgctttcttaaagccatggaaaaagaattaaaataaaagagatttttctagcgtcaattacggttttattatagatgattatatagagggacatagtggtatttaaagagtagtgacaaaaatatataaatagacatgactgatttgtttggtgtatgcacccaaattaatagtgcttgcaaatttttcacttcaagatttcacattcatcgtcatcttataaaaaaaattcaatcattggatactacaaaaaattgcagaaacgattcgtcattttggtagattttcattgttccgtatacgttgtataattagacgataatagaatgtgaaagagtggtgttaaagtcaaaatgtatactccatagagaatgacacagctgattcacatgaaataaatgaatgctaattaattaggtgggttttaaaaacattcgaatcttatcttgttcacatcagaatcagatcattcttgatcccaccaaaccctctctacccttcttccaatttacaccagatattgactttatacaattcaacattttgcgttagtctttgatttcaaaataataaacgaaatcatgtagtagaacttagtttcacatagttattaaagaggtaacaaatcgttgatgagcttcaccattatcaggattgatcctatactcctgtctcttcataatgagtatttccttgagcttactaagagacagatttcttgtcatagatattatagtaagaatcaaaacgaaggttgaaacttgaaatgaagacaatactctgcttcatttctcgttgtggtctgttacaagccgttaaaatttctcacctgggctcttctctgtttgggcctaacaatctatttcagcccaaattgtaacctagtttagtagttttagctccactcggttagctctttaaaccagaaacgaatactaaaccagatggacttgaaccaatattctcacagcaagcaacaacagccaatgatcaggttgcaaatatgtagctttatctactacacacactaacacagatatataagtttgatgacttcagcggtaaatatttgttatatgattactgaaatatgtatacttatcctagtatatgagatttctatttgaaaggtaacaaaaaagattagaaaatgttaaactcctccttgtgaacaccattagcattttaatcttcaagaattatgttctgtagccatgaacttaggcctacacaacaaaaacaaggttgcctgtgtcaatcaatacaagatgtgtggtcaaatgaagaatataactaaagttaggggttgaatatcgaaagatataaaaagctaaggagtcgaaataaaataatgaggaataagtttctcatttaattcttaacaaaataaactaatgttgaagtttatccatcccagcgggacatggtatctcttttcagaaaattcgaatctcacaccaataataaaaagaaactagacgacaaaaataaaactaaaaagtagatctccaccgtccatctaaaatccaacggttaataattgatacacacatgctttccgtgaatactttaaatacaagaattaatttccacgagtaaaaagaggagacaagcttttcttcaatttcggttaaaccattttcgttctttcttcttttaacaagaaaccaccgctctgtacaaaacaaagtctccgtcgtttcttctccgttctccggtcaattcgaattcctcagagagaaatttgtgctcgcgagttccgcgtgaaatacatggaaatgttggcggcgttggactcgcgttcttctctccatcttcatcgttccatgtctcgcgttgacctttttgccggtgttcgtatgaaaccatctcctacaagtcctgttccgaatacgcctcgaatatgtggaagtaaactctgttgattcgactcttcctcttccctttagtagttcctccgtttgtttttcctttgcatctgaatttccagatccaatcgaagctgtgattacctgtagcgtcttgtgtagtcttattttaggtaagtgatcttttctggtgaagaatttagaagattgtgtttgtactctgaaacttcttaggattgtggaattgggggttttcttttagggtttgttgagtcgtgaagttgtttgtgtctgttggatctctgaatg

SEQ ID NO: 29049 - DNA, 3003 bp, Unknown
  misc_feature (1)..( 3003): 2750-1469P.txt file - cDNA_ID_2999666; gDNA_ID_2926192; Annot_ID_141109
gaaacatgaacctcataaatcatgcctcttgtcttggtggtacactttaagccgaagttacaatagtgatgtgaaagaaagaaaaaaaacgaaacttaaaatcagtaaatctttgtagttaatcaaatggggtaaacaataagaacccttacaaatcagaacaatgcaaatgttatcggtgagcagtaacaagcgtctcgatgaatcgtaacccatcaaaccttggagcaaacttctcatctcccccatcttccgacgaacccttcttcttcctctgtttttcctttgcctcctaaccacaatcagcagctaaaaattattctttacacatccgaatccatgtaaaagttaaaaactctccaactttgtaatttgataaatttttgactatgagaaacttattgtgagtacttgaaacagaggaggaactttaaatgctaccgagaaacaaataaacaagagcttgattcttctttttttacctgacgagagagattagattccggcgaagagaatgacacggaggtgttggtagagccggcggagatcgccgtggcagaagccgcgacagagatggaggctgcgatgattccagttttcttcatgtcttgatcttaaactttcccaaattcgtggactctgtttatacttttttttgtttttctgtgttaataaaataaaatctgcaaccgtaggcagatgagagaaaaatgtgggaaaaattgaggtgttggcttcgatagtcgacggtttatatacgcaatggggacaaaagttaaattacgctagttgaccaatttatgtatcgataaagtatgttaccgttttacccttttctaaataccttaagcatgatttaattgcgttaattacagctaagatcattggtaaacgtttttgaatagaatgatttatcttctagaagaatttaattggagtaagaatgggtagcgtgaaaaataagggggttagtatggtcaaagcattagaaaaaaagaaatgtactttgagccttgaagtcagaaccacacaaagagaaacatgattggttgatctgttaaatgaaaatgggtccatcgttggttggtaagtaacccacgtgtccggacaatgttgcaactatgagttggtgttttgagaatgttaaaagtcagctttgtattggacgattatgcccctcttatttctcgtttattactgttggtattgtatgctcataagataaggttcaagaaaagaaatgttcataagataaggtcgaaacactaaatgacgggtgaacaatggcattgaacaagtggatctgattatttgtctttgagagcatatctcaaatgcaaattgatgtaaactgatttgtggataccaaacctaacaagtcccatatggttttctggtgagatttctctgcgtcaaatttaatgttgaacacatttattctttgataaagacatcacaatctcgttaagttttaatactcgtctctatatattttacgtccggtcactatttatgaaaaaaacagagtagtagaataagttattaacacatgatcgtacaaaagcatcttatggtgacgtataggatcataatgatatgattaataaagttttgattaaagatgtatggatacaaatgaaagaaaaaagtttgcggctatatctctttagggatgggttcttaataattaaaattacttttgaaggactttatcgtttgcgcaatctcataatcatgtccacatatctctactttttcaccggccaaaacttattcggtccatatccgtatcttaacgtgaattattgatcatgccgcaagaccaacaagcccacaacttattttactcttacatgtgtaaaacaattaacaaccacagtgattgtggacaggagaagatgaaacaactcaatgtaagtaacccaacacaaccggtcaatcggtcattcttgtgaactggtttcattacaagaacgtgtaccaactatctctaagcaaacatgcagaggctatgatatcatacatcatatatcaacaagttaccaaaaaaaacactcgtacagtcgtactcttgatgtaacttccaaataatttttatatataaccggttcatgtttctggtacatgctgacaactacaatatgttcttcatacaagtttagctgaccaatgtgactacagatcccaaaaactagcagcagtaagatggttggattataacacaagaccaagatcaaagcccttccaatttctcaagaactcacatatcactcactcctcaagaagaacaatttactaacttgagatccctcgtatcttaagaaaacaccttagggaagaaacaatatcagcgttgagaacctggtttcctccacaatgcatttggcacacatcggaactatggattcaaagagcaccaaaacgagtctatatctctcagttttatgccaatgccaacagagctcaaatggcacccataaaaacatcaaaacagtcttctttatagataataagaatataagatatctagcctagcaaaaagatcgaaactttgggtttcccccttcgttacctcaatcctcaataaaaaaaaattccaatgaaacgaagtgaacgaacgacgtcgttctattttttaggttgcaaataattgaaaacaaataaacgggacaaattcacaagtaatcaatatatttagggacgaaattacaaatatttaatagaaaaacaagagtttggctgtttcctccttctttcatccttatcacaagtctgaactaaaaaacctcaattgtaataaacaaattaaaaagcaaaaatataataaagagaaaacaaacgtttttttcctgcttgcttctctctttgcttgcgttttctcaaaggttcgaagaaaacgaagaaccacgcttttgcttttttcccaagacttaatctaaaaagcgagatttccttctttcgattcttttttctcaatctggttttcagtcttcggattcaatg

SEQ ID NO: 29050 - DNA, 3000 bp, Unknown
  misc_feature (1)..( 3000): 2750-1469P.txt file - cDNA_ID_2999670; gDNA_ID_2926192; Annot_ID_141111
ccagacacagaatcataagatcagatctggtgttctcaaatatggcggataaggaagaaccagagacgatgacctcgtacaagttgtttttgagagttataagcaagagaagaacatgggcctgtctgtttcttgtagtctacgcgatcctattgtcttcttcatggaattcgttgaattcaatagttaattggtacggagagaatcatcagacatcatctggtttgcctgcgatttacgcgtcggtgcttcttggtgcggtgttcggagttttatctatggcggcggcgctgttcatagccgtgcctgcgatcgtggtgatctggatatcagtggtggtgacgatggcgttcgccggaaaatctaggaagagagtggtgattgaaggaaggaaagtgacgaaagagatcgctggttttgtgtttagggttcttcttaaagaaggaaactttgtggctcttctttgtgctcttcttgcttacttcgtcttctttaactcttactcttcatcttcttgattcgtttttttgaattcttgtcattaacgaaaacattcacagctagtatattgaaatctttcctcattattatttgtactttagtttaacaagatttgatttcttgaatctgaaaatatcgatcttctttgttggattgatgtgttttctgatgatgtcagagagaatgcttccacgtcacaataccgacacgtgaagtaatttacattacttttgtttatttatttgagagaacacagattcttcttttggtctctttgtttgtcggtcattctctgtctctgtccatggaagagcttctgaaacctgaactataatatgggttagaaggcccattggggcttacgggttaccattaatggcccattttatcgtatatagtggagaactgttttagtgacaacgtattaaatacagtatctactaggccagacgataaattgtgtttgaaggaggaagtgcatgtgattaggtatggtccaagctgaagttggttagtaaaaagcttaaaagatgataagttgcaccaatttttcataatgtagcaataataacaagtgtaagaagatgctcaatccaagtcaatgcatagttcatacgataattctttttttgataaaagttcatacgataattcaaagatataattatgaatatttgacaaaatatgtacatacattcaatgctctggatccttcatgagtaaatcgatcctcaatgctcttgaatctttatccacaatgagtaattctcaaaaatctgttagtattgttactttgatttggtttgctttgtcttcaaatattatcgaatgccattggttggtggtagtaaatcatgacatggccttcaaaagaataattggtctgtttgaatgtttctcctttagatatactaatactatataataattaaatgattatggtccaaaattagcagtaaggctgcttttatctctctttttttttcctttacactaatttgattgcaaaactagatggctaatacataactttacactttgcattacaaaaaatagctagcaaaatatccaaaaaaatttaatactgtacattgttccttagtattattaaaatgactctttgggtgttaactgttaataaaagcagtcaccgacagcattcaaagtattttacttctgtcttctatttatttattattgtatttaccacacacacgcatcaagttttctaatgtcgacagagaaaatagatagtactgttaccctatattctaagaacttaacaaaacattagaaaaatacaaaagcggagacgactgtgatgaacaggttcacataatttagcattgtaatttatacaattttgactaaacaacaaggataaaaagaatcttaccacaaatgtaattgtcaagcctatctatgctcttttatcatcataaacaacgtggagaacacctcaaaagtgattttcaagagaacaaagaaataaatatgctactgaatatgttgaatttatgcagaagctaaatattttctatgtaaatgtaattatttgatttgttttgtcttctcagaattaacctttgtatgttctaaatgagttgggctcacaattcacatcacatgattgaacaatgaacattttttctcaaatatctgaagttgatgacactccaacgcatgtggccctgtttattttttttcctaagagattcaaatgtattttttttcctgtgatactcatcaaaattaaattccttcttttaaagtttccaacaacatattagtctcttttagttctaaatctaaataccaggttaattcctgtgctttttcctcttctttggtgggtcaagttctgttctttccccttcaaccatttttttatttataaatatccaatttttatgaagatattttataagtaatttcaacttacgaaatagagtgtaaaatcataccttgtgtaatttttttttttttaaaacatcacattatgccttgtcccttttgcaaggtaaaatacaaaagggctatttcaagctattttcttctttcacaaaagaaaattagaattaatagaaaaatattatttttttgtaaaaaaattaatagaaaaatatagtaatttgggtcctttaagtttcagatacagtgaaactaaataactaataaacaactaatataaatacaaagatacatagatctgtgtctgtgattattcaatttcttctgcttgttcgtatctcccttgtttgcttaaagcgttattgagcgagctattttttcaaatctttgctaattttctacaaacgattgatttttccgtctgggttttataaaaggtttgggtttcagagaaattcacggaacaaggcacagactttttcttctgggtgggcaccgactaaaaaaggagctctttctccaattctgggtttgaaatttctgtgtgtgtgtgtgtgaagcagtgaagcaggaggtggcagaagcatg

SEQ ID NO: 29051 - DNA, 3003 bp, Unknown
  misc_feature (1)..( 3003): 2750-1469P.txt file - cDNA_ID_2999678; gDNA_ID_1971713; Annot_ID_175132
tcaaatttccgacgccggaagggacctctccggtgaactcattgaagctgaggtctagcttgagaagctctgtcaagtctccgatggaatcaggggcgtttccgttgataaagttatggctaaagtctagaacttttagattcttcagacgagacgttgcgttcgccggaaacccaccggtcaagctgtttctggagagtgtaatctcctctagactcaccaaatcgccgatttgacccggaattgacccgtgaaacccgttaccggtaagaactaatcttctcagctttgtgaaattaccgatcatggctccgatctcgccgacgagagatgggttttcgatgaacaccaactcttcgagaacagagccgaaatcctccgggactgttaacggcaacgaggcacgagcgtcggtgaagcatttgtagaagaaaagcttacgaaggtgtttgaaagcagtaaagaggagaggatcaagcgtggcattagaagagcaaggagggttttgagtgtaatccgagaggtagcctaaatggaactccgtgacgtgaacagacgttgcgacgccgttttgagaagcgtagaggttatcgcaaacgacgccgtcaggtggtgaagcgcagatgtcgtcggggaagatggttcgccatgagatggctgagttgactgagtcgagaactcggtagaccgcttcttgctccgacgggtctagagcgagttgtggtgacgcattttcgtcgtcgtcgctttgttggctggtgatgagtgtagcggtgaagagaaagaggaggagaagagagaggttagtaaaagacgccatgaaagcagagagagagagcaaaaagcttgcagctttgttttttgtttggattgtttggttttgggtttgttgctaacgagcgatacgtacctttttatgggttcatgcttcgtcatgtcctctttaggtgaaaatacatattaacccctacttgataaaccgagtgatatttaatgaagcttttcattcctataaaattgaaagaaaacacaatttttgttgttgttgcaagggttaaaaatatcagcatttactaattcatgtattttttcttcactattcagtattcacagtcctgtaatttttcaataataaaaaaaaagattcgtagttaaaaacggaaggggtaagatagtaaaaaaacagaaaatggtacaaaagcttcacgttccgtgggtaaaaaacttcaaaggtgaaggaaaaagcaagttgggaccataccggacgaaaatttgcagagagaaagacgacaccatttcgatttttaatgcacattgactaaaaaccacccttttaaacatatcttcttcttttttaacttgatcggcaactttcagagataccatttccaaaaaatttcattcaataaagaaacgtctaataaatacattatgaaattcaaatgtgactactattttgcctcattgataacaatgaatgaataaatgcaacaaaaagctccacaaaatagtatcatcttttatttaatttccacttcactttttgttggggatcaaatattattctcatcaatacgttatagtcaaaataaaagaaaagacaaaagaaaaaaaaaagctgaatagtagtaacagagacagaggagaggagagggggcaaacggcggaggaatcgacaaggacgcgcagtagccgccgaagggaacagtgtctttgtcgtacgaaagcgacggcttaagaagtcttccaatatattatcgacacgtgttaatctcttaccggaaacggcacaggtctcacgcatgccatttctatttccggttcctgcccttcgatgtccctactgtgccagtgtttcagacccttcatttattttttttggtttttacttatctagttattttttagctgtcgctgtttaaattctttgtacgacaaaaaatgtacaatgccttttgcagttgttcttggtcctcgttgttttcctataagtaatcaaaccaaattaatgatttctcttatttcggaaattaaatgtaacgttcttcgaatcaaaacgttcgataaatgactaataaaataatttattcaaaaaaacaaatatgggcctaaatatatcacgcaggcccattatgataatattagaagccgacctcgtcccctctaaaaccctatttgttttgtaaatgatgtgatcgtctctatttatattccggttttgagatttgttaagttgttcctatactttcttttttcagctacgtcgacgcttaattacttgtggactctcctgagcttgttgctatggattcagatacagtctacagagacgcttcatctacccttactttccgatgaggtcgaggatgaggtttggtttcttctctctttgctttactcttattattagatgccagtttcttaaaatctagtggattctttaggttcatgagtcatgaccaaaattattgttgtatagtctttttttgtttttgggtgattcgtgaagttcatgactaaatgatgtgacaaaaaaaaaaaaaaaatcaacaagtttttctcatcaattcctcaaactaatgtcaccatttagacccaatattagtcaaaacagaaattgtttgaatagtaacgatttgctattttcctctttataaaactactctataatccatattaaaaaaatatatataaatcgaagtaaaccttttaacgttggaacataaaaagaaacaaagactttcgagagagaggtagtgaaaactcttttgaagatgtcaaattcttactcgaagacaaaaagatctactactaatctactattatcgtagtcgtacaaatattataactagtgagacccaccagcagaaacaaaacacaaggaagacttcgtgataacgagacttgtctgattcttcaataagctcacggatttctcctcaaaatcctaatccaatcatttctccaattctccaaggagtttggtaatacacaaataacatg

SEQ ID NO: 29052 - DNA, 3003 bp, Unknown; identical to SEQ ID NO: 29051
  misc_feature (1)..( 3003): 2750-1469P.txt file - cDNA_ID_2999678; gDNA_ID_2926193; Annot_ID_141135

SEQ ID NO: 29053 - DNA, 3003 bp, Unknown; identical to SEQ ID NO: 29051
  misc_feature (1)..( 3003): 2750-1469P.txt file - cDNA_ID_2999678; gDNA_ID_2926193; Annot_ID_201214

SEQ ID NO: 29054 - DNA, 3000 bp, Unknown; identical to SEQ ID NO: 8302
  misc_feature (1)..( 3000): 2750-1469P.txt file - cDNA_ID_2999686; gDNA_ID_2926193; Annot_ID_141137

SEQ ID NO: 29055 - DNA, 3000 bp, Unknown
  misc_feature (1)..( 3000): 2750-1469P.txt file - cDNA_ID_2999694; gDNA_ID_2926193; Annot_ID_141139
gagagtttctcaactccaactctgtcgcacttctctttcgtaccgtcttcgctctggttatcatcatcatcatcatcttcaccacagtttcttcaagctcatcaaacgtaactcaattcttgaatctccacctactaatgcatctcatcaatctccatccccgattactcctatggtcaacgcacgcgtcatgttcttctccacttcaacttcagctccacatccagagaaaatcaacaggacgtcgtcggagaatatccttcggatgatttcaagctatctatggatgaaagacaacccaaaactctgtttcagagtcatctctgcttttgcgtgtctcgtgggagctaagttcttgaatgttcaagttcctttcctcttcaaagtagctatagattggctctcttcatcttcattcgttgattcaaacccttacctagttgctgctttcgctactccttcctctgttctcattggttatggcattgctcgatctggttcttctgctttcaacgagcttcgtactagtgttttctccaaagtagctctccgcaccatacgaaccatctctagaaaagttctctcgcgtttacacgatctcgatcttcgttaccatctaaatagagacacaggtgctttgaacagaatcattgatcgtggaagccgcgctataaacacgattctctcagctatggttttcaacattatgcccacgatcttggagatatcaatggtctcatgtatattagcatacaaatttggagctgtttatgcattgattacttgtctttctgttggatcatatatagcattcacgttggctatgacgcagtggagaatcaagattagaaaagctatgaatgaagctgaaaacgatgctagcaccagagccattgactctctcataaactacgagactgttaagtatttcaacaacgaagattacgaagctcgaaagtacgatcagttacacgaaaattacgaagatgctgcattgcaaagtcggaaaagctttgccttattaaattttggacagagttttatatttagtacagctttgtcaacagcaatggtgttgtgttctcaggggattatgaatggtcagatgacagttggtgatttggtgatggtgaatggtctcctctttcaactgtctcttcctctttactttctcggggttgtttacagcgacaccgttcagggacttgtcgacatgaaatcgatgtttaagtttctagaggagagatctgatatcggagataaagatatagacaggaagctccctcctcttgttctgaaaggtggaagcattagttttgagaatgtacattttagttatctaccggagagaaagattttagatgggatttcatttgaggtaccggcagggaaaagtgtggcgattgtcggtagtagcggaagcggaaaatcgactattcttagaatgatattcaggttctttgatgtagattccggaaatgtaaaaattgatggtcaggatataaaggaagtgagactagagagtcttagaagctccattggagttgtccctcaagatactgtaagttgccattttcactataaattttgctagctcttacattttgttgttatgagtctaaaccggtttttagtatgttagcatatggttacagattggggtttgattattagtactgtatactcttttgtattacaatcacgtttactacataaatcatgaaggaaatgatattgacactgcaaaatgcttcttaattgtaactaaaatctttattttaatatcatggcctttttcatacgttttggtagtttaaaatgtaacatgtcacttttctacaaattgcatgacttcaaagtaacttccatatacaaatttaatatcattatcaggcatatataccaatcataaatattcgtatcattaaccttaattcacatggcaggtgctctttaacgacactatatttcacaacattcactatggaaacctttcagcaacagaggaagaggtgtacaatgcagctcgacgagcagcgattcacgatacgatcatgaaattccctgataaatattcgaccgcggtgggagaaagagggctgatgctgagtggtggagagaaacagagggtggcacttgctcgtgcatttctgaaatcaccagcaatcctattgtgtgacgaagcaacaagtgcactcgacagtaaaaccgaggcagagataatgaaaacgctgaggtcgctagcgagtaacaggacttgcattttcattgcacatagactgaccactgcaatgcaatgtgatgagatattagtaatggagaaaggaaaagtggtggaaaaagggacacacgaagtgttgttggggaaatctggcagatacgctaaattatggacacaacaaaacagtaaattggaggtgtgaattttgtaaaactatgaatcaaaaagccactttgggcctttatatagccttttaagagagtgaaagagcagaaaatatagacaccagaaaaaatttaataaataaaaacgaaaaagatcaagcccaatacacgatcccaattatccaataaacaacgtccacgtagatcccgacaagcgagtcatactcacgcgctgtttcaccgagcgtgaaaaaaacgacggctgatccctttgtttaagacagccaccacctccgaaattaacaagaaggcgaagaaaatcatcaccaccgtcaacttttctcttgcggacaagacgattctccgattatccccaagaggagaatcctcataatcattttctccgattcgattcgtcttccttggtcctggattgcttcatgaatttctaggtgagaattttcgatccttctcctttgccttttggtaatccacagagagatagagacagagaatttatatctttcgagcatagttcggattcgatttggttttgtttttccagcgaagttgatgtttggttggataatgattctctcttgcaggacaacaatg

SEQ ID NO: 29056 - DNA, 3003 bp, Unknown
  misc_feature (1)..( 3003): 2750-1469P.txt file - cDNA_ID_2999702; gDNA_ID_2926193; Annot_ID_141144
ttcgttgtaaccaagaatggcggtttcaagtgaagggagctggccgagaacgcttggtaactcgccggtgagattgtttccggataatccgagaaatctcagcttctgtagattcttgaatgaacttggaagtgacccttgaaagaaattccctcggagatcaagaacttctaaagagactaagttcccgagatcctccgtgagatttccggagagattgttccctgaagcattgaggtgaacaagcccaagtgattcattgctaaatagaaaaagactccctgagaatgaattctggctgatgtcaatagatttcaacggagggattgatttcgggagcagcgactcgaatccgttgcatgatatgttaaacgagacaaggctactcagctggctgatcgaatctgagattttgcctgtgagattcatccccgccaggtcgagcttctcaacattgccatttgagttgcaccgaacaccggtccaattacagtgatcgctggtgtctgaaagcttccagtctttgagaaagttgagaggatccacaagagttgatttcaccgacagcaaaacagagagctcgttgacattgtcgatggaagctaaaacagaggaagtagaaccaatgtaacagtagtaaaggaagagaactattatcttcatcttcatcttcaacttcttcctctgtctcaacagcttcaactgaaacttgactccttagttcattaccaagaacgagactagtgaacatgcaaggaggtggtggaggaagagagtagaataagaagaaactctgtaagtatatgcttgttctgtgtttattatgttatatatatgtgacatataaacacagagatatataaaaatgaatcttggttttatatggatgtagtgatcaaagagtatgtagggttacatgttctaagaaaaaaagaaataaacaagatcttggaagtatttgagaaatttcttaagacattgaacatgtgaagagagaatgtgttttcttcacaattacaactaatccaaaaatgtgttcggtgttttaaaattaattaagtcaactattgatttgctgtatagtgatttgtgaatgtgccatagatagcttaagcttaaactaatactaatataattactattttttatacatacacttggtgtgtggcatagaggtagcttatgcttaacttcattctaattcagcttttgtagaatgtctttatctattttcccacctttttccttttgtgtcttttaacgcttgccttctaaggaagaaaaacaaaaaatataccattagctcttagcaatattcgattacattacatattaatgatgaatcagtgattatattgtaaatctcgtatttaggatatagccaccgaggtgaacgttcgaagcatataagaatgggtgacctgcacatgtgatgaagaagaacagatgatcctattaccctatgctctgcagcatatttaaatatcagataggtccaaataaatttcattattaattaaaatcagcaataatgaagatattcccacgatcgatcttcacgtttcttcttaccccttttgaatttcgaaaagcttctttctatttggttggttaaaaaaaattaagatcgagcccactcatggccattatacgtgaaaacatatttctttagttcaatcatacttaccttgatgcgtaacaaaagtgtgaatactataatgtatgccactgcagagagtgcaggcttgttactgttctttcgtttgcatgattgattagataagaatcttcccatgttacagatttatggcagtgtaatataggtatagtataatattgttgataatataacaaataaaaattaaataaagtggttaattgtatcacttcttgaatgtatcagcaaattgtccctaattaaaatgctactttcttaaacgttcttcagatataaaattctaatttcgtaaactttctacctgatgtctaaaagactaaaagcatgtgtagacgtatacacccaaagtcagtgccaatgcctttaaggtaaagtaaaatggagacggaataaaaaaaacgtacgtcaaacgagagaatataatttttatttttttttcagactgcccaattagcatagcatagtaatttgatatcactaaaaagaatccaaacttgataaataataaccgtgacaaattcaacaccaagatgtttaaaaactcaaacagatatgtatgtatcaagaacgggtcgaggtaaactaactgatcaatttgataaaggataagataagctaaatgctaaatgatttgtgggaaaatggcagagaaatgcacacgcataatattcatcaaaacaattattgtaatactccaacaattacccactcctcttactgatttcatgtttccatccttcttattacagtactaaacacaaactgttgcttcacatgcactcatgtggacctgtcttttatacaattgttttttctttcttattatttgttgtttttagaaaacattccgatccgtagttaagttcttcatttgcttaattatcctttcgatcgttggataaaataccttaaattctacgattactcagtaagtaatttttttttatataattgatagaatacacttttcagttttgaatctttcgactgatcactgatatatacaatatcttaggaaaataaataaatttgatctacaccataaatattataataatcaattattacccaaaagaacaatggatggtttataggagattttatagactatagatcataaagaaataaacacttacaagaggtttgaaggcttaatgggatgcatgtggatcagcacctatagtgacttaatttagtattaatttctgtattatcagagagagaaacctaatcccacaaataagtacctaaactctttgcaaatggtgttttgttgggttatattattaataccatactaattaatatattaacaagtaagtatg

SEQ ID NO: 29057 - DNA, 3003 bp, Unknown; identical to SEQ ID NO: 29056
  misc_feature (1)..( 3003): 2750-1469P.txt file - cDNA_ID_2999702; gDNA_ID_2926193; Annot_ID_201224

SEQ ID NO: 29058 - DNA, 3003 bp, Unknown
  misc_feature (1)..( 3003): 2750-1469P.txt file - cDNA_ID_2999710; gDNA_ID_1620842; Annot_ID_50905
attccagaaactaattaaattcccagaacaaatcaacacaattccacacacgatttctcaaacatagcagctcaatcagaatgcaatcgaatcaggataaaaaaccaaatcgtttgatcattcaaccaaataacaaaacacggtgccgcaaactgaccggaaacgcaagaaaccgcgggaagaaaaaaagacgatcggaagagaattcgatgagagatagggattgatgaatatatatatatatatattaagagtgttgttgcagagagcgagagggcactgtgataaagagaacaagtgcgtggctacaagacgaagaaggagcccaacaaaattgatcgtgagcttttattttctttctttgggtaacacaaaagagggttggtgcttaggaaaaaaaaaatcataattactgatttgcccctgagggtattttagtcattacaatttctggtccatattgttctgatttcaacaacatgatgaacaaaagaatcgatgacaaggatggataagagagaatgctaatctgatcaacaaagaatctgttcgaaaattcaaagtaaatcattcattctcctctcatgatgatgatacatcaagacatgaagcttgttcttcgattcattgtctgtatttggaccttttctttgttgaactccgggtttatgcaaactcctcgtcgtcatcatcttcttcttcctcgtactcggaatcagattcctcctctctttcaggttgcatcaatgtattcatgtcaaaagaagatggatcagtttctacctcttctatatctattgtgtcgtagctcattctctgttcgaacttctcatctgaacagtttagcatccaagccaatgaacatttgattcccttcttgattatcttcttgtgtctcggctttaccgtggactcaagcccatacgtaaagaatgcggggaaatccacaaggtcttgaagaggtcttttcatttccttttggaagtactcaaagctgagtttcattattccgaggttcaaagccagaacctgaggacacccgattaccatttcccttgtttggtctatcgaaaatccacacttggtaaggaaatcaatgtgctttaacataggagactcgctgagactaacaaactgcggcattctctcgatcaaagagccaagatcctctggatttagatgaatggctgaacaaagtagcttcctctgtgtgtcgagcttaggtttaaggtcgattccgatgatttcaggatactgcgcaattatagaaggaagagatgtttctctgacattgaaatcttgcaggatttgcacgtttggtttcaccgtatcatccaattcaaacccgagtatgtgaggccgcttctctatcaacctagctgcagccagtctcggaataccaagaacctcgagatactccacgagaggcttaattatccgagctacccgcattcccaaaatctcagggtaccgtgttaaaatacccccaatctccctcctagctacacctataccaaccaaataagcgactgatgtgctcatagtcccttccagcttaaaccccaaaacttctggatacctctcaagcacccgaggtacatcactcggtttaatatccagtccttgaagatacttaaccaccggtgcaagatctataacaacgctagagtgaagaacctgcgggtatcttctaagaaactcagtgaaagtcgatttcctgacgcctagtttcccgagataatcaagaaccggaaccatgttcttcttcacgctacaaccaagaacaagagggtaattgttgatatcttcaatggtaagccctaacttgtgaagaaactcgacacgctctttcatcacatcagctgttacagggagttcaaggccatcaagctcatcaggaacaatcccaatcccacgcaagaactcataaaccttagcacgattagcagctttctccttattcatatctaacaaactaggacgactatacaaagacttagaatctcttcccttatccttatctctatccctatcccttcccgaagaagaagaagaacgagaagacctttctcttctcggtgaatccaaagaacgtgaagaaaatctccgatttgcaatagcgcattgaacagttagaccaattccagtcccaggtctcttcttgtggttgcataagttgccataagtggaatcagagagtgaacgagatctaacggcaaaaaaagatggtggctcaaagtgaactagcaaaaacccaggctttgtgaagccattacagaacctaatcttcattctttacctgcacaaaaacggaacaacactaaaatcgacgattatcaacgagaaaatcataccaattcggactaacccagacaattttacagtacaattagctcagaaaactccgaaaaaataccatcattcatgttcatgttaacatcaacgaaccaaaaaaccataacctaactagaagcaaaccacagaaactatggaataaggagaattggaccagcgtgtgattgaaatctcaccggagctgaggaaagatatcggagaagacgagggttttagaggagcgggtaaggttttttcctcatcacacaacaaagtcactctctttctccattgaaatgatttatccgaattattgacgttctcccccttatttcttatatttcccattattgccctatactatctgaaattatcacattaaaccaatacgtatatgattactttggatgtgatataaattaataaaaaaactatatatcatcaaaactttctcttaatatttctaaaattaattaattccctccttttatcttcaacattggattatcgaaaatgaaaaatagtattttctgactcttttttatagtatcgggtttaattcagaaatatataaagctttggggtctgtttcgaagtatctttactcttttaacagttctgagacttctaaagagaggaaaattagttcgtcgaagcatcgagaaaatg

SEQ ID NO: 29059 - DNA, 3003 bp, Unknown; identical to SEQ ID NO: 29058
  misc_feature (1)..( 3003): 2750-1469P.txt file - cDNA_ID_2999710; gDNA_ID_1620842; Annot_ID_170085

SEQ ID NO: 29060 - DNA, 3000 bp, Unknown
  misc_feature (1)..( 3000): 2750-1469P.txt file - cDNA_ID_2999710; gDNA_ID_2926194; Annot_ID_141202
ccagaaactaattaaattcccagaacaaatcaacacaattccacacacgatttctcaaacatagcagctcaatcagaatgcaatcgaatcaggataaaaaaccaaatcgtttgatcattcaaccaaataacaaaacacggtgccgcaaactgaccggaaacgcaagaaaccgcgggaagaaaaaaagacgatcggaagagaattcgatgagagatagggattgatgaatatatatatatatatattaagagtgttgttgcagagagcgagagggcactgtgataaagagaacaagtgcgtggctacaagacgaagaaggagcccaacaaaattgatcgtgagcttttattttctttctttgggtaacacaaaagagggttggtgcttaggaaaaaaaaaatcataattactgatttgcccctgagggtattttagtcattacaatttctggtccatattgttctgatttcaacaacatgatgaacaaaagaatcgatgacaaggatggataagagagaatgctaatctgatcaacaaagaatctgttcgaaaattcaaagtaaatcattcattctcctctcatgatgatgatacatcaagacatgaagcttgttcttcgattcattgtctgtatttggaccttttctttgttgaactccgggtttatgcaaactcctcgtcgtcatcatcttcttcttcctcgtactcggaatcagattcctcctctctttcaggttgcatcaatgtattcatgtcaaaagaagatggatcagtttctacctcttctatatctattgtgtcgtagctcattctctgttcgaacttctcatctgaacagtttagcatccaagccaatgaacatttgattcccttcttgattatcttcttgtgtctcggctttaccgtggactcaagcccatacgtaaagaatgcggggaaatccacaaggtcttgaagaggtcttttcatttccttttggaagtactcaaagctgagtttcattattccgaggttcaaagccagaacctgaggacacccgattaccatttcccttgtttggtctatcgaaaatccacacttggtaaggaaatcaatgtgctttaacataggagactcgctgagactaacaaactgcggcattctctcgatcaaagagccaagatcctctggatttagatgaatggctgaacaaagtagcttcctctgtgtgtcgagcttaggtttaaggtcgattccgatgatttcaggatactgcgcaattatagaaggaagagatgtttctctgacattgaaatcttgcaggatttgcacgtttggtttcaccgtatcatccaattcaaacccgagtatgtgaggccgcttctctatcaacctagctgcagccagtctcggaataccaagaacctcgagatactccacgagaggcttaattatccgagctacccgcattcccaaaatctcagggtaccgtgttaaaatacccccaatctccctcctagctacacctataccaaccaaataagcgactgatgtgctcatagtcccttccagcttaaaccccaaaacttctggatacctctcaagcacccgaggtacatcactcggtttaatatccagtccttgaagatacttaaccaccggtgcaagatctataacaacgctagagtgaagaacctgcgggtatcttctaagaaactcagtgaaagtcgatttcctgacgcctagtttcccgagataatcaagaaccggaaccatgttcttcttcacgctacaaccaagaacaagagggtaattgttgatatcttcaatggtaagccctaacttgtgaagaaactcgacacgctctttcatcacatcagctgttacagggagttcaaggccatcaagctcatcaggaacaatcccaatcccacgcaagaactcataaaccttagcacgattagcagctttctccttattcatatctaacaaactaggacgactatacaaagacttagaatctcttcccttatccttatctctatccctatcccttcccgaagaagaagaagaacgagaagacctttctcttctcggtgaatccaaagaacgtgaagaaaatctccgatttgcaatagcgcattgaacagttagaccaattccagtcccaggtctcttcttgtggttgcataagttgccataagtggaatcagagagtgaacgagatctaacggcaaaaaaagatggtggctcaaagtgaactagcaaaaacccaggctttgtgaagccattacagaacctaatcttcattctttacctgcacaaaaacggaacaacactaaaatcgacgattatcaacgagaaaatcataccaattcggactaacccagacaattttacagtacaattagctcagaaaactccgaaaaaataccatcattcatgttcatgttaacatcaacgaaccaaaaaaccataacctaactagaagcaaaccacagaaactatggaataaggagaattggaccagcgtgtgattgaaatctcaccggagctgaggaaagatatcggagaagacgagggttttagaggagcgggtaaggttttttcctcatcacacaacaaagtcactctctttctccattgaaatgatttatccgaattattgacgttctcccccttatttcttatatttcccattattgccctatactatctgaaattatcacattaaaccaatacgtatatgattactttggatgtgatataaattaataaaaaaactatatatcatcaaaactttctcttaatatttctaaaattaattaattccctccttttatcttcaacattggattatcgaaaatgaaaaatagtattttctgactcttttttatagtatcgggtttaattcagaaatatataaagctttggggtctgtttcgaagtatctttactcttttaacagttctgagacttctaaagagaggaaaattagttcgtcgaagcatcgagaaaatg

SEQ ID NO: 29061 - DNA, 3003 bp, Unknown
  misc_feature (1)..( 3003): 2750-1469P.txt file - cDNA_ID_2999714; gDNA_ID_1620660; Annot_ID_47945
agagaaactaaaatcactcccaaaaagtctcagccaaaatattcgagaccgtgtcttgcaggtaacttatgatgaactgagtcaagtgcaaaaggatgcgtttcttgacatagcttgtttcagatcccatgatttggtttatgtaaagagcttactggattcatctggtcccgccttttctaaagcgacagttacaatagacgctctcaaagacatgttcatgatttacatttctgatagtcgagtggagatgcatgatcttttgtatacgtttgccatggaacttggtccagaagccagggatgacgatggaagagggagacaccggatatggcatcatcacaaccaagataataaaggcaggctcaataggctgctaaaaagaccagtgagactacattcccaaaacacttgcacttattggtccagctagagctttcatttacttatcttcttctctttgttgacattgtggtgtatacagggaggcagcaccagtgtgagaagttttttcctcgatatgtatgtcatgaagacggacgtgaccttaggcactgattacctcaagaacatgcgaaatctccggtacctcaagttttacagttctcattgtcctcaggaatgtacgcctaaggaaaacatacacatccctggagaacttgagcttccacttgaagaggtccgatgtttgcattggctaaatttccccaaagatgaacttccacaagatttcatccccaagaatctcgtagatcttaagctcccttacagtaagattagacagatttggagagaagagaaggtgcgtatctagataaaaaacttgattgcttcgttgtttttggcccaacatagtaagttcatggcttaaactaacttaagtcgctggatcctttccatcacaggatgcaccaaaactaaggtgggtcgatctcaatcactcaagtaagttggaaaacttgtcagggctatcacaggctctaaatcttgaaagattgaaccttgaaggttgcacagcactgaaaacgttgcttctgggtccggaaaatatggcaagtcttgttttcctgaatttgaaagggtgcacgggtcttgagtctcttcccaagattaatttgagatctctgaagactctcatcctcagcaactgttcaaacttggaggagttttgggtgatttcagaaactttatatacgctatatttggatggcactgcaataaaaacacttcctcaagacatggtaaagctaacaagcctcgtcaaattatacatgaaagactgcgagatgctcgttaagcttcccgaagaatttgacaagctgaaagttctgcaagaactagtatgctctggttgtaaaagactcagtagtctcccagatgtgatgaagaacatgcaatgcttgcagattttactgcttgatggaacagcaataacaaagattcctcatatatcctcacttgagcgtctatgcttaagcagaaacgagaagatcagttgtctttcgaatgatattcgtctgctttctcaactgaaatggctggacttgaagtactgtacgaaacttgtgtctattccagagcttccaacaaatcttcagtgcttagatgcaaacggatgtgaatcattaacaacagttgcgaatccactggctactcatttgccaacggagcagattcattccacattcattttcacaaactgcgacaaattagaccgtactgcaaaggaggtaatcacaacctatgctcaaaggaaatgtcaaatgctatcagatgcactaaaacgctggaatgaggtgatctctctcactatctcctcattcatttatcgctctcaagtaaccatatgaacctttaacttttgtatgactttttctgcagggttttgttccagaggctttgttcagcacttgcttccctgggtgtgaagtaccttcatggttttgtcatgaagcagttggatccgtcttaaagctcaacctgctcccacattggaacgaaaataggtttgtcggaatagctttatgtgctgttgtgggatccttaccaaattgccaagaacaaaccaactcttgttcagtgacatgcacgtttaacatagcaagtaaagattccaagaaaggggatccttacaaaatctcctttgatcgactggttgggcgttggaacaaacatggcaacaaactagacaagaaaggcaacaaactaaagaagacggaatcagatcatgtctttatctgctataccagatgctcaaacagcataaaatgtcttcaagaccagcactcaggtacatgtactccaaccgaagctttccttgaatttggtgtgacagataaggaatctcgactcgaggtgctcaagtgtgggttaagattggtatatgcatctgatgaaccccagaagacaaactcagatatggatctttcattatcatcatctgattcaactccgacaaggaacggcagttccaacactactacatctagtggaagtgtatctaccaataccattagagaagaagattccaatatcttacatgaagcacaatctcaaaatgggagaggactttgacatccagaattaatcaactgagtcgtcgtcttttcactctcttttgtgtttggctatgtcttataaaaccctccataatgtatttctctatgtacaacacgatttagatttgcgaggacgtacgtaccttactttaatcactgcattgaacgagaccaatcgcaaatgctggggctgggagggtaatgatgacgttgacagttttgcccatgtctattgctgtaatttacgagaaaacccaacctttgttttttcaccgatatagagatgatctaagccgtcgtctttcgccgtcgagcctgacaattgagtgatctgatcctccttcttcgtcttgttaataagtccaatttgctcggatttcgcttaactttatcgcatttcctaaattgccctcgtcaccactttcacactctctctctccctatg

SEQ ID NO: 29062 - DNA, 3003 bp, Unknown; identical to SEQ ID NO: 29061
  misc_feature (1)..( 3003): 2750-1469P.txt file - cDNA_ID_2999714; gDNA_ID_1620660; Annot_ID_163787

SEQ ID NO: 29063 - DNA, 3003 bp, Unknown; identical to SEQ ID NO: 29061
  misc_feature (1)..( 3003): 2750-1469P.txt file - cDNA_ID_2999714; gDNA_ID_2926174; Annot_ID_140237

SEQ ID NO: 29064 - DNA, 3003 bp, Unknown; identical to SEQ ID NO: 29061
  misc_feature (1)..( 3003): 2750-1469P.txt file - cDNA_ID_2999714; gDNA_ID_2926174; Annot_ID_199708

SEQ ID NO: 29065 - DNA, 3003 bp, Unknown
  misc_feature (1)..( 3003): 2750-1469P.txt file - cDNA_ID_2999718; gDNA_ID_1620703; Annot_ID_48818
aaaaaccttttaaaaccattgtaaaccctaattttcgggatcaagttttccgtccaaaactacgggatcattaatatttggcaggaaaatttgttgaaaatttttggtggaaaaattattatcggatttttttttgtgggaattcgatttttttattttgttaacttaattatttttaaataaggataaaatagtcgttaaaaataagaagatgacataaataaaaattgcttagaaaaggtatattttaaaaaaaaaataccaaagaaaaggcaattataacaatttcttttgaaagtttcaattttcaatgagttttggttaattcaatgaataatacactagcctttcattctttcatgatatggacatccttgaaagttgaaacattacaatagagacaacaaagatgaattttaaaaagcagcttaaaccgaagcctatatatgtgaagcaagagaaaaataaaatcctgaaaatatgcatttcttgaagcataacgagagttgatggcctgatagtgaatctgaaagcaaaggcacccaataatcacctctatataaaaccaaaccagcaggagagataactttggtgttgccaagaagaagaagcagaggaaagcccgacagtattaagttgaaaaggtcggtccaaaccagccaatttagccctccacagtaactgaacgtcctttattctaatttgagcgggcttcaacaccgcagtatgaagtcttgaatttctttccctccataggcaatagaccacagcttgaaagattaacatgcatactgcctttaaccttttaatggaagatgcgtttctacacaagcaccaatatcaataggcaagcaagctctcaagagtagaatcagatgtcttccccgaggtctaatccatgatccatccgcacaagcttgagagaccgtagccataatttgaattcctgtaactctgggtccattcagcctcgaaatatctatcaatgggccaagtgttgtccaatctgatcatcatgccaatcattatgatgaacgagatgagttttgtggaagacatttttttagttactgtgaaacaaaacaagcaacgtttcgttgtctattatttagcaaccttttatttatacacacaaatgtaatacgaatgcaaagcagggagagaagtgacaaataatcaacttcatttacatctaaagttgaaatttctattcacttatccaaaagtactaggacaatatgactcatcggtgaaggcgtctggtgctgacaagttcaatgtcaaaaacgagagttccaagagtagaaccttctccattggcgagacgtgttgggttaaatatagtcgtgaagagtctctgtctgtcaaagaactgcaaacacaacaagaaacaaacaaaggatttttaaaccaatctttggtactatatgtttctgcaaacaatctgaataatatgactggttctctaaaactttcatatcaaacagattgatactagttcaagtccctgtggctactgaacatgacgtaactaattatgttcttatcacctaaatagtttaggcctaaaccaaaactagcttaagagtgtggtgcactaaggcactaagccaggcccaaagctaatccatgtgggactctaaaataacatatgactttcatattaagatattatatgaaaatgttaaaggagaaagaggtgtgtgtgcacacatacgtttggtgggagaggctcctgtgatgtattctggtatccctgagatggaggtataaccacccgacgaatcccgcctactttcatagacctcacagctgtttcaatccccggaattacctgcacatcaaaatgtttcagtcatcacaaaacatcatcatagagacatagaagaagtattatcaacttcaaaaacccaaaccacttagtttgttacatcactattcaatgaagaaatgtatcaaaggtcacacctttaaatcaaattcagataatttttcaagacccatgtcacaaaaacttggactttatgcaacacatgattgagatagaagcatatagagataaaggtttatactttgctagaaccaaggacgaatgtgaaaggaacagcttcaccattactatctttatgatcatatgttgaatcaaatctccatccttgcttcgcagctaatctcccatagtaatgtatttcaatctaaaattcaaaactttgcaaaattgaatcaaatggttcgttcatttgctgaaatctatacaaaaatacaaaaacacaaaacctgatctccttcaatgggaacgtcaccatcgccgattcggaggtcgagagctttaacgccgccggaattagggatttcagagaagtcggctagtgccggagacgagaagcaaaaggaggagacgacggaagacgtgacggcgataattgacagagatattgatcttctagatgctgctgcaactgtcgatgatgatgatgatgatgatgatggtgcggaagaacgagatgcgaagattctgagagatggcggagatgtgaaatggacggtggtgattaagggagcacctactagtggtgtccacgcgaagcaccgaatcatttttctttcctttttattttataaggaaagtataaaaatgaaggtacacatattctagcttttgagaggtcagaactcagaagtggatggaatttgatttggattgggttgggattacgatagttgctgccaaaacctttctagtggaaacaagaataagctacatattgtattcccttatcaaactttagttttgtgaataaagtgttacgaaagtgtaataagatagatgaaaaaaacaaaagaggaaaaagtaggagataaaacatgatagaataaattcttgatcaaacccctttacctagggctatatatgtacacatttaatagcttttctctgtcaagttgaatgtactgatcaagataacaaatttatcaaaaataaatacatcatactggtttatg

SEQ ID NO: 29066 - DNA, 3003 bp, Unknown; identical to SEQ ID NO: 29065
  misc_feature (1)..( 3003): 2750-1469P.txt file - cDNA_ID_2999718; gDNA_ID_1620703; Annot_ID_165170

SEQ ID NO: 29067 - DNA, 3003 bp, Unknown; identical to SEQ ID NO: 29065
  misc_feature (1)..( 3003): 2750-1469P.txt file - cDNA_ID_2999718; gDNA_ID_2926174; Annot_ID_140265

SEQ ID NO: 29068 - DNA, 3003 bp, Unknown; identical to SEQ ID NO: 29065
  misc_feature (1)..( 3003): 2750-1469P.txt file - cDNA_ID_2999718; gDNA_ID_2926174; Annot_ID_199743

SEQ ID NO: 29069 - DNA, 3000 bp, Unknown; identical to SEQ ID NO: 8463
  misc_feature (1)..( 3000): 2750-1469P.txt file - cDNA_ID_2999725; gDNA_ID_1971811; Annot_ID_58114

SEQ ID NO: 29070 - DNA, 3003 bp, Unknown
  misc_feature (1)..( 3003): 2750-1469P.txt file - cDNA_ID_2999729; gDNA_ID_1620701; Annot_ID_48769
ttgtctagcttcgaactgccaaccacccccaacaacaacactcccgtcaccgtctctctaccgtcaacaccgtcaccgtcaacaactaacggcgatccctaaggcccaccactgccacggacttccacaaaaaaaaaagaacccaaagtctgaatcatgttttcctctgtttcagaaactggtttgagatttgcaacagaaaactctgagaatcagacaccaagagagtgtcagaccaatagcaaagactttcccacacagcaatccaacaagaacaatcactatcaaaccaatcactttcgttagatcctcttttggtccagtctcttcttcttcttcaacctctgtacaactctctaaaaatggcggattcgaactcaaatcatccctctcagagatttcactcccgattctctcatctgaatacaagctagaaacttctgtcatagacccttcttcttcagtttcaagttcaacttcttcttcttctttttctttgttcttcatcttcttcttcttcttataactccttagcttctttggcacaatcttcttcacaatctttgatttcagcttcgcgcttttgcttttctcagtcttaaacataacatctcttatcgtctgcatttctttcttctcatccaccacaagtttcgccttctccaatgacgacgaatccgattgaggagtgactctaatctcctctctaggttcttcgatgatttcaaagtagacattgtttcttctgtcatgcgtcgatgttgattcttcttcttcttctagcttctctttatgtcgcttccctatgagcttatcgatcaaagaatctatccgaatctgcgcgtcgggacagagattcaagtacgtgaagacacgcgccaccgcaagctcgaggaagagaagggcaaaagcagagagcgtgatccccacggcgagcttcttcgtgctcaaggcaagcacagccaccataaaaaccttaaacaccaccactatcaaaacacaccctcctcctcctccaccgcgatgaccaccgtcgtcttcatggataatctccggaacagaagtttcctcgatctttctcaccaaaggagaatcctctgtaaccaaagctggatcaagcttggaaggaagagacatacgacgctgcaaagacatatgaggaggaggtggagacaaaacacgcgtttcagtctgggctttgttgttcttgttgttacgttttgaagattgttttttgagacgatcgcgattcttaacaaagagatcgattaaagaagttgggaaaccagtttcaacaacgagagatccaccatgtttaggagattgttgaaagtctgatacgaatctagagatccgactagatttagatttcttccaaggtaaaggcatgttgaaggaaagaaagaaaaaaggatttagacttttaaaatcttttttttggtgataaatcacctctccgaagaacccagaaaaaagggtttgtcgaagagatagagaagaagatctggttggaagatcaaaaccattaattagacattttggagagacaaatgcaataaatggagaagaaacctcttcctgccctctttgcgcagaaagtgaaatgagagagagagagatatgatgaggaaaccgctaaaaagacattgcaggacgacgcgtgccttaaccaattattttacttccttttttttgttacaaaaaatttgttatttatttccatttttgttaaatttgtacaactgtactatgcagtttttaagattttacactttctgctgtaccaaaatattacctatgtccatctgaccgaaattattaaattaattctaataaaaaaattctaataaagctgatcaatttatttattttagacttaaactttacaaaaactaatttattcagcttaatttccccaatatgtaaaaacattaatgactacaagtatggtataacagtagcttcaaaatcttaattcatttataccgaagcaaaagtgaatttggtaaaccggtgaaaaaaacaaaccattccgaaacagatttaagatttttgttcaattatattttgtaagcaaacaaattacatcgaactaaactaaactaaacaaccgaaatatgcatccatattatttgtgaactaaacatggtaaaccggtaatagctattttaagatccttacatttttaaaatttgtctaaagataatttgaacaatttcatctattgttaaacctatcaacgaattgtgtctatagttagatgctaaaaaaccttcctgatagatttttttttgtttgaaccgttgattcatataataaacttagaagcaagacatatagtaatattttttcacttgaaaattgatatttatgcaacagattaactattctaaaatcgtcatatttatgagttgttatttgcctgtaagccatttacttctaatttctattgtcagcttatctaattaatttggtgatttgctaaataagtaaaattgcctattattggtgtgaaaaacaacaaaggaaaatccactaatgacgcaaattcgaatcttttggtctttaatttcaatatccgaagaaaaaaggatctaatcaataatataaaaaagcgtagaaaacaatttgcctttatataactttcacgagtgattttgtaaatattttataattaattaacaaaaatatctaaggaaagatatttgtttttgattcgctgtataacagcacataaaggaaaccaaatcgaaaaactatcagggtaatatcaaaaaccaatagaagtctaaggacgaaaatgcaaattatttgagaaactagagaaaaaaggaggtaaactatatatagccgattactactctcatttgtttttatacccctcaatcataaacaataaacagagggagtcgccaaattttctcatcattttctcgagaaaatagactaaaagcgattcccgagagaaagaaagaacaaaaaaaaaacatccgagtgaaaatg

SEQ ID NO: 29071 - DNA, 3003 bp, Unknown; identical to SEQ ID NO: 29070
  misc_feature (1)..( 3003): 2750-1469P.txt file - cDNA_ID_2999729; gDNA_ID_1620701; Annot_ID_165071

SEQ ID NO: 29072 - DNA, 3003 bp, Unknown; identical to SEQ ID NO: 29070
  misc_feature (1)..( 3003): 2750-1469P.txt file - cDNA_ID_2999729; gDNA_ID_2926176; Annot_ID_140365

SEQ ID NO: 29073 - DNA, 3003 bp, Unknown; identical to SEQ ID NO: 29070
  misc_feature (1)..( 3003): 2750-1469P.txt file - cDNA_ID_2999729; gDNA_ID_2926176; Annot_ID_199901

SEQ ID NO: 29074 - DNA, 3003 bp, Unknown
  misc_feature (1)..( 3003): 2750-1469P.txt file - cDNA_ID_2999733; gDNA_ID_1620635; Annot_ID_162868
gattggtgattgatttcttgattcaaaagtcaatttagtcttccgagtgtttcttctttttgttgttgtttggaattgaaattgggatctgtaaattggattgttgattgatttcttgattcataaaccctaattatttgttggtgcactctacttcattacgattatactaaacattttggtcaagaatcgcttctttggttagattggtccagagacaacttatagttgtagttgcaagtatttaagaacatccatcttgactcgtaattgaataatgtagattgaagaatcggcaacatttatattgattacaagtaagggagattatgcagagttcttagagcttttctatcatgtaattaagaaaatggttaaattagtaggagaaagtggaagataataagttgtagtttatgaactgaaagaaatttaaagggagagagtcaaagtaacggtatcaaagatgcttctgtatccatgttgcttctatgaactattgacatatatgtatgcttaagctagttaaagggcttggtttggctgtttctgtctttctgatgaaagcttttcattctctgatctctgaatttcattcatgggcacaaaagctagctgaacttatgcttggtatgacattttttccatagcaatctgggttttttttcagctttagcatcagtgtttatcctccatgttgttgtatgacattttttccatagcactaatgtaattcctgaatctgtgtagggagagtattctgcaaaaagggatgtgatgccgatagtgactcatgggaagattgtaagcatttctttttaattctttgtaatctgtaacgaaactgttgatgaaatgatgagcggttagatttgtcctcactatggaacatcataaaaaccaagcttgtctcctacataacgaaattacatgttcatgaagagtatcttctgcttttcaggtttaagtttccaagttaatgaattggtgtaatagtagtgtactctctataggtgtaggagactgcagtgaaatttgctacaaagatcctgtgctaaaagacagaccatggactgctgttatagatcgttctcctggagatgccaaatactctgaggtaattcacacaatgaatctttttcttcaaaaaagagaaatggactgaaccgtatctaattgttgtacatgtaactctgtttttaaattcaggaatgctttcacgcatgtgtagcaggctgtggttacaaggtttgtttccttgcttcaacctcaataatttgatgcgtttggaaatacactctacttctctgaacccgtgtggctgtatttttttgtcatcatgcagtttgatgttgaagctgagatagtcaataaggtgaaaccaaagagacctccaccaccaccgccaaagccacaaccaccaccaccaccaccacgttctcaaaaaccaatgcagcctcctactgaggatgttcttgcaacttccgcttgacgtatctcaacccccatcaaaggctaacacttggaactcctcaattttttggtatctaaacatatgagggagtattacttttcagagtagccaactcaaaggattggtccataaacttttttttttctttttcttttgatagtttttgcaatagagattggagagtagatattagtgggactcgtcccgtgatgaaagttagagcatccaaaaagctcaagttcctaaattccattgaattttttgttttcttaatatgtagaattttcattcttatcaaaagaaaaacaaatgtagaatttcctttcattagatccaataatatttgaacggcacaaaatttccaaataagaaagagtgacaaagagtctagccaatcagagaatgaggagaaagttttcacaaacatccttgaccgttgtaactaattagtagtaaattacttattacccgggaaaaccgtatttaagtaaagaaagttttcaatttcacgattttacttgccataacatttgtgtacgtgtcgttatactatttgtcagatgacttatttccctttttcaattgtcgggaatattttgtagtagacttactataaatatatacaattctagcttactccacaaataaaccaataatctttgtaacgaaggaaaccaaaaaacaatcatggctgattcttcctattcttttgtcatgaagatgacagtgaagaccacaccggcgtcagatttagctttaacaaacctcgcctattgttctccgtttgatctccatcgtttcgccgttcccgaaaccgccgatctcttcctcgctaacgtcggagaagtttttgttctatcaatctcatatcctttttttattcacttacaattttgatcttattcacacttttctttattaattatcgtcgtttctaaacattttgtcccacgggtttatcacatctttttcagattccaattaagcagttataccttcttatggagatggcagctcaaagagatggcaggtctgaagagccggtttacattaggaaggaaaaactcgacatcactcatttcatggattgtcttcaggaatttacccaagagatttgaagtttcagttcattattcttagactctcatatgtaatgacatcgtagtaaggagaagattcatatattgcactaaaatcctttgaagatgtcaaagttgatatttgattattggcacttgacttgttaactatatgaaacttttatgttggttattatgtgttatacatttgtataaacttgcttagattgattagacgagagtatttacatcacttaaaaatcgaggatagttcctgacaaaatggaatgttttctccttcaaaatcaagtcacttcttagtgattaagagttggttacttattttaaaaatttccaccactaatgtattgttttctttttcttcattaaatttgttcgcctatcaacatcggtgagactccgtgatgaaaaattgaaaatcacacaatg

SEQ ID NO: 29075 - DNA, 3003 bp, Unknown; identical to SEQ ID NO: 29074
  misc_feature (1)..( 3003): 2750-1469P.txt file - cDNA_ID_2999733; gDNA_ID_2926178; Annot_ID_200021

SEQ ID NO: 29076 - DNA, 3003 bp, Unknown
  misc_feature (1)..( 3003): 2750-1469P.txt file - cDNA_ID_2999737; gDNA_ID_1620646; Annot_ID_47598
tattatttatttttcacaaaatttaattcatagttatggcaccccaaaaaaaagtacgaaattattacagttttggaggtttctgaaacctctgcctattgtggaggcttttgattcctttgaagcaatcaatgacctctctgtctctcatttgccagcaaagagagattgtttaatgttgtttatggttcacatttttatacaatatcacattttcactgaatcttcctctgcgtctctcaggtaatttaattctctcttttctctcccatcactctgtctcttctctttattgggttttagataaaatgatggaataataatttcatggattcaggaggaagaagatcattcagttgaagcacacatttaaagggttttgttgagaggcaatggaagggggagaagagtttcaagaagaagaagtgtggtcagttttgagagaaagtgaaactcaaggtcctgaaatgaaaatgtccaaaagtaacaatctcttctcagcctcttcctcatcttctgcgaggtacattcctaaaggcaacgaggtctctggaggggcaaaacagtcatctgctccaatgaatattcctgactggtccaaggtttatgggtattcaaagaagaacacaagcagccacttgcattcatgggccattgacgatgatgatgaaggctcaatggttcctccacatgagttagtagcaaaaagacttgcaagaacgcagatctcatcattctctatgtgcgaaggaatcggaagaacgctcaaaggaagagatctcagcaaaacaagaaacgctgtcttaacaagaactggtttcttggaatcgaatatcacatcttcatcaacaacatcaccaccatagttttggcatggcatggagcatggctggatgatcaatatcacattcacacaaaaccctttttagcaccataccatatcattatcatgaaaaaaaaacctaaaaccttatggtatccacatgatttttattaaatatcaatgttattgtcgttatcaccatgtagggaatcatgacactaccaatatggttgagttctctttttttttttttgttgttgttgttgttgttgttgttaggtttttggatttttttagataagtatgatgacgatgaggatgacttgtcaatcccatgcatgggcccataccatttttctcatgttatgtttgtagttctcaatggtcttttaactctttagcagtgcttagtgagcttaaattatagtttagcaaaacaaaatggcatatactttggaacctttgaatgtgagaaatttgaaagcactctcgatctcttcaccattttggcctcgaccaagagagaaaaatgtagcgaataatgttaacatttttggtccgacacaaggttaaggggctcgttccatattgctcactacctttcacttttcaatgttatatagcaactagacatggtgttactaggggaatggggtatatgtatctgttatctatttcggtgtgttgatttaattttttacttcgtgtattcttgaaccaatctgcaactgaaaaagttgtatttgaatttggattaattcgtttcgttgctaaatatccatttcaagatatacataataaatatattagttaatttactatggtaagatatattttcaagaatgaagttgtataaataaaaatacttgtttcgataattttcagttttattcacgtcggtactatctcacccgtactaaatttgaattgccgacaaacaaaaaaaatgtcaagttcggttggattttttattttgtttggatctactcaatatataaatagtaccaatcacactataaacgaaatttactcatctttccttggccctagcaacggttcatgataatcattctttctttttacaatttactttttcgaaataaaaaattgtagtaaaattacagtttcaactaaaaaaaaatcttgtacagaggtgccacaaaaatgcaattcaattttatataaaaatacaacgacaacaaatttgttactttgtcaaagcggattatttggcacgaaaaattcgtgcggaaccgctacatatcatttttgtaaataattttcttcaaaattggctcgtttgagtcataaataacacctgatgacaaaaaaaaaaaaaaaatttttttgttactttgtaaacttttgctaaccaaagcctatataaaggcccaattagcccaaaacgacacaaaaatgtgtgaagaaataaacagatggtggtgacgtaagacaagtgtaagagatttcttgtaatccaatcaacaaataataataaacgaattccaagtggtttacttattccagaaacagttccgtgtaggcaaccattaggaaaaccctaactaaattccattattaatttcttttataatccctttctcttgacattgacttctctctctcgattcttcttctccagtttcaatcaaactcaatttcttctcaacgaaccctaatttccaacaaatcggattcagtttcttcttcgggtatgtttcttctcaccaataaattcgagatcttttagggttttctgggtttgtttctcccccgatctagcagacgatcgagtttattaattatgatctttgcttgcttgaaattcgcagagactaatcgaatcgcaatggctaagagttccttcaagatctctaaccctctcggtttgtttcttcaaatccctttctcatcgaattttcaattacttgattttttgttgagtttctgaattctgttaaaacttgctttagatcgtgtatggttttgattttggaactcaattttgattggttttgggatcagatttaatctctgcatacgcttttgattcttcctttgttgttcgtttctctgtttttgtttctaagccaagctgtgagattttatagatatctctgtttaatgatgtacttgtcattaatcttgtggttatgttttgttaatcagaggcaaggatg

SEQ ID NO: 29077 - DNA, 3003 bp, Unknown
  misc_feature (1)..( 3003): 2750-1469P.txt file - cDNA_ID_2999737; gDNA_ID_1620646; Annot_ID_163232
tatatcgttggttttcaaaaaaaaaaaaaaatttgatcaagcaagattcgtaatttcttatgaaggacaataatatcacaagccttttcgagtaaattaacattgtcctcttcaaactttaacaatatctataactatagccaaaaaagattagaaagtgtaatttgaaaatggcttaggcaaaagcataatttaagataaagcaagtcttttcatatagtacatagttttttgtcttctagcatgaatcagactctatcaataattttggcaggtcttagtagaaatagtaccaaaggctaccactcctctatctaacccttttaattattatttatttttcacaaaatttaattcatagttatggcaccccaaaaaaaagtacgaaattattacagttttggaggtttctgaaacctctgcctattgtggaggcttttgattcctttgaagcaatcaatgacctctctgtctctcatttgccagcaaagagagattgtttaatgttgtttatggttcacatttttatacaatatcacattttcactgaatcttcctctgcgtctctcaggtaatttaattctctcttttctctcccatcactctgtctcttctctttattgggttttagataaaatgatggaataataatttcatggattcaggaggaagaagatcattcagttgaagcacacatttaaagggttttgttgagaggcaatggaagggggagaagagtttcaagaagaagaagtgtggtcagttttgagagaaagtgaaactcaaggtcctgaaatgaaaatgtccaaaagtaacaatctcttctcagcctcttcctcatcttctgcgaggtacattcctaaaggcaacgaggtctctggaggggcaaaacagtcatctgctccaatgaatattcctgactggtccaaggtttatgggtattcaaagaagaacacaagcagccacttgcattcatgggccattgacgatgatgatgaaggctcaatggttcctccacatgagttagtagcaaaaagacttgcaagaacgcagatctcatcattctctatgtgcgaaggaatcggaagaacgctcaaaggaagagatctcagcaaaacaagaaacgctgtcttaacaagaactggtttcttggaatcgaatatcacatcttcatcaacaacatcaccaccatagttttggcatggcatggagcatggctggatgatcaatatcacattcacacaaaaccctttttagcaccataccatatcattatcatgaaaaaaaaacctaaaaccttatggtatccacatgatttttattaaatatcaatgttattgtcgttatcaccatgtagggaatcatgacactaccaatatggttgagttctctttttttttttttgttgttgttgttgttgttgttgttaggtttttggatttttttagataagtatgatgacgatgaggatgacttgtcaatcccatgcatgggcccataccatttttctcatgttatgtttgtagttctcaatggtcttttaactctttagcagtgcttagtgagcttaaattatagtttagcaaaacaaaatggcatatactttggaacctttgaatgtgagaaatttgaaagcactctcgatctcttcaccattttggcctcgaccaagagagaaaaatgtagcgaataatgttaacatttttggtccgacacaaggttaaggggctcgttccatattgctcactacctttcacttttcaatgttatatagcaactagacatggtgttactaggggaatggggtatatgtatctgttatctatttcggtgtgttgatttaattttttacttcgtgtattcttgaaccaatctgcaactgaaaaagttgtatttgaatttggattaattcgtttcgttgctaaatatccatttcaagatatacataataaatatattagttaatttactatggtaagatatattttcaagaatgaagttgtataaataaaaatacttgtttcgataattttcagttttattcacgtcggtactatctcacccgtactaaatttgaattgccgacaaacaaaaaaaatgtcaagttcggttggattttttattttgtttggatctactcaatatataaatagtaccaatcacactataaacgaaatttactcatctttccttggccctagcaacggttcatgataatcattctttctttttacaatttactttttcgaaataaaaaattgtagtaaaattacagtttcaactaaaaaaaaatcttgtacagaggtgccacaaaaatgcaattcaattttatataaaaatacaacgacaacaaatttgttactttgtcaaagcggattatttggcacgaaaaattcgtgcggaaccgctacatatcatttttgtaaataattttcttcaaaattggctcgtttgagtcataaataacacctgatgacaaaaaaaaaaaaaaaatttttttgttactttgtaaacttttgctaaccaaagcctatataaaggcccaattagcccaaaacgacacaaaaatgtgtgaagaaataaacagatggtggtgacgtaagacaagtgtaagagatttcttgtaatccaatcaacaaataataataaacgaattccaagtggtttacttattccagaaacagttccgtgtaggcaaccattaggaaaaccctaactaaattccattattaatttcttttataatccctttctcttgacattgacttctctctctcgattcttcttctccagtttcaatcaaactcaatttcttctcaacgaaccctaatttccaacaaatcggattcagtttcttcttcgggtatgtttcttctcaccaataaattcgagatcttttagggttttctgggtttgtttctcccccgatctagcagacgatcgagtttattaattatgatctttgcttgcttgaaattcgcagagactaatcgaatcgcaatg

SEQ ID NO: 29078 - DNA, 3003 bp, Unknown; identical to SEQ ID NO: 29076
  misc_feature (1)..( 3003): 2750-1469P.txt file - cDNA_ID_2999737; gDNA_ID_2926179; Annot_ID_140469

SEQ ID NO: 29079 - DNA, 3003 bp, Unknown; identical to SEQ ID NO: 29077
  misc_feature (1)..( 3003): 2750-1469P.txt file - cDNA_ID_2999737; gDNA_ID_2926179; Annot_ID_200077

SEQ ID NO: 29080 - DNA, 3000 bp, Unknown
  misc_feature (1)..( 3000): 2750-1469P.txt file - cDNA_ID_2999756; gDNA_ID_1620689; Annot_ID_48528
taaaaaaacgcccaaaacacattacttcgataccatttcacaacacccgttttgctagccacggacaaccttgtgtaaacccctaatctttcttcttgttcttcaacggcccaagtgggatcttgctcaacaccttctcatccaacactgcatactgcttcttgagctcgatcattgctttctcacctaatgggtcgactttgtcttcatacttgtcgtaggcaagaggaaccgtgaagagcaacacaagagctgttgcagcaagataaaaatttagtcatcagggttcagtgatacaagagaaggaaaacactaaatggtatagaagtataagcaaagcattacctatgtatgccaatgtcaagaagttgaagcaaccgcccaagattgagagaacccataacccggcaatagcctattcaatccaatggtacattgttgtcagatataaggataaacatattaagtaccaagtcccaaatagtttctacttaagcacatttgaacttacaatgaggaatttcttgagatcccttcctgatgcaatttcacggagagaagagaatccacggttgatctcgattctgagcccagacgcaagctgaagaataggttcttcagggatatgaacttcaggaatctttggaggggacctgacagagaatcaattgtcaacaatgcacaagtgaataatcataagctgagacatatttacattcatcagttttaacttacttgttaatgaacatagtggcattagaccacaaaaacagcacagcgagaacaacaatcatcacgtggcaaagcagagtgagaagatggtactccatcaattcaaacacaacccaagcagctgtagcaccaccaagtacaccaccagacatcttcttgttcttccacatgaatatatcagccgctgcaaataggaagaataatcaagttgagcaaacattacaacatactgtcatctaaatcaaccacattagaaaaacatggaacttgatactgtaaggtttctatatcgagattatgtcaaaaacccatttttatgatcaaaacattcatttagaaatggaatccctaattaaaccctcacaaatgccaaaataaagaaccccaataatacaaatggacacgatggatcgattcagatcaacgagtaaaatagaaaccctaaacaagtgcagattcaaatcacacatatcaatgaaacctaatccatcaaaatgaaagaataaaccaaacaacacatataagaaaacagatcaagccacaacacacacaaatatatgaaagtaaaaccagatcggagaaaaacttacgctttccaccgccgagaaccttatgaacaggctgctctcgtccgaacaagcggtaaactttcgatttcatagaagacgaaggagaagagggcttcttagtcttcttcttctcgtcttcatcatcagaagatgaagaagacgaagaagaatcaccaccgtgatggatcttctccgatatcttatccatcaacgattctctctccacaacctcaacagctggctcaggagcgatcacagattcatcatgcttatgttcttccgccatcgtttcaaaacgcaaagatcttagcttttttcgatttcgatggaagaaacaaagaacacagtattttagctgcttcccaaagtttttaccttttgagaagaaaagatctcgaagcctaaaatagaagaaagaaatcgaaactctaatctcagccgttgaaaatatgaaactaatctgagccgttggttggttcggatacgaacttccgaagctacaggttcgtttacttaattagagccaaaccttggggaaaaaggcaaaaagccaaatgggaacacaaaatacatttcacaaaacgaatggtcgacatgtgacgccgtcagagttaacgtttcccgtcatgagggacgtatacgtggcgatgtctgagctaagtaactaggttatgatcaggtgtcacgcggctgacgcatgatgcggtacgatctaatttttttaattgcaggacacgtggaggaagattcagccattcgtacatgcgtcacgttctttctgtctgcgtcaaaaaaggacacaatcaaacaaattcttaatattataataaacgtaatattctaaaacagtatataacgtctagaaaaaaatgatagtcggcaaagaaaataacgataataggcaaagaaaaatataataataggtgtaaaacaaaacacatagaaaagtgaaaataggtgtaaaaaaaagaagagaaaaccttgtaaaaaatgtgagagtgagaaagagtggagcccaataaagcacaaataatggacatcaatctgatcaagcccagtatcagttctctcatgggcccattacaaaaagatgctcggaaacaaactgaaacctcaagttatggtccataaataatgaagtacacaaaaatgctcaaaccgatgtattgtgtttcgaataactcagacaattaccttgtacatggaagacaaagtgaaatagtagaagctccatgagagaacacaacacaaataataaaacaaatgatagggtaatggcatgatgaaaaaatattttaggtactgcaacgtctgagaaatgtaattttttttctttgtcgagagaacaagacgagctacttaaatggagtcatattttttgttcagacgacttcacccttaccataatatattccactaaagcctttgtggtatacattaagagcaaattggtcatttacaaaaacaacaaatggaatatccgttgaattaagcatctgacttttgccctttgttcaaatcaaatgcagttataatgggttgagctaagttaaagcccataacatttaaagcccattgaataatctagaaacgacgacgtcgttttattagagaaaccccatttctgtaacacagctcctaaacccatttgctcacttcgtcgtcgtctctctctctcactggtaaaaagcaaacaatg

SEQ ID NO: 29081 - DNA, 3000 bp, Unknown; identical to SEQ ID NO: 29080
  misc_feature (1)..( 3000): 2750-1469P.txt file - cDNA_ID_2999756; gDNA_ID_1620689; Annot_ID_164690

SEQ ID NO: 29082 - DNA, 3000 bp, Unknown; identical to SEQ ID NO: 29080
  misc_feature (1)..( 3000): 2750-1469P.txt file - cDNA_ID_2999756; gDNA_ID_2926182; Annot_ID_140628

SEQ ID NO: 29083 - DNA, 3000 bp, Unknown; identical to SEQ ID NO: 29080
  misc_feature (1)..( 3000): 2750-1469P.txt file - cDNA_ID_2999756; gDNA_ID_2926182; Annot_ID_200354

SEQ ID NO: 29084 - DNA, 3003 bp, Unknown
  misc_feature (1)..( 3003): 2750-1469P.txt file - cDNA_ID_2999758; gDNA_ID_1620689; Annot_ID_48529
ggcgaccttaacaatgggttcgtctttggactttataagctttaaagccggatgaaccttgaggtctcccattactagcttttgtccgatatccaattggcttagatctacttctatatatggtgggataatctctgctgggcataggaactttactgttcttttaatcgtattcagagatgctcctgccaaaagattaagaaatagtgatcaatatcaaaatctaacaggaaactagatgctgcgatctacaaaattgggtagagagtagccagagaaatgaaacttcaaaatcccaaaaatgggtagccagaggaagatacaagccattataagatgtataatgcaaacatagatttcttttaaatcgagttaaaattttgtaaaacatcaaccataacgtcacttgaagtgatgattacttgctatcgactaagcttagctcagtctgatccaagaaagggtaactgaaacccgagcagtatcacttctctacagattagaagctcaatgagctccaatgacgtcaagaatatatgtgtggccttaactacttcaggagttagaaaccgttgtattaatcctgcatttagcatatctactcaagcgtacaggactattcgttcacagcaatcagaagtcaaaaaccacatgtttgatcactatctctcttccaaatctttaaccacatttctcatctattttgttcattgcctatgattcgagaaaagaaaatgctatccagaaactcatactaagaacagtgattcctatgtaagcaccttaacaaactcatgtatatactcctctattctcaaatgcttatcaaaatgcttcctttattttctttttgattcctcactaaagatcccaattataaaaaactagcaaagggtttattacctttcttcaatccaggagaaacatcatctccaatgaacacaagagggatatcaactttcaacaaagcacctggaggcgctcttatgaatgtcacattcagtggagcatcagtcccagagtgcaaatgaatctgaaatcacatagcataacatttctaaaaactcaatacataaaccaataatccaaacacaccactaaaccaaacattgaaaaaatgcaaactttaatcaatttcatgagtgagagaaatggagactttaccgctctaggcaaggctctgactttctcaataacctcatcagaaccaatctcagctcgaacctcaacatcaaagagcctagagaggaaaaaagagtaacccaaatgattcacaagcttcctgatctgattcgtctgaactgaaataagcctcttgtttcctccgtgttgtccatcctcttgttcgaatatgatcgaaggaacccgacccgctttacgctctttcgctgatatgctcttgccggagacagaccttggaacggctaagatcgtctctgcgtgttttggatcgggtcgagggaatccagggaggtaagttaattgggtttcttggatatgatctagggatagagctgcgttcgccgccggagagaataaccggaggttttgtagggttttgggtagtgtttttgcacgacggagcaacattgtttgctttttaccagtgagagagagagacgacgacgaagtgagcaaatgggtttaggagctgtgttacagaaatggggtttctctaataaaacgacgtcgtcgtttctagattattcaatgggctttaaatgttatgggctttaacttagctcaacccattataactgcatttgatttgaacaaagggcaaaagtcagatgcttaattcaacggatattccatttgttgtttttgtaaatgaccaatttgctcttaatgtataccacaaaggctttagtggaatatattatggtaagggtgaagtcgtctgaacaaaaaatatgactccatttaagtagctcgtcttgttctctcgacaaagaaaaaaaattacatttctcagacgttgcagtacctaaaatattttttcatcatgccattaccctatcatttgttttattatttgtgttgtgttctctcatggagcttctactatttcactttgtcttccatgtacaaggtaattgtctgagttattcgaaacacaatacatcggtttgagcatttttgtgtacttcattatttatggaccataacttgaggtttcagtttgtttccgagcatctttttgtaatgggcccatgagagaactgatactgggcttgatcagattgatgtccattatttgtgctttattgggctccactctttctcactctcacattttttacaaggttttctcttcttttttttacacctattttcacttttctatgtgttttgttttacacctattattatatttttctttgcctattatcgttattttctttgccgactatcatttttttctagacgttatatactgttttagaatattacgtttattataatattaagaatttgtttgattgtgtccttttttgacgcagacagaaagaacgtgacgcatgtacgaatggctgaatcttcctccacgtgtcctgcaattaaaaaaattagatcgtaccgcatcatgcgtcagccgcgtgacacctgatcataacctagttacttagctcagacatcgccacgtatacgtccctcatgacgggaaacgttaactctgacggcgtcacatgtcgaccattcgttttgtgaaatgtattttgtgttcccatttggctttttgcctttttccccaaggtttggctctaattaagtaaacgaacctgtagcttcggaagttcgtatccgaaccaaccaacggctcagattagtttcatattttcaacggctgagattagagtttcgatttctttcttctattttaggcttcgagatcttttcttctcaaaaggtaaaaactttgggaagcagctaaaatactgtgttctttgtttcttccatcgaaatcgaaaaaagctaagatctttgcgttttgaaacgatg

SEQ ID NO: 29085 - DNA, 3003 bp, Unknown; identical to SEQ ID NO: 29084
  misc_feature (1)..( 3003): 2750-1469P.txt file - cDNA_ID_2999758; gDNA_ID_1620689; Annot_ID_164692

SEQ ID NO: 29086 - DNA, 3003 bp, Unknown; identical to SEQ ID NO: 29084
  misc_feature (1)..( 3003): 2750-1469P.txt file - cDNA_ID_2999758; gDNA_ID_2926182; Annot_ID_140629

SEQ ID NO: 29087 - DNA, 3003 bp, Unknown; identical to SEQ ID NO: 29084
  misc_feature (1)..( 3003): 2750-1469P.txt file - cDNA_ID_2999758; gDNA_ID_2926182; Annot_ID_200356

SEQ ID NO: 29088 - DNA, 3000 bp, Unknown; identical to SEQ ID NO: 4177
  misc_feature (1)..( 3000): 2750-1469P.txt file - cDNA_ID_2999762; gDNA_ID_1620689; Annot_ID_48534

SEQ ID NO: 29089 - DNA, 3000 bp, Unknown; identical to SEQ ID NO: 4177
  misc_feature (1)..( 3000): 2750-1469P.txt file - cDNA_ID_2999762; gDNA_ID_1620689; Annot_ID_164699

SEQ ID NO: 29090 - DNA, 3000 bp, Unknown; identical to SEQ ID NO: 4177
  misc_feature (1)..( 3000): 2750-1469P.txt file - cDNA_ID_2999762; gDNA_ID_2926182; Annot_ID_140634

SEQ ID NO: 29091 - DNA, 3000 bp, Unknown; identical to SEQ ID NO: 4177
  misc_feature (1)..( 3000): 2750-1469P.txt file - cDNA_ID_2999762; gDNA_ID_2926182; Annot_ID_200361

SEQ ID NO: 29092 - DNA, 3003 bp, Unknown
  misc_feature (1)..( 3003): 2750-1469P.txt file - cDNA_ID_2999777; gDNA_ID_1620751; Annot_ID_49818
tttgtatttgtgtctttaaaattgatacggttagaacgaatgtatatgtgttgtattctttataaattaataaaatgtatttataaatagaataagatttatcatttttatcttattatataaagtttggtttttaaaatgaccggaacatgtgtcaattaaaatattagatttatacaagtaaaaaataatatctgtttatatatattacatgtcaaatctaaattaaacaatatatttaaaacaaaactagaaaattgttaacattatcaaaaaatgaaaattatcaaaagacaaaattatacacaagtaaaaataatatttgtttgtatattaaaataagggagatttataaaattacactttttttactactcttttgcaacaatacccttttatgttgtccatttttaaaaataccccttctcttgaacaaaatgaccaaattaccctcatctaatagaaacatgtaattgaaaactgaacttttcccgccaattttttggcgccaaattttttttttcccgccaaaaagaaaagtttctgccaaacttttttcccgacaaaaaaaaacattcccggcaaaaatttttttcgtaacaaatttttcctcagccaaaaaaatgattttaaaaatccttgtaaatattttttggcggcaaatagatttacaaagaattttaaaagggttttaaaagatttacaagagattttaaaaaggttttaaaagatttacaaaagattttaaaagagtttgaaaagatttacaatggattttaaaagggttttaaaaaatttacaagtaattttaaaaggttttaaaatcccttgtaaatctttcaaaatacttttaaactctttaaaaatctttacaaatcctttgtaaatcttttaaagccctttaaaatccattgtaaatattgtaaaacccttttaaaatcccttgtaaatattttaaaattttttaaaacaattttaaagcctttaaaaatctttaaaagacttttgtaaatttttgaaatccctttaaaatctattgtaaattacccttttaaaatcccttgtaaatcttataaaacccctataaaatcccttgtaaatcttttaaaactcttttaaaatcccttgtaaatctatttcccgccaaaaaaaaaaaattggcgggaaaaatatgtttgaaaacaaattttggcgggaaatttattttggaatatttttggcgaaaaaatattaatttttcattttgttaacctaaaacaatttccaaataagggtaaaatggtcattaaaaatttaaagagggtagaaataaaattggataaaacaaaagggtaaagttgaaaaagggcatcatgaaaagggcattagaaaaaaaaattcttaaagggataataattaatatattaaactattaagttgattaactgattttttttgtgttaatatattatcaaaacaaaacttgtttttttttttttttttttttcatccaaaacaaaacttgttttatttattgatttttgtaaataactgtttttcttagcttttattacttcttatgttggatgttcgtgtttggtctgagaattacctccttaagcacaagttgttcctttataaatgagctccatttaggcataatgatgtgaaccctttagtttttgttggtgtagactcaaattagagagaggagtcgctgagattgataagctagcaaacagaatcttccatatcgacaagcttgggaatcaacctgaattgtgatagaagagagaaaacattttctaggaaactaaattgtctcttttgaatttgaaatactttatttggagcttgtttgcttagcgcatatctcgaatttgattatatctcgcaagataattatgtgacgtttttgaattatgtaaacatctcaataagtgatataggaaaatttaacttacaaacagaaaaataagcgattttttcaatacattctaatagttgaatacattaattagaattaggagggatacaataatagataactacaattcattcgtcatgttctaaaaatagagagcaataagtacgacggacagtaccgtcactacttggcgtcatggtagataggtagtggatctgctagatatatgagaacggaaagaaccagaagctattagaggcgggaggagatatgtggggatgatttcagtgcaattccacgacgcaccatttccactttcgtaacacctaaacgaccgcttcggccgtataaaatcgcaaatgtttggtctcagtgtatttttccaatttccaaatacatcaattcaaattatataatatctagtggcaattataagtatatcatatattttcaaaattaattaaaaagattactaaattatgtttgactacaactattataatagttaaaaacataaacaaaaacaaagaaactattttaataaaaaaatcaagtaaacattaaaacataagcaaaaaataatgttaaagaaattattaattattaatttactaataattaatacctctataaattaattgttagaggtttaacgtaatttataaggaaaactaaagaagactttaacccataaagaaaaaaacaaagactgaattgaaggcccatatttagaagaagagaaagaagacccaaatatgatataaaatccagcccatttatatatttttattttgtttctggaaggaaaataagaaaatggcaaaaacgaaataatctgaaaaagtaaggtcttttaccaaaaaggatattttttttataaacagagcataaagttttcacttttcttctgctcctttctcgtctctgtcttcttcgtcctcattcgttttaaagcatcaaaatttcatcaacccaaaatagattaaaaaaatctgtagctttcgcatgtaaatctctctttgaaggttcctaactcgttaatcgtaactcacagtgactcgttcgagtcaaagtctctgtctttagctcaaaccatg

SEQ ID NO: 29093 - DNA, 3003 bp, Unknown; identical to SEQ ID NO: 29092
  misc_feature (1)..( 3003): 2750-1469P.txt file - cDNA_ID_2999777; gDNA_ID_1620751; Annot_ID_166797

SEQ ID NO: 29094 - DNA, 3000 bp, Unknown
  misc_feature (1)..( 3000): 2750-1469P.txt file - cDNA_ID_2999777; gDNA_ID_2926183; Annot_ID_140675
gtatttgtgtctttaaaattgatacggttagaacgaatgtatatgtgttgtattctttataaattaataaaatgtatttataaatagaataagatttatcatttttatcttattatataaagtttggtttttaaaatgaccggaacatgtgtcaattaaaatattagatttatacaagtaaaaaataatatctgtttatatatattacatgtcaaatctaaattaaacaatatatttaaaacaaaactagaaaattgttaacattatcaaaaaatgaaaattatcaaaagacaaaattatacacaagtaaaaataatatttgtttgtatattaaaataagggagatttataaaattacactttttttactactcttttgcaacaatacccttttatgttgtccatttttaaaaataccccttctcttgaacaaaatgaccaaattaccctcatctaatagaaacatgtaattgaaaactgaacttttcccgccaattttttggcgccaaattttttttttcccgccaaaaagaaaagtttctgccaaacttttttcccgacaaaaaaaaacattcccggcaaaaatttttttcgtaacaaatttttcctcagccaaaaaaatgattttaaaaatccttgtaaatattttttggcggcaaatagatttacaaagaattttaaaagggttttaaaagatttacaagagattttaaaaaggttttaaaagatttacaaaagattttaaaagagtttgaaaagatttacaatggattttaaaagggttttaaaaaatttacaagtaattttaaaaggttttaaaatcccttgtaaatctttcaaaatacttttaaactctttaaaaatctttacaaatcctttgtaaatcttttaaagccctttaaaatccattgtaaatattgtaaaacccttttaaaatcccttgtaaatattttaaaattttttaaaacaattttaaagcctttaaaaatctttaaaagacttttgtaaatttttgaaatccctttaaaatctattgtaaattacccttttaaaatcccttgtaaatcttataaaacccctataaaatcccttgtaaatcttttaaaactcttttaaaatcccttgtaaatctatttcccgccaaaaaaaaaaaattggcgggaaaaatatgtttgaaaacaaattttggcgggaaatttattttggaatatttttggcgaaaaaatattaatttttcattttgttaacctaaaacaatttccaaataagggtaaaatggtcattaaaaatttaaagagggtagaaataaaattggataaaacaaaagggtaaagttgaaaaagggcatcatgaaaagggcattagaaaaaaaaattcttaaagggataataattaatatattaaactattaagttgattaactgattttttttgtgttaatatattatcaaaacaaaacttgtttttttttttttttttttttcatccaaaacaaaacttgttttatttattgatttttgtaaataactgtttttcttagcttttattacttcttatgttggatgttcgtgtttggtctgagaattacctccttaagcacaagttgttcctttataaatgagctccatttaggcataatgatgtgaaccctttagtttttgttggtgtagactcaaattagagagaggagtcgctgagattgataagctagcaaacagaatcttccatatcgacaagcttgggaatcaacctgaattgtgatagaagagagaaaacattttctaggaaactaaattgtctcttttgaatttgaaatactttatttggagcttgtttgcttagcgcatatctcgaatttgattatatctcgcaagataattatgtgacgtttttgaattatgtaaacatctcaataagtgatataggaaaatttaacttacaaacagaaaaataagcgattttttcaatacattctaatagttgaatacattaattagaattaggagggatacaataatagataactacaattcattcgtcatgttctaaaaatagagagcaataagtacgacggacagtaccgtcactacttggcgtcatggtagataggtagtggatctgctagatatatgagaacggaaagaaccagaagctattagaggcgggaggagatatgtggggatgatttcagtgcaattccacgacgcaccatttccactttcgtaacacctaaacgaccgcttcggccgtataaaatcgcaaatgtttggtctcagtgtatttttccaatttccaaatacatcaattcaaattatataatatctagtggcaattataagtatatcatatattttcaaaattaattaaaaagattactaaattatgtttgactacaactattataatagttaaaaacataaacaaaaacaaagaaactattttaataaaaaaatcaagtaaacattaaaacataagcaaaaaataatgttaaagaaattattaattattaatttactaataattaatacctctataaattaattgttagaggtttaacgtaatttataaggaaaactaaagaagactttaacccataaagaaaaaaacaaagactgaattgaaggcccatatttagaagaagagaaagaagacccaaatatgatataaaatccagcccatttatatatttttattttgtttctggaaggaaaataagaaaatggcaaaaacgaaataatctgaaaaagtaaggtcttttaccaaaaaggatattttttttataaacagagcataaagttttcacttttcttctgctcctttctcgtctctgtcttcttcgtcctcattcgttttaaagcatcaaaatttcatcaacccaaaatagattaaaaaaatctgtagctttcgcatgtaaatctctctttgaaggttcctaactcgttaatcgtaactcacagtgactcgttcgagtcaaagtctctgtctttagctcaaaccatg

SEQ ID NO: 29095 - DNA, 3000 bp, Unknown; identical to SEQ ID NO: 29094
  misc_feature (1)..( 3000): 2750-1469P.txt file - cDNA_ID_2999777; gDNA_ID_2926183; Annot_ID_200436

SEQ ID NO: 29096 - DNA, 3003 bp, Unknown; identical to SEQ ID NO: 24208
  misc_feature (1)..( 3003): 2750-1469P.txt file - cDNA_ID_2999785; gDNA_ID_1620724; Annot_ID_49250

SEQ ID NO: 29097 - DNA, 3003 bp, Unknown; identical to SEQ ID NO: 24208
  misc_feature (1)..( 3003): 2750-1469P.txt file - cDNA_ID_2999785; gDNA_ID_2926184; Annot_ID_140701

SEQ ID NO: 29098 - DNA, 3003 bp, Unknown
  misc_feature (1)..( 3003): 2750-1469P.txt file - cDNA_ID_2999789; gDNA_ID_1621096; Annot_ID_55665
ttctctcgagtcaagccactctatgcagtcactatctggcttggagatgtctcccttgatgtcagaccttatggttttagccatagtaaaaagcggaccgatggggttgaagttgacttgagggcagagctgggacatgtggtcaatggtatctttttcaagttcttgaaaagtttcgatgagaacagagaaaggcttgtgaagtcgcttgatctgctctaaaatggtacctcctatagaggacagcggagaggaagggtgaagaaagctagggatctcgtcatgcttcaatgttaatggcttgaaagggacgtcaacggttatttccggctcggtttcggtcggaaacttaactaactggtggtggtaatagtaataagcggcgaggcaagcacaagactggacccaaagaacagctgatgggatttgaagctcctcggctatgtcacaaacccatggaacaaaggcattatttatgagacatctcactggttgcttctcatatttcttgacaagattcttgatctctcgttttccggaaacttcaagtgatttttgtaacaaatcaaagtcttctttgtagacaaatccatcctcgaagaactcgaaccggagaaaacctagcccgaccggtttgagcacaccgtcttgaatattgttggcttgacgcatcttcttgcccaatggttcctctgtggttacaaaggtgacgattaagcctttagaggcaatgatctttccgagacgaagaagagggcttatgtgaccttgccctgggaatgatacgagcatcacatgaggtaacgacgattccatctccatatttttttttttgttggtaaaactcaaaaagaagtttttgtcttctttacaatatttccaatttagatacctcgatttatggaaggttgggtagagaggcctttccacggcgtgctatttttttatacaaatattgataataaatgtagaaaaatatcataaaatacagcatagacataggggaaaaatgtcaattaatcccccaactttcaaaaaatggccattttatacatcaacttcgtatgcggccgtttaaatcatgaatttaacgttgactaattttaaaaacgtgattattcgttgaccaggccaaagcagacatgtcgttatcagtcattaacggaacttctaacgtccgttatcatccgttaacaactttattagtcaagttttaaattgtggccattttaaacatcaagttcatatgtggccatttaaaacatgaactaaacgttgactaccatttaaaacatgaaaaattcgttgaccaaaccaaaataaacatgttgttatcattcattaaaagaacttataacattcgtaaatttataagtttttagtcaattattaaaaagataataataagacaaaacaaaattatagatacaattttagaaaaaaagcgtaaaattaagaaaaaacaaaaactagaagagaagtttttataatgattataatgatattaaagtccttgagcagatgacctacttgatttatttttcaacgattacctgctctggttataatggtattataaaccacgagattagcgacttcataatcaaccaatataagaactctcttatgatagtattaaacataatgtttaacggttgaccaaaaacaaaaattaacgagtttagaccaaaacatgtgactctattaatttgattaaattgtggaacagatcacttattatttttgtcgtaaactccatgagctatcccacaaaaattaactttccaacaaactctaagattatgcatatcgagatgatgtctccactgacttttggtttcgaataaaatgttattaaaaattagatattcgaatttggatctttatcaaattaatataaatttaaaatatgttaaattctaaattgattcttccgactactagaattatttagttcatctaatgatatctccacgtctactttaacaaaacaaaaaaaaaatctccaattgtttaatttttaaatgggagaaaagtgtttatagaagaatcgtacatgatagattgatagaggttacatatagttttgtagctaggttttgtgttaatgaatatgatcgacctagttgtgacataaaaagcttcatgaggctttttgggcgaaatgagatgatcacactaactcaaggatgtgtaggtggaaaacaaaagagtactagattgccgttctcaaataatctgcgcctcggagatggagatctagttgactgaggatgcggactcgtaacattgccaccaccataacacacttaagggaaggattctaatggattccaaaatcaccacatgcatgacagtatgactcgattagaattagatagaaaaatgagaagatccgtcttcagttaccggcgaggaatgccgaaaaccgaagtggaagatcggtaatttttttttagtgcagagaaaaattaagaaagaaaagagaaacccataaaaatagagatagtttctcaaaatattatttgcataatcatcatattaagcaaacatgaaaaaatctctaatatatgaaacaatatattattataattttactatctattttttacacaaatgaaatatattaattggctaaaaaattatttttaatcattttatcaaattatattctaacaattaaaacaaaaattactattgtaacatgactatttgttcaaggttgttctcgttaaaaatatttcgaaataatttatttttctttgaacatatttagttgattttttatcagtaaaattatttgtttttcctaatgatatataactcttataaataaattaaataatatatacatactgtagttccaacgtatatcatcaatatctatccaaagttggattttcttggttgacgttacccaaccaaaattctcaattttcccagtggattactcttacagtccaaagtttcaatttttctgagcttcaaaaatccactctaatg

SEQ ID NO: 29099 - DNA, 3003 bp, Unknown; identical to SEQ ID NO: 29098
  misc_feature (1)..( 3003): 2750-1469P.txt file - cDNA_ID_2999789; gDNA_ID_1621096; Annot_ID_171001

SEQ ID NO: 29100 - DNA, 3003 bp, Unknown; identical to SEQ ID NO: 29098
  misc_feature (1)..( 3003): 2750-1469P.txt file - cDNA_ID_2999789; gDNA_ID_2926163; Annot_ID_139808

SEQ ID NO: 29101 - DNA, 3003 bp, Unknown; identical to SEQ ID NO: 29098
  misc_feature (1)..( 3003): 2750-1469P.txt file - cDNA_ID_2999789; gDNA_ID_2926163; Annot_ID_198929

SEQ ID NO: 29102 - DNA, 3003 bp, Unknown
  misc_feature (1)..( 3003): 2750-1469P.txt file - cDNA_ID_2999793; gDNA_ID_1621096; Annot_ID_55670
aaagttcagtcatcactatcaacacacacatgagtatacatgatatctttacaaaataattagtttctttatcttgaactttgatgtaaattgcaaatgattcgagataaaatgaattcttgcctaattatcttcgtgagtttagagaaatttgtgatcaattgagctccataggtcctacaggcccgacttaacacatgtgttaggagtgctagacgatatggtccaaaaaaaaatctttatttaattcatacaaaaagttctacttttttgaaaaacaaatagctactaattatgattatatgtttctcatttttacatccctcgttgtatagcagaagcacaacatgctgattattctggtacaagttaataaagcaaagttgtgttgaaaaaaaaaaaaaaaactacttatatttaaaaaattaaaaatattcttagttatctaaaaaaacagaaccactaatcaagaaatataccttaaaattctaaatttggtttaaaaaataaatatggaaatatccaagtttcttaaaagtaacatttctataattagaaaccacacttctttaataataatcataggccaatattttttttccaataacccttaatttttttgggtccgctctagcaccgggtcttgccaatatttgagccgaacctctttccagaacacaacttctactcgtaattttcattattctttccattgtgaagatacaaatttgttgtgttggaagatgtcaatgtgaacggatataatggtaggttaatgagaatgtttttttatggtagtgttctagaatcagtagagaagtcatatgaagtagatgatgatatacatggtgagatgaagggaaaacagttaccttttggaatagggttgaacctctccaaaaagtgaagttgatcactgataatacaaggaaatgataaagaggtgacattcgagtgatcaatgaacctgtttcctcctaaatgttgttagtaacatgtttgattgtatgttgttagaatggtttatcagagtgcattcgcacaactatccaatctctcgagatcttctctattcgttttgatattttgaactttttgaaaacctctcaatctattgataagacaacttttttatgaaaaaatcaagtttgagaactaggttttgtgtttattgatctagtttacttagtcatattcactaagtcgtcaatatggtatgctttcaacaataacatagtaatttgaatgcctcgtacattttaggcgattttctattacaatgttttggtagagaatacgtatttgtatatttatgatgtatacgtgcatatacattaattgttttgtcggtttattatgatcaaacaatagtttgtctgtcagaagattcaagaaatatctttgaatctgagagtttccaaaaaacgttatgatgaaaatttggcatatacgtatttctgacaagctgataatattgtcatcttgcatttcaagcagtttcgacaaaattttatccaactgttatattcaaactaattgaaaatcgaaaaaccaccattaaaaattagttaaaaataacatatcattttgaaaatgcaatatttaaaaatttaacatatcaatttaacatgcttgttttcttaataagttttgatatattataaaatgaaccgcgtgattacaatttttctttttgtgatggaactgtcgttagttaaacacttaaacttaaactttcatgtaagttttgtttattcatatttgactcaattgaaacccaataatcaagaatgtcaaatattatatgttttgtcggatttgtaacgtgattctcgctcatttaataatgtgataatatcataaaatttaatctatgtagttgtttaatatgatattaaactttattaatgtaataagatcgataatactaagttactaacccaaatcatacacttacgagttacgacactaccgcactatcttggttatattaaatactccttttgtttctaatagtttgatgtttatatcaacattattatttactttcatttgttaccgatagaaagaggagaaaattgttgacaaaaacaaagaaaaaagtaaaattaatattattaaattaataaaaataacaaactgtaaaagctatttttaaaaatttttcttgtaaaacatctaaaaattattcttgtagaaacagaggaatatcattgaagataatagtgtgaaattatatatatatatagaaatatataaagtaggatttttttctgtatacaaatatacgtttccaattttatcaaaaactgtaaagatttttttctttgtcagtacctgctaaacttgttaatttttttattaaaaaaaaatcaaattacaattcttctataatcattttaaattccatttctttataccacaaaagattatattgcctttatcgtctttggtatgtatgcgtgaatatatttatttattttcttttctttcattttctttttaaagaactttataaatgaaataaggaacaaacaatatacacatgtactaacgtatataaataatatcatcaatatctatccaaaacttggatttcatggttgacgtggcccaaccaaaatctcaagttctctgcggatgacgaaccatctcaccatctctttttttctctctcttttttttttttaatatcatcagcacggttacataaaattcgtgatccatgaagttggctttcttgtcgttttacttcatcaccccatttttttaaagtctccatctttatacttcttcaactctccaccaccaccattgtcaccaccacatttaaacacacactttcacttgtagtgggattcgaaagtgcgttttattcatttgttttactgtttttgataacctcaaaatttgcctaaattttattctctataaatccttatatgttttacttacattcctaaagttttcaactttcttgagcttcaaaaagtacctccaatg

SEQ ID NO: 29103 - DNA, 3003 bp, Unknown; identical to SEQ ID NO: 29102
  misc_feature (1)..( 3003): 2750-1469P.txt file - cDNA_ID_2999793; gDNA_ID_2926164; Annot_ID_139813

SEQ ID NO: 29104 - DNA, 3000 bp, Unknown; identical to SEQ ID NO: 6578
  misc_feature (1)..( 3000): 2750-1469P.txt file - cDNA_ID_2999801; gDNA_ID_1621097; Annot_ID_55744

SEQ ID NO: 29105 - DNA, 3000 bp, Unknown; identical to SEQ ID NO: 6578
  misc_feature (1)..( 3000): 2750-1469P.txt file - cDNA_ID_2999801; gDNA_ID_1621097; Annot_ID_171145

SEQ ID NO: 29106 - DNA, 3000 bp, Unknown; identical to SEQ ID NO: 6578
  misc_feature (1)..( 3000): 2750-1469P.txt file - cDNA_ID_2999801; gDNA_ID_2926165; Annot_ID_139886

SEQ ID NO: 29107 - DNA, 3000 bp, Unknown; identical to SEQ ID NO: 6578
  misc_feature (1)..( 3000): 2750-1469P.txt file - cDNA_ID_2999801; gDNA_ID_2926165; Annot_ID_199079

SEQ ID NO: 29108 - DNA, 3000 bp, Unknown
  misc_feature (1)..( 3000): 2750-1469P.txt file - cDNA_ID_2999805; gDNA_ID_1621097; Annot_ID_55747
agtctggttggcgtttaagctctgctgtcttcaatcaagtcttcccgtccactaaatactacttccagaacttatgtgcatgttttggctttcgccttgtaggccttggtggctaggaatgatggtgtgtggagcaaggatcatgtgtctgccttgcgtaagatttgcccgatggtaagtggcgagtttacaacagaggcatctgcagctgaagtcgagggttatggtgcttcaaagctaacagttgactccgccgtcaagtatttacagcttgctaataagcttttctctcaagctgagctctaccatttttgtgcaagcattttagaacttgttattccagtttacaagagcaggaaggcttatgggcagttggctaagtgtcacactttacttactaatatatacgagtccattcttgaccaagaatcaaacccaatcccatttattgatgctacatattaccgggtgggattttatggggaaaagtttgggaagttggacaggaaagaatatgtataccgagaaccacgagatgtgcggctaggggatataatggaaaaactgagccatatatatgagtcaagaatggacagcaaccatattctgcacattataccagattcgaggcaagtgaaggcagaagacttgcaggcaggagtgtgctatctgcaaattactgctgttgatgcagtgatggaagatgaggatcttgggagcagaagagagagaatattttctctttcaactggaagtgttcgagcacgagtgtttgatcgtttctaatttgacacaccatttacgaaaaatggtaaaacccaaggtggattagaagatcaatggaagagaagaacagtgctgcagactgagggttcattccctgcccttgtgaataggctgttggttaccaagtctgaatcccttgaattctcgccagtggagaatgcgattggaatgattgaaacgcggacaaccgctctgagaaatgagctagaggagcctcgtagctcggatggggatcacctaccacggcttcaaagtctgcagaggattctccaaggaagtgttgcagtgcaggtgggtttttctcccataatatctgtgttatagattgtgttgtaaaacgtagaaatgctcatcatatgcctttccatggaaatatgcaggtgaacagtggggtgttgagcgtgtgcacagctttcttatcaggagagcctgcaacgagattgcgttcacaggaactgcagcaactaatcgcggcactgcttgaattcatggcggtttgtaagcgagccattagggttcactttagattaatcggagaagaagatcaggaattccatactcagcttgtcaatggatttcagtctctcaccgcagaactctcccattacatccctgctatcttatccgaactttagtgtatctttgtcagtttttgttacgagttttgtgcttttttcttccaccatttggcttggctatatgtttatcatttctgtaattcttagtttaatgacaacaagtgagaaaaaaattataaatgacaattggttgacttctaattcagaagcttatgttatattcgatcgaggacatgagctctctcagcttcaaacacaagccgctcaactatttaggatgcctgcgacatctcagaaggcaatcaagtaatcaacagtcacagtagaagcacaagctgaagaagatgaagaggaggttggtgagaccggtgctgatgctcgtgacattgaattggtcatgactcacgctgtagtttcgggtagcagatcggttaagtcactcatgggtcacgtcttcagacattgtaagtgcaataatatggttctcactccttgaagagaaaatgaacctctctctgctttgttcattggcaaattgtttttatataactttgaagtttcataaaatcggattattgccctttctgttatctaatctcattgtatgtacttagttatgatgcatctgcattatctgacttctaatcttttttgccaacacatgtgaaattacacgaacataagtttgataaacgtaaagaagttaggatttagaaacatcatcttgtgaaaaataggcaaagttaattatacgaaagtctcaataggaacgtttaagcaaagaagtgacacataagagacgttgaaacactatgcatagattctaactcgtcaatcatcctctgtttcttttcaagactgcaggttgaattcatcgaaatttccgccctttttaaacacttaaagttctccagaatgtatcttatgagttctttttcatcttctcttcctccatatcctttccattcaaagatcgtgggatgagacgacaagcattcgggaacagaactcggttggttccataaaactggagcatgattctctgaccgttcaatcagaaatgtggagtcgaccattaaaacctctagtttaggagaattagagaggaaaaccacaagtgattcacacaagtccgggtaaaatcgatgtatgctacactctttaagtagagagtaaacggcgttacaccatgcaaccattgtatcaccacgtatagatagctcaagatactcgattgaagaaagagatctcagaagtaaacggagcatatattaattagagtgccacgtcagcggggtttttttataatgataagtctcctccgctcaatttcagatcagaatcagttcatccatggaaacagcgtcgagagtggaactgattgttaaaggcaacttaccggagttccttctcagtacaatccagccaaccggaagctcgacctaatctcccattaccacggcgatgaagcttcgatcccaaccgtcgatctctcgagctccgattccgcgagagaagccatcggtgaccttgtcgcgactggggagccttccacgtaatcaaccatggtgttccaatccatctccttgatcggatgaggtctttaggtctctctttcttccaagactctcccatg

SEQ ID NO: 29109 - DNA, 3000 bp, Unknown
  misc_feature (1)..( 3000): 2750-1469P.txt file - cDNA_ID_2999805; gDNA_ID_1621097; Annot_ID_171148
atctggtatgtgttttacatgcgcagtggatcatctcgcagtctggttggcgtttaagctctgctgtcttcaatcaagtcttcccgtccactaaatactacttccagaacttatgtgcatgttttggctttcgccttgtaggccttggtggctaggaatgatggtgtgtggagcaaggatcatgtgtctgccttgcgtaagatttgcccgatggtaagtggcgagtttacaacagaggcatctgcagctgaagtcgagggttatggtgcttcaaagctaacagttgactccgccgtcaagtatttacagcttgctaataagcttttctctcaagctgagctctaccatttttgtgcaagcattttagaacttgttattccagtttacaagagcaggaaggcttatgggcagttggctaagtgtcacactttacttactaatatatacgagtccattcttgaccaagaatcaaacccaatcccatttattgatgctacatattaccgggtgggattttatggggaaaagtttgggaagttggacaggaaagaatatgtataccgagaaccacgagatgtgcggctaggggatataatggaaaaactgagccatatatatgagtcaagaatggacagcaaccatattctgcacattataccagattcgaggcaagtgaaggcagaagacttgcaggcaggagtgtgctatctgcaaattactgctgttgatgcagtgatggaagatgaggatcttgggagcagaagagagagaatattttctctttcaactggaagtgttcgagcacgagtgtttgatcgtttctaatttgacacaccatttacgaaaaatggtaaaacccaaggtggattagaagatcaatggaagagaagaacagtgctgcagactgagggttcattccctgcccttgtgaataggctgttggttaccaagtctgaatcccttgaattctcgccagtggagaatgcgattggaatgattgaaacgcggacaaccgctctgagaaatgagctagaggagcctcgtagctcggatggggatcacctaccacggcttcaaagtctgcagaggattctccaaggaagtgttgcagtgcaggtgggtttttctcccataatatctgtgttatagattgtgttgtaaaacgtagaaatgctcatcatatgcctttccatggaaatatgcaggtgaacagtggggtgttgagcgtgtgcacagctttcttatcaggagagcctgcaacgagattgcgttcacaggaactgcagcaactaatcgcggcactgcttgaattcatggcggtttgtaagcgagccattagggttcactttagattaatcggagaagaagatcaggaattccatactcagcttgtcaatggatttcagtctctcaccgcagaactctcccattacatccctgctatcttatccgaactttagtgtatctttgtcagtttttgttacgagttttgtgcttttttcttccaccatttggcttggctatatgtttatcatttctgtaattcttagtttaatgacaacaagtgagaaaaaaattataaatgacaattggttgacttctaattcagaagcttatgttatattcgatcgaggacatgagctctctcagcttcaaacacaagccgctcaactatttaggatgcctgcgacatctcagaaggcaatcaagtaatcaacagtcacagtagaagcacaagctgaagaagatgaagaggaggttggtgagaccggtgctgatgctcgtgacattgaattggtcatgactcacgctgtagtttcgggtagcagatcggttaagtcactcatgggtcacgtcttcagacattgtaagtgcaataatatggttctcactccttgaagagaaaatgaacctctctctgctttgttcattggcaaattgtttttatataactttgaagtttcataaaatcggattattgccctttctgttatctaatctcattgtatgtacttagttatgatgcatctgcattatctgacttctaatcttttttgccaacacatgtgaaattacacgaacataagtttgataaacgtaaagaagttaggatttagaaacatcatcttgtgaaaaataggcaaagttaattatacgaaagtctcaataggaacgtttaagcaaagaagtgacacataagagacgttgaaacactatgcatagattctaactcgtcaatcatcctctgtttcttttcaagactgcaggttgaattcatcgaaatttccgccctttttaaacacttaaagttctccagaatgtatcttatgagttctttttcatcttctcttcctccatatcctttccattcaaagatcgtgggatgagacgacaagcattcgggaacagaactcggttggttccataaaactggagcatgattctctgaccgttcaatcagaaatgtggagtcgaccattaaaacctctagtttaggagaattagagaggaaaaccacaagtgattcacacaagtccgggtaaaatcgatgtatgctacactctttaagtagagagtaaacggcgttacaccatgcaaccattgtatcaccacgtatagatagctcaagatactcgattgaagaaagagatctcagaagtaaacggagcatatattaattagagtgccacgtcagcggggtttttttataatgataagtctcctccgctcaatttcagatcagaatcagttcatccatggaaacagcgtcgagagtggaactgattgttaaaggcaacttaccggagttccttctcagtacaatccagccaaccggaagctcgacctaatctcccattaccacggcgatgaagcttcgatcccaaccgtcgatctctcgagctccgattccgcgagagaagccatcggtgaccttgtcgcgactggggagccttccacgtaatcaaccatggtgttccaatccatctccttgatcggatg

SEQ ID NO: 29110 - DNA, 3000 bp, Unknown; identical to SEQ ID NO: 29108
  misc_feature (1)..( 3000): 2750-1469P.txt file - cDNA_ID_2999805; gDNA_ID_2926165; Annot_ID_139889

SEQ ID NO: 29111 - DNA, 3000 bp, Unknown; identical to SEQ ID NO: 29109
  misc_feature (1)..( 3000): 2750-1469P.txt file - cDNA_ID_2999805; gDNA_ID_2926165; Annot_ID_199082

SEQ ID NO: 29112 - DNA, 3000 bp, Unknown; identical to SEQ ID NO: 6596
  misc_feature (1)..( 3000): 2750-1469P.txt file - cDNA_ID_2999815; gDNA_ID_1621098; Annot_ID_55783

SEQ ID NO: 29113 - DNA, 3000 bp, Unknown; identical to SEQ ID NO: 6596
  misc_feature (1)..( 3000): 2750-1469P.txt file - cDNA_ID_2999815; gDNA_ID_1621098; Annot_ID_171224

SEQ ID NO: 29114 - DNA, 3000 bp, Unknown; identical to SEQ ID NO: 6596
  misc_feature (1)..( 3000): 2750-1469P.txt file - cDNA_ID_2999815; gDNA_ID_2926166; Annot_ID_139922

SEQ ID NO: 29115 - DNA, 3000 bp, Unknown; identical to SEQ ID NO: 6596
  misc_feature (1)..( 3000): 2750-1469P.txt file - cDNA_ID_2999815; gDNA_ID_2926166; Annot_ID_199154

SEQ ID NO: 29116 - DNA, 3000 bp, Unknown; identical to SEQ ID NO: 6635
  misc_feature (1)..( 3000): 2750-1469P.txt file - cDNA_ID_2999826; gDNA_ID_2926167; Annot_ID_139944

SEQ ID NO: 29117 - DNA, 3000 bp, Unknown; identical to SEQ ID NO: 6635
  misc_feature (1)..( 3000): 2750-1469P.txt file - cDNA_ID_2999826; gDNA_ID_2926167; Annot_ID_199207

SEQ ID NO: 29118 - DNA, 3000 bp, Unknown
  misc_feature (1)..( 3000): 2750-1469P.txt file - cDNA_ID_2999830; gDNA_ID_1621100; Annot_ID_55842
gaaattcgttacagctgcaaggttatattctaccattcttaagctacaaaatatatggagctggaacacacctgagaccaatcgatcaaccctccctttgttttcggaatcgcatcaatggaagtatcggtgttctcatgggagctaggaatctaaaaattgaaagtatagtttaagtgtaatgttattctttcttccatgtggagttgagaacttttaatgggttattacagaatgttgagatgtagagagctaaggtccttacaagtgtagtgacacagaactgttctcctgctccttcacaatccgaagctgtgataattgggcttgccacccagacaaatccactttcttgaaagaacttgtgtgtagcatatgccagagtattcctaactcttgccacctaaacaagatattttgcatatttaagaaatatagaacttggtgattatcacaaggcagtaagttcaccgtcaagtttcactaaagtgaagcctgaaaggtgagcagtagaagcagtgttcacataaaatagacaaacaacagtttctaacaagagacacgtttctgcgtgagataatacataatatcaccaagaagctaacaagagtcgtatacagtatggaatttcaggaaggtataaaaggaaagttaccgccccaaaagtgttggttctaggacgtaaatgagccttggttctcaagaattcccggctgacccttttcttctggatcggataggaagagtcacactctccaacctatgataaaacgagactaataagtgacaaaaattcaaagaaacatactttcaaacttaaggaactaaagttcagcatccaaagtagaagaagaaaagacataccacaatgattttctccaccttaagttccactttttgcttcgttccctggctagctacaatagtaccttgtacagatactgatgctccagtcaagatcgaaccagattctacctattatccacccaaatggaatgtggcaaacaaaacatgtctaaggattatcataaggtttacaagaattcaaagctcctaagttctaattattgttctcaagtcacagaaattacctgatcatacccttctgcatccgaagtcatcacacattgcaaattcgataagcatgaaccatcatttatcttccaacaacaacaacaaaataaaaaccaaaactttgtcagcaaatcaatcaagagattgataaaaagatgaagaaaggttgagaatttacctcaatgaatgtgacactgctctgagatcgaagtgtacgaacccaacccataatgttaaggctctgcccgacccgactcagtccttcgtccgctcctcctttcacttcagctatcctcaactttttcctgaattctccaactttactcccaaatcgtttctcgtaactctcaactttatttccatcaccggagccgagagattccgaaacagctgtgcaaaagcatctccggcgagaattggccggaaaagcatcgaagggagggagaacacggcggcgtagaggacggaagagagaataagaagggttagaaatggtgaagaatgataagaagcggagagtagagttttgagttagacggagagatgtcgccggcagaaacgtggccgccattgtaatcgaatcgttcactgttttaggattgcgcgagtcttcttcttcatattggaacatccacccgacccaagttggttaacccgaccaagattggtattaacccgccctgtaaacttttagctaaataagcccatttagagtctagaggcccatcacctacaaatgttttcaactatgaatcggcctattgaaaagaaaaatcttttgccattagaaagatagaaattcagggtagcagcaacattattgttacatttaaaagttaagtcaccaccaagcagtgtgtcttttagtaattgtcttgtgtcaaactggagcataagtgtatggatacaaaaattagtattattgcaatatgattgttgggtcacatgatctggaaaagtaaaagcagctcattatagggtactatgtattgttaagaggctttgggttttagcactcatatgcgttgacgaatgtcaacaatctttagttgacacgtggaaagtaatagagacccacatccacatggaagcagttgagatattgacccaaaaaggtacacaactaaaactctaaaaacacaaccccaaccacttggcatcggatctctcacagaccggtgcggttgctcacctgcattcacttctcattgtcctttcgttttgttattgtacacatctatctaatctatctattgttccacatgttaatgtaagtaaaagacaacacaataaaaccaaacaaattaagctctaaatatcaattatttacttacttttaggttgaagatgctacccaatagtagttgtgatatactactcataatgagagagaatttggtatatacaaaggcaggcgagacaggtgtgaccggttgttgttgatcttaattaggttaccattataattaacccgattaattatatatcctctgtaaacaagtttggttctcattttttttacctgaataactgtgattaagtcaacgagcattattgttgcatttccttgtgtaataatgagccacattattgttgcatcacacacttatgctaataaagaaaacaggttctacacactagaacaaaaaaaataacagcaaaaagatattagcaaggtaagcataatttgatcatataacaaaagagaaacgttatgatctctattagacagcttaaccaacaaagctaaccccactttcctcttcatatttaatctctctttctctcctttcttcaacaaatatctcctgctcttacatctgagtctttttctttctaaccttctgattcatgagtaatcatatgtccattatgaagttcttgaatcaaatcctctgtctctctcttatcctctccatatccatg

SEQ ID NO: 29119 - DNA, 3000 bp, Unknown; identical to SEQ ID NO: 29118
  misc_feature (1)..( 3000): 2750-1469P.txt file - cDNA_ID_2999830; gDNA_ID_2926168; Annot_ID_139981

SEQ ID NO: 29120 - DNA, 3003 bp, Unknown
  misc_feature (1)..( 3003): 2750-1469P.txt file - cDNA_ID_2999833; gDNA_ID_1621100; Annot_ID_55866
ttcgaaattccggtgatcggaggagtaatttgcggaaatagaagggaaaattggaaaaataggagagtggagcaatacctgattcataacatctgggttagattcaagtggaagccatctcttagatgaagaactctcgcttgcggtcgccatcttaggatctttctcgtcactatcgatcgaattttgcagaagaaatcaaaatccttctataagaaaacaacacttcggctccaagatacgaatccctcaacatccgataattatgcaatggttcctatctattaacgggcctggctcactttaatccttctattaacgggcctgaccctctttaatccttctattaacgggcctgacccactttaatctgtctatccccttcgtatgcaattgttattttcagttgccaacgaatccaagttgtccgattttggtagaaagtaagtcaactagtcaagcattttaaactcatttgatctcaattggttagcacttgtacaatagtcaggtggtgaaattatgccttattgcgtgttatccatgattatcactatcgacaatatgattcgattgtatggtccattgatctataaatgtggattctctaaaccatgattaccaaccgcatattataattcggaaacaagaaaagaagattcagaatgtacaaaaagagaatccgagtaagtcattgactcagaaacaagacttaggagcattgcttctcttaataacagcctcaggcactcttagagatggctgtcacattgaagttgagagaactcggattcttctcgattatcttctttatcactttcgctgcgtcctacgaggataatatcaaagctattcaagtatataccggtttgcatttcctggattctttcaccgttttgataactttaagcttaaagagtgaagggtttatactactttgataattcttaagcttatagagtgaagtgtttatagtacatgcaataaggtagctggagaggaagtaccatgtgaaactggtcctgccctatctccatcaagttcatagagctcacttgcattatatggtaatagagtgtcacagtttagtgccaacttggaagtgagtttcattttggtgttgatatgaattttttttaccatctacacaagctaaacaaatgaaatgcgtgtccacctagtctgaagcctgaagatgggtaaacataaaaaaaccaatgtaacatctaagtgaacaagtcacaaatacattagcatcaacgggaggtgagaagttaccgttgtatcaccagctataatagctaaagaatgagcatatatcttctatttgactgtcgctctcaagaaaccttgctcgctatcaaaatttccatagacacacacattagacacgaagcaaacactctaagaaagatcaaatatataggagaaacaaaagatagagaaacacctctataggagtcatattggcagtggatttgaagaatctattcaggaacgacccctcagctgaaataagaaatcaaaagtgataatcgataaggattaatatctttagattaatgaaaggaacaaatagaaagcctgaatataactcacagagtttgatctcaaaggttatattctcaatagcatgaagaaggccaatggttccacaagcattatccacattttgtttcatgaagtaaactttatcactatgcacctaccaaattcatcaacacagagtatgaacgatacttaactacaaagacaagggttcttttttcatagaacaacccagatgtttatcagagagaagctcatcctttccttgatttcttggttatatacattatatatataaaaaatatgattaattttgcttagaaataatcttcctttaagaaaaaatgaaatatttacatgaaaatcaaccaaaatgaaagaatttttatacattatataaaaaataatatttttgtttcaatgtaggtggacaacttttatcctatgtagtttaaattaactgtgtatgggggtcaaaactataaaatactaggtcattataattattcctaagaaaaaaatatagttgtttttattttattttatagaggtcaattgacccccataatactgcactgcgtatatatgtttttgcattccgaattttgttttacctccgtatcatagagactgaaatatatatcgggtcttgtttacacaaaaaatcttaaaaataaatgaggttaattattatacaatatttaaaatgaagagacgtatccagtagcatatctagaaattgttgttgtaggggtcaaaagttttctttaatatataaaataatatacattatagatattaaaaatattcttaattttgcttagaaataatcttcccataaaaaaatgaaatatttacatgaaagtcaaccaaaatgaaataatttttatacattatataagattaatatttttgtttcaatgtatgtggataatttttatcctatgtagtttaaattaactatgtatggagtcaaaacaatataaaatacttagtcatcatgattattcttaagaaaatatagttgatttttttaattttatagagatcaattgatccccataatactatactgtatatcttttttcgtaggatttagaatggaaaaccttttggaataattcaccaatttacaattcattttatgattttgccatcacaaacgacatcagagtaaatatgactaacgggcccggcccaataattcaagattagttttttttaaggatttctagggtttttactttttagtatattatcttcttctctctctaaccctcagttctgttaagtacttggcttctaacaaacgctgtctgaatcatatttcgattctgatttttcttcatggattcgtatagccaataagttttttcaatattcaaaacaaaaaccccatcaaaataatctccggaccagtttctctttcgattcagtcggaccggaaaaacaatg

SEQ ID NO: 29121 - DNA, 3003 bp, Unknown; identical to SEQ ID NO: 29120
  misc_feature (1)..( 3003): 2750-1469P.txt file - cDNA_ID_2999833; gDNA_ID_1621100; Annot_ID_171370

SEQ ID NO: 29122 - DNA, 3003 bp, Unknown; identical to SEQ ID NO: 29120
  misc_feature (1)..( 3003): 2750-1469P.txt file - cDNA_ID_2999833; gDNA_ID_2926168; Annot_ID_140004

SEQ ID NO: 29123 - DNA, 3003 bp, Unknown; identical to SEQ ID NO: 29120
  misc_feature (1)..( 3003): 2750-1469P.txt file - cDNA_ID_2999833; gDNA_ID_2926168; Annot_ID_199289

SEQ ID NO: 29124 - DNA, 3000 bp, Unknown
  misc_feature (1)..( 3000): 2750-1469P.txt file - cDNA_ID_2999836; gDNA_ID_2926168; Annot_ID_140005
taccattcctatggaggtgtctctcagacagtcaacatcctcctcatgatggttgctggtttgtttgtcaatggtccttatgcactcatcacaaccgcagtctctgcggatctgggaacgcacaagtctttacaaggcgattcaagggcgcttgcgactgttactgctatcattgacgggactggatctgccggtgcggctttaggtccgcttttgacagggtttctttctactctgggttggcaagctgtgttctatatgttggtcgttggagctctctgtgctggtttgcttttgacccgtctggttattgctgaaattagagagaaacttggatatgttgatgaagaaggtaaataaccaaatctcttgagtttccttctactaatcacagtaatctcaattgcagaaacaatgatctgactttatctttgtttgctttgcagttcctgcttctgaaccactgttaaccgatagaagatgatggagaagggagcagcgagagaggcagtgtgaacagaaaccattgtttgcgcaagagttttgttctgttatataattatgagtttgcagaggaacttacagttctttgtattctgtgttttgtctgatattgtgaaaaatttctttatctcataacaaatgaaggaattggcttacagctttcttcctctatttcttctctgttttctacgacactcaaagcaatctttgcatggtggtgtttcgtaattgtaagaggaaactaatttcagtttttcgggtgaaactttgagatcttctatgattatccttcgaagcttttcgttctcttccattacttcatcaatgagtttctgatgtttcagcacctacacaatcaatttcgtgtatacataaccatggactactaaatctgataaactgtaacagaaaaaagaaagaaactggaagtcaagaaggagacgataccatttgaagcattaagctctccgattctagttgtgtgacctatcaatgtcatgaaacaaaaggaagttcaaggatggctttctgagatcaaagcagagagggggaaacattctgtgatagaattattacctgtcgttcttccgcagttgtgtcctggtgtttcagaatagggttgtcgagaaaactgttgatcactttctcagttcgagtaccaaacgttcttgaattagtagaggaaccactgttcttcaaagatgcttttgtgtccacatgtttcttgtgaccggttacagattgagacacctggtcttcagtctcagtttgacttgaggtggtctcactcgttcttccaagtttagtcatcaagttggatgcagttccctagaaaagattcatactcatggttttatgtgaatgaaattaataaggacactctttgaaagactggtgcttaccataatagaagcttgaagtttgtgtatggcacttggtttcactgcaatgcctgtcaatgatggatatgagttaatgacaataagagagcgatagttcaaataagtaactcaagggatgcttatacaaccaacaaatccaagtaactcaactgttcagaaacaagccatgtatcaaaattgaagagcgtttagaacaaaatcgaaacaagaagttttacttagaacggaaacataccaactccgaaaccatgaccaaagccaactccacagccaacacctgcttgaatgttcctcgctccaagcttccgcaactatagatggcgcaagtacacaaccagattcagaataacataatgcaggaagatctaaaaaagagcaggaacaagtttgtctatactgtacagcgccattcacgtggtgtgtggcacccgaaaatacattggttgctcctctagctgaattcataatttcccccaccattggaatactacctgatatgtcaataacaacaacatcaataccagattagtgatctcacaatcatgatgctgtgaaagcaaaccaattagcaaagtaaatgacacacgattttcaactatgagtgatagcttaacactagtttcatttccaagaactctgattgaaacatagtcttcaacaaacaataaaacttcttaatttgaacagaccataaaatcatcagtggcagcaatacactgagaatcaaaaatcaaactttcaaaatcaggttaatttgagctgattgattacaatcaatctcaccagatttcttaattacacactccttcacacctcaaaaacggagcaaaaggaaaaagagagtatataccgagattcaaaggtgcaccactaccaataccaactccacaaccaacgccaaatccagtgaagacttgaagagccttaaaagcaaaaggattctctattttaattccccttttagaaaaccctaatccttccttcttcatcaccacaccattgctgctgatgcttccgccgccaatttcctccatctatctcactaagctgaagatacgataatgggagttacagagaaaaagctaagaatcctccattgatttggtttcccgcctgtttttctttgtcgtagttaccgaactgttgataaagcaagagatagagactcggaaaatgaaagagaagaagaagatgattcagcgttctctgttccctggtcgatgagaaaatgtttaatgggccttagtgataagttttttcattaggcccattatgtaaatacaattcttttttctttttctttttgttgtatcgtattgaaactttctcgtccacgcatcttctgggttggcgaagacacgtcagcaatgcaaccaaaaaaaagaagcatttaaaaacaatagttgtagtgtggccctttctcatttcttaaccacgtcgtcgacacaacaaaccgatcgtgttacgtctctctctctctcagtctctcatcaccgacgaagatcacggctcttttctctgtttaatcggcggaatctctcttcttattttatttttcttccggtagatcgatccagctccgagatcaatcatg

SEQ ID NO: 29125 - DNA, 3000 bp, Unknown; identical to SEQ ID NO: 29124
  misc_feature (1)..( 3000): 2750-1469P.txt file - cDNA_ID_2999836; gDNA_ID_2926168; Annot_ID_199290

SEQ ID NO: 29126 - DNA, 3003 bp, Unknown
  misc_feature (1)..( 3003): 2750-1469P.txt file - cDNA_ID_2999841; gDNA_ID_1971815; Annot_ID_58214
tttttttgaagaacaaggataacagtaaatagttcagaattactttttaccatagaattggttcatctctttcaaatctagtttttgttctgcaaataaatttgatttgaacgcaaggaaagactcacaactcacaaggcttccttttgtagggttaatcactcacaaatctggtttagcattacaaaataaattgtccgttcttattattaaactccggaaataaaagaaataaattcactaatatttctaattagcatcttcacaaaattcactacctacaacatctataaccaatacaacaacaagaaaaaaaaaatctaattgccaaaaaaaagtgtataattatttcttcttcaatttttagattgcgtttgaccagagacttcaccaaaccggcgatgatcatatcctctgtttctaataagttcagcgaacgtaacacaactctctgtctggctatgtcctctcgtgaccttaatctttacatgttctggtaatctcaatgtatacttatcttcttcctccggtttatttctcactatcgagtgtcccgtagaatgcgatctagagaatttctccggcaagttttgttcctttttgatgctactggtctgtcctgaagatggccaagtatcaatctgtgttgttgtctgctgacgatgatgatcgtcttcttcgtcgtcgcttgtttcttgaatcacatctatgatcatctcatcgacagtaggcttggtgttttccggtggcggaggaggatcaagatcccgacgacaaacagggcaagttctgtgagattcgaaccagagatcgatgcattcttggtggaacacgtggtagcatgttgtcaagagacgtagcacgtgatctccgtcgaattcgagaagacaaatggcgcattcgaggccgtatttctcttcccggagatctttaacggaggagtaaggaaaagtgggaaatgagttaatgattcgaagttcaaggccgggatttaccggtggagcttccggttgctggaggggattgtcggatacggtgtctccgccgtggtggagacgccaagcttgcaccattgtgtcgaggaaacacttgcaaaaatagagagtgaagaaaccgatgaagaagaaaacgaggaggattacggtgaggatcaccgtgagaggcggtgtaacgtaatgttgttgcggaggttgcggtgccagaggtgaaggaattattgtcgacattacggtggccggagactgaatatctccgccgtgagacttctcatataccaaaaaaaaacaagaaagcgagagacaagagaaattcacttatttcaaaggttattttaattattagagttcagttttatttggtatagtgtgtggaaaatgtgtgtttggtgtgagagaaagagtgttaggaagttttggttactaaaaataaaaagtgtgttttgggtttggttatgtttgtttggtttgtttgcttaatgctatagcattgaacgagtcgtctgtgacatttgtttaacgttaagccacttcgtccttaaaaatagttaagttttttttctttttctttggttttaatagtatataagtctcgtttctaacaagcaataattaggatttaggttcatgacacatttcggctaatggcttttctttccttatatatacacaattcatcaaggtataaggatgttttgaatatacttgtttggtatgatcggtatacttcataaatcaactgatcatcaaaaactctcgatgaacgaccatattcttcgaaatcaatggtcattgagctatctttgtatttggtatacttttgaatcaacgaacatcggatcaactagttttgcacaagctcattccacaaaggtgtccacacggacctcaattgatgttttgcacgaagagacatgcatatatcggggatgtgaatttgcaaaacaaggacatcagtcctttagagctttggttgcttaatcatttccattttttctatttgaaaattttaatattatgaagaggagacaaaaatatagacccgtcggtaatcacttatctttgttttgacaataatattataagtcaagtactagtttccatcttccacagttagtaaacaaaactgttactgtattttataagatcatctttaccattaatagtgtgaaacaaattaaaagacaaagtcacaactagataacaaccatattatatgcatttgggaaaaccttatcttatcttatcaaaaacagcaaaatatccccaattgaatcagtatagtgaatccagatcttcccaatttcatagttaaagacaagaaaatgaaatgtcattttgtgtgattgtgatattaatcattcacatattaacatcattctcatcccatcgttaatccattacattttattgtatagatttgacacacaaaacaaaacaaaatgcatgcaaagacaattagtaaaacaacttctttttttgatctaacatcatgaataacatttggcatgacaacagaaattttatagtttcgataataatacagtaatactcatagttttatgattctgactgaatcgccaattgtttttcattaaagagaaaaatactatggtaaggaactaaggatccatgtggtaatcgaagagtcgtcgatcacgtgcaatcctccacacgtgttaagtcagctcgtagttgattcttcccccttgacggtcatctcatcggacggttgagatcagccaactttaagtgtatcacacggaaaagggaaatgtagcgcgagaaagtcaaaagatccaacggtcgatatgaaacaaaagtcagataatcgtacggtagaaacgaagctatatatagcaacaattggattattcttatcatcatcactctctgagatcgaagagaaagcaaaatcaaagttgtgatgaaatctctattgatgagaaccggttcgatgccggttcttcaaaaccggttaatttcaggtggttcatcgcggaagatg

SEQ ID NO: 29127 - DNA, 3003 bp, Unknown; identical to SEQ ID NO: 29126
  misc_feature (1)..( 3003): 2750-1469P.txt file - cDNA_ID_2999841; gDNA_ID_2926169; Annot_ID_140041

SEQ ID NO: 29128 - DNA, 3003 bp, Unknown
  misc_feature (1)..( 3003): 2750-1469P.txt file - cDNA_ID_2999845; gDNA_ID_1971815; Annot_ID_58216
taaccaaagaaacaaattgaagattaaagatttgctacatcaacacattacctctcctgttttaacctcaatgacatgaggcgtgaacccaactcctcctgttcctcctgctcacacacacacacagaggacaaaacccattaagtaaaattgtaaaacagtgaatttgatttgataagagaaagagagagagagatagagatagatcctgtacctaaagcatcgagctgcttcttaccggagccaggaggacgtcctctgttccgtttagcaggtggatcggaagagttagcattagctccggcgctatcaccaccaccacctccttcatttccaccaccgtaagaattagaagcagaaggaagaggcgaagtaggagccaaaccaagagcaatgttactaccaccaccaccaccaccaccaccatcagcagcatacttcctaggtctacctcgtttcttcttaacctgttgatggtcgatcccaaatctcatcgaatgttgttgagtggcggcaacagaagaaggcgatccatcaaatccaagagattcaagagtcttctgatctatctgttgctgaggctgaggatgatgatactgatgttgttgaggctgatgcggtgacatagaaccaccaaaaggtaatctttgatgcatagcttgagatgtggaggtgttgtgacccattaaaacagcggcggcggcgttagggtttcgattgtaggaattgtggtgactcattaacatccctggcggtggttgttgctgttgttgtagatgttgctgttgttgctgctgctgctgttgttgttgttgttgttgctgttgttggtggtggatctctctggaatccattggaggtggagaaaagtatgaatctttgtgaatttagggtaattttcttggagacccacttttctgttttacgaatgccgagaaaatagacgagaaagtgcaggtttttgagttttaagcgaaagcgtgtgagctagctaacaactctctctctctctctctctctctctctctctctctctctctctctctctctctctctctctctctctctctctctttcttgagttctttcatcagacgagggacgatctagttagtgtctaatttttttattttttttttgtgtttttgaagatttttaattatataaataaaagaagaaattgaggaaacaaatctttggtttatggttttcagttttcaggagattaagttttgtttttgttttctttaatattgatgaatttaacttttaaaatataatataattagggttttgttaaaatgtgaatgaaataaagagtttgtgtctttaataatgatgatgttcagtccagttatagtttctagttgtaatctaatgtaaatggtttggtgttctctcctttaacactagttctgttttaataaatggttttcaatttttttggggtttttcacataatttccattgttgcattgaatgaaccaagtttggttattggaagagaaatcaaaccggaatgagacattgaagtttaataaaatattaggaggttattttagttcagtgtctttttagaaaatctctaaaatgcaaacaaatgcacaagaattaataagagaataatatatcaaataaattattatgtaaactaaagattttggtttgactgtgtttgggaaatgcaaaaataataaagatggggtttgtactttgatgtgtcagattttttttcttaagtatatccttcagatcttaaaaacaatcactagtttgaaaatgacagcagcttattttgactattttgtccttctattgcctatctttttaagaaaaatctatcattcagaattcagaatactgttgtatatactctctatagattccaaattaattgacaaactcaagttactaatttttaatgctactatatcacatagataaagacccactggagttggaatagaatgtagcaaccaaatatttaatatatgcaactttagaatccaaaacaaaaatctgtgtaaaggaacaaaagtgtatattttaattggttatgtactcttctcccatacttgttcacgagaaaatggaatttaccgattagatttttttttgtatcccggtttaatccaaaggataaaatatgtgatgtgtatccggttttgttggagatgataatcaatgtaaaagactaaaagtactaaactttttatgtctaggtagcgactaaagtgattgactttagtagaccaacaagcaataaaaagcaaatgttatcaacagtttacgccatgcgcgtaccttaagaaactggacacgtaaaaccagatgctgtgaaaaattagtacctgaacatagaaatatttcgagacagataacgaatgtttttcttttaaagtactttagagtttatcatatgattcaagtcacctgaaagatccataatctctattatcacttggtgctgcaaggctgcaacacataagagtgttgcattgaaaaatgaaaacacttacggaaactaatgaacttggaagcaattgaccaaaagtataattattggtcaggtgggcttttattaatgggcttaactctcactaatgtagcccactagtgaaatgtaattgtggtaaataagaatttaccgctcgttaatggagaagaagaagggttagatttggaaagtagagaaatgagcaaaagcaagaagaagaagattctctctttgatccactttcctccattgtcgtcgcagagagagtggagatattcggattcagtttatgaagtagaacttgggtctaaaggattcagtttcataaaccctaataagtatctgttgtctgattaacttataggaaagatcatttttttttttgtttctcttagtgacggattggtctagaaactagtatgcaaattgtagcttctgggagagaaagtttgtatttttagtaacggatttattttgggagagtttgatttgtaaggattaggatg

SEQ ID NO: 29129 - DNA, 3003 bp, Unknown; identical to SEQ ID NO: 29128
  misc_feature (1)..( 3003): 2750-1469P.txt file - cDNA_ID_2999845; gDNA_ID_1971815; Annot_ID_175944

SEQ ID NO: 29130 - DNA, 3003 bp, Unknown; identical to SEQ ID NO: 29128
  misc_feature (1)..( 3003): 2750-1469P.txt file - cDNA_ID_2999845; gDNA_ID_2926169; Annot_ID_140043

SEQ ID NO: 29131 - DNA, 3003 bp, Unknown; identical to SEQ ID NO: 29128
  misc_feature (1)..( 3003): 2750-1469P.txt file - cDNA_ID_2999845; gDNA_ID_2926169; Annot_ID_199375

SEQ ID NO: 29132 - DNA, 3003 bp, Unknown
  misc_feature (1)..( 3003): 2750-1469P.txt file - cDNA_ID_2999855; gDNA_ID_2926170; Annot_ID_140059
caattcttccaaaaacgacataagagactaatctggaatcaaactcaacctaatctggaatcgaatgaatattgttcatgagagaactcaggcaagctaaaatcatcattttcatgtaatatcttcatagatagagactaatgtcagatgtttaattcaaccaccatattgcatcctaaagctacaaactttaagatacagctaccaataaaaacttaaaggaacaaaacccagagattgatctactaaaatcctaaaactctgtgaaatcaaatgagaaaaagggtttaccttgacggtgattctacggtcactctggggtctgatgaacttagcagacctcttcttcacaaccttcttggtaagcaatgggaccgccatatttgcttcttcgtaagatcgatatctcaaaagcgactccgtaaaacagctgaacaaacctaaaatgtcttttataagcgtacactagggtttctgatattacattactaaatgggctcacgttgtggcccaataagatttctttcacggccttttcgttttttccttcaactaaagaaattgtatgctcttaagaaaacaatctaatttattaaactaaaaggaaaatacacttttttcttcaattaagaaaatttttcgttttttttttttcactggaagattaattttcattgatgagatattaggtgaaatacaaaaagccgacgatcaatacatgatcccggaaactaagtcgaaggatgacaaagatatcctcggaaactaagccaagaaatatggagagcaaataacaacactacaagagaaacaagtcaaaacaatgacgactaaggaagcacacaacaaaggaaatcaaaactcttaactcagaatctagcaccaaacatcttgcatattatcaatccagaaacgagaaacgcttgaattgtttctttcttcctttttctttttttgtttcttaatttctttttacaaaatatcattcatggtggtcttcttctgctcgacgattgtggatgtcgtcacgacaagtaggacatgatcgcttgcagcgtagccaggggagaatacaatctttatgaaaactgtgagaacaaagcaacttcatgatcctcctctcactacctgatgatgctaactcttctagacatattatgcactcttcttctattggtattagacaaccttgagagtcataatcattgactcttaaccaatcactatacaacgtttctagaacaacttcaacttcaaccaagaaaccatctttttcttcttcttcaaggtggcgtcttatatcaatcaggtcttcgcagattttaggaacaatactttgctgaatccacttgttgatctttgacttggacaacacgttagccacaaatatactgcatatttcttctccggtgaggaaaacaggtgggatctcggatgcgattcttactgttgcattcttctttcctagcgatttttgttgagccaaagtttcacgaccgctaggactccggataagaatccgctcaattccttggatacttattgagaaggatcctgaatttttgtgatcgacgatgtgagtcttagattcatagtttagaatccatgttgatgtgccctccataattaaaagccttgttgattaaattatgtctgttttggctctaaaacaatcgatctcttctttatttatagaggttcattggagtctccaaattcacttaggtttcaaatttacatttatttagaaaaatagaaaaaatgatgccctaaataaatggaacatgtttaatcaatgattatctaaacacaaaattaaaaaattcgggccaaactgattttttttgttttgtcaaatgttttagttgactaagtattatcaactaaaaacaattaaacagatatatttttcggattccaaaagaagtttaaatatagttgaatttaatgggaaaaaatagaaaaaggagtaaaaaatgtcgagccacttggtcctttgttactcaatcattcgccgttgttccgatcattactcttctcttctccatccaattaaagattctctcttttaataatgctttcaaaagaatatctaatttcaggaataatcaaaaacttatttaatttctctcttctttatcaatgtgtatatataatacacacatatataagaaagtgtttcttctgtattcgtgggagaaacaaacaaaaaacaatttcttctaggtaagttttttttttttgttcttcctgctaaagtttcgatttttaaactaattgatacttgtgtgttcctttggctctagcggcaatgagtttgtgttagtgatcctgctaaatacaacaaaagggtgaagtagaataaagttggtttcttttttaatcaaaaacagttggatgatcacagtttagcttcttcgatattgaaaatagggttcttgttctgtttcctttagttccctctttcctctgctgtgatcgtttctgtcttgatgatgatgatttaccccaataaggttttgattagggtttataaactcagtggaatcaaagttcagggtttatagagattgaatcattaaggatttgtttgattattattgctaatggaatttgcaatcctctgttttttaaaattgtatccatcttggtttagaaaatcatatttctctgtttcaattggagtcatctttcaatcacttgcctccatcagggtttaaaagagtccccttttcgtcgttgtagcgaagaagcagaattaatcaaagttcagagctttcactatgaatatcccaagtggaaccttctcaagatctgatcatttccatgcttcaagtgatgcttctctcttttcaagctctcttcctcttattcaacaccaaaacagtatgtacattgagttgcctaattcgtctttatatcgtcatatgttggatgatgttataatctttaactcttgcagtcaaccctcgtgacagctaccatcagtctgttgatgaaatg

SEQ ID NO: 29133 - DNA, 3000 bp, Unknown
  misc_feature (1)..( 3000): 2750-1469P.txt file - cDNA_ID_2999859; gDNA_ID_2926170; Annot_ID_140061
gctcttcttcattgtaaatagttagttgctgaaaaccagtagcaacagaagtagaaacatcttcatctgaaaataatggaaaaagcaaacattagaaaacatgacaaagaggaagaaagagataaaaagaagactcacacagagaatatggatatctcaccttgattttcctcataagaatgtctttcagctttgttattttcatcgtcacatactaaggaatctctagattcatcgtcaaccaaatttctgcttgatactgaagctagcggattgtgatccacatcaggaggagacccagttggataagtttttgtttcgcggtggatgtcatccaaaagagtctcatccaaatgttgagactcactaaattggtcggaagaaatcttagattcagcagatggtttcaagacagaggatgatagataagaaacgtcttgcttctcaattgaagggcattcatccttcaaaggggctttactgctgctctcttgagcctctgatgaacgaggcaaagcgacattcttctgcaggttaggtctacccattttcacaatttcagccatagttctttgcccagggttagcgctagcccaagctgattgatacgcaggaaaaggcaacgaagacaaagtaactgcatcactgggggtcgttggtgctttcttgactttagagcttggaagatcactgcaatgcaaaggagatactaagataacacaaaatattggacattgttacgaaaattagataccaaaagaccacatgaaggtaagaacctgtttgatggtggttggcgtctaagcaaaccaggtaggcgtccaagcaaaccagatgatgcagaagatccagccaaatgattacgtgctccgttttctcttctattcacaggtacaccttgaatttttcctgtctctgaagcaaaatccagaaacaagtttagacatttttcaagataaccaaaaccacaacgaacataagaaaaaagagaaaactatctcttgcacaatttgcatcttactaccattagatttatacttgtttctgccacctcgagaggtattgtaactgtcattaccgcttctagctccacgattcgggacattacgcgtccaggagtctgcatggtctttagtctgaacaaacagacaaataaatgaaaatcagataaaaagattttaatcatctaaagctatatggcattagtaactaaactagtagctgttttatgttatattcgacaaacctctttctttttctctcgtttactcttcgcctcatgaaaagtatctgaaaagttttaacgaaacaacattataagaaactgtaacataaaaaaagagaaaaaaactgatttatatatttatttccagaaacagataacaaaaaagattcaacaaaatccaaaataacattactatttcaagaaacttaaggaaatcaaataaagttctgacacattctcttatacaagaagttctaacagattcaacatgattgcaaaaatttcttcacaaggttaaattaaaactccttgaagttttgattttttttttgctattcaagttccattaaacaaattcgaagctaaaacccagaaactaaaaaagagataaaaagctattgaagctggaagaacgaaccttgagagagaagacgattaacagcttcatcaggattcatatcgcactcaacaagcatcgcataaatctctaactcagaacactccacaatctccttcaaatcctgaataaccttcctcgaagacgccggaacacctccattcgcgttactaacgctgccgccaccaccacccattattcctctctctctccggattaccggaaaacaacacaaatcagatttgaattcaaaaacttcttagattcacgattctttgacgagcaattctaaaacccaaaataaagattcttgatgtttgtatctctttcgttctattgacttcgagtatatcggaagaaaaagaagaaaaaaacctcttttttatttattttatttcttttgaatttgggactaaataatgagttcgggaaaaaggaaagaaattcaaatttttggaaagttatgtaaagaaaatggtatatgtgttaattatcattatttggtagcttaattactttttttattaactttatatatttttagcagattttcaattaagacatgaataggttttggataataataagcttaattttacatattttgtttaaaacagttgttgtctgagattctattaaaaaaaaggcttaaaaaataattggagattttttttgaaattttagattcgagaaaagtaaaggtcacgcgctactaaaacaacgcgcggagagaaagaatctgggagtttttaaatgattgattaatggataaggacgttggtccgagcctacgtgtaatatgggcctaagcccattatacctaacttcaaattttaaaagaattaaaaggagaagcacgtgtcaagttacaagggtgagtagctgagctggataaaactctatacgtgtcatcttattacaggttaagaacccgcccaccaaaagtttttgatcggaataaaaaaaacgtaataactaataagcttctctcattcgtggaattgtctttcagaaagaaaaaaaccagagaggaggaagaaaaaaaaaactcttgcttcttcaggtaggtcttcttcttcttcttccttagctcaatctaattcttgttgtttttctgcaattttgattgttaattatctgtgtttaacgtttcttagcaattttattttggttttatcggttgacttgtgtttgagtttgtgaaaatgatcaaaaattcctgttacagatccgtatgtttatcttactatattctgtaatttcatcaacaagctgactttgttttgcagtatctgctgctggtttgatcttgagaccatttcttttgcagcttgttgttgtatttctagagactatgccaatgccatttttgaaaatg

SEQ ID NO: 29134 - DNA, 3000 bp, Unknown; identical to SEQ ID NO: 6259
  misc_feature (1)..( 3000): 2750-1469P.txt file - cDNA_ID_2999876; gDNA_ID_1621085; Annot_ID_55369

SEQ ID NO: 29135 - DNA, 3000 bp, Unknown; identical to SEQ ID NO: 6259
  misc_feature (1)..( 3000): 2750-1469P.txt file - cDNA_ID_2999876; gDNA_ID_1621085; Annot_ID_170506

SEQ ID NO: 29136 - DNA, 3000 bp, Unknown; identical to SEQ ID NO: 6259
  misc_feature (1)..( 3000): 2750-1469P.txt file - cDNA_ID_2999876; gDNA_ID_2926172; Annot_ID_140183

SEQ ID NO: 29137 - DNA, 3000 bp, Unknown; identical to SEQ ID NO: 6259
  misc_feature (1)..( 3000): 2750-1469P.txt file - cDNA_ID_2999876; gDNA_ID_2926172; Annot_ID_199604

SEQ ID NO: 29138 - DNA, 3000 bp, Unknown; identical to SEQ ID NO: 3891
  misc_feature (1)..( 3000): 2750-1469P.txt file - cDNA_ID_2999895; gDNA_ID_2926150; Annot_ID_139253

SEQ ID NO: 29139 - DNA, 3003 bp, Unknown
  misc_feature (1)..( 3003): 2750-1469P.txt file - cDNA_ID_2999898; gDNA_ID_2926150; Annot_ID_197995
ccatgaatctgtctcccttctgcaaaaccttccttattgctacaaacttgcaaaagcttaaccattgtgctatcataagctttagcaccagaaaactgcatctctctgaaaagttccacagccttttcccaattcccactccgcaagtttaccattacgatctcgttccatgcaagatcatctcttttaggcatttcatcgaataacttgttagcaaaacccaaactcacacatcttccataaaaacccatcgacgcagaaaccactcgtgtgtctgaattatcaagccctctcttgatcaaaccaccatggatagttaaacccagaaaccgatacattagaacagcacaaattctcaaaaccatagcgagaactacttcatcaaaatttactcctttgttctgtagctgaacaaattcctctaagaccctatacttttctactccgaaattctcagccttttccaaaaaatccctccatgaaacttgattccgagggaaccccatgaagaacacagtactagcatatccaaattcttgaaattcaaggtaacgagtgatcaagctcttagcgatgaactccaattcgaatcgatcgaataacttcatcatccgagcatgagtagctttaacagaaaccagatttttgcatccatttagcttcttcaacggataaaaatcccaacttggagacgacggttccagagatattgagaatggtatagattcaaacgactcatgtttgatttccagagaagaacaagaaaatgaatggttacctagatatcttcgctgcgagtgatgaagaaacaaggagctgtaacaatggcggtaagttgaagagaagttctccattttattcacttcacagtttccggataagaggacactatccgttttattggtattttcactacgatctcagaaacgcagcgttttatatgtttgaagaagattcactagcagaagatagcaaattactcatctaaacactacaaaaagttgagaaagattcaacatcattctcaagtgttcttacaacaaaagcagcaacttacataagcttgagctattagtgttcatcttcaagaatgatacaagacaagtaaacattttttcatgaaactaatctgtgatagtttaccatttttcccttggagtaccatcagggaacacaggagtaagtactttctcttctttctttctaggactacttgattttctacttgaaggacttaatccaatcttcacgctatcttcttcttcgtcttcatcatcatcatcaaagttaggaggcacatcttcctctccttcgtcatctgtccaatcgccatcatcatcattgccaccatcttcaccttccaagtaaccatcaacatcagaccattcttcagcatcactttcttcttcttcctcctcaccatctgcatcgcttccatcgatctctacctctcttccttcttcgtctttcctgggtcctcctctccttgggaaccttggtacagaaacaagtgcacgcatcttctctttcacaagagttaaaggatctttatctatcaattcagagttcctgtaagcttctcttaagaacaccgagtctctttcacctttcaaagacacgtagaagagatcagggtgcctaataagcattcccctcagttgttgtgagaatctgaattcctcacggaaatgagtcaagtgatccaccagcgttcttttctcagtcgttaagctcaaaagctcatgaataaccccacaagcatgcttttctttctcgagtgttcccgacctcaagtgggagaaatccttgtaaggagatatatactgcatgtcacggaactgagatatcttcctcgtctcactctttgaaagattgagaccccttggaagcttaaccctgttgaacttaggtggtctatcaataatcaaattcctttcttctgactctctagtcctattatcatcctcagataactcagcagctgacactgcaagctcaggatcccagtgagtcaactctaaagccggacctctaggcgtaggaaccacacggaaatattgcgggtaacgctgacaaatcgtgtcgcggaactctaacggaagccctaaatcagtcttcaaatgggaaatcttctccaacaatatccgcttatcaatagacatcatcaccagtttcctcagcttaacaaccagtacatcttcaagctcattcctaatcctcatttcgtcaaggtacaacctttcagcctctgatgtcatcttaaatctcaaagaataagctccttcttcaactatctcaaacacaccaggatatttcctaagcagagctataaaccgacgacgtttcttcaaacccaaatctctcctgtacttacccaaacccctaagagacatcatcctatcaggttgactcacaagaatcttcctaatgttcaacactaacttaagtttcttatccctttgaacaacgctatcgaaagtaagctctttccttctcttcacagcagctctcacaggctcaacaacaacacgagttttcctagaagtactccaaaacccatacttgttccccaaaatcaaaccttcccccataaactgagacctcgcagctcgaattgtggacatgggcaaaccggatttgaccgaaagcttggttttttcattgaatggagagttacaagagacaaacaaaggtttatgtgcagaaagcagaagcttgggctccatttctgagactccaagcctgtaaattgataactcctaataagtattctccgacgaaaaattgattccaggaaataaaaaaatcttaccttatcccttcggttcaatctagtaagaggttctgcagaagaatctgtttctggtcgcgaagatttggattggggtttaacgataaaagtcataaaaccctcttcttttttccagaatgatgtgtccatctctctgatatcctcttattggtctttaacgtaatatttgaccagaagcaggggtaaatatg

SEQ ID NO: 29140 - DNA, 3003 bp, Unknown
  misc_feature (1)..( 3003): 2750-1469P.txt file - cDNA_ID_2999898; gDNA_ID_2926150; Annot_ID_139256
gctttagcaccagaaaactgcatctctctgaaaagttccacagccttttcccaattcccactccgcaagtttaccattacgatctcgttccatgcaagatcatctcttttaggcatttcatcgaataacttgttagcaaaacccaaactcacacatcttccataaaaacccatcgacgcagaaaccactcgtgtgtctgaattatcaagccctctcttgatcaaaccaccatggatagttaaacccagaaaccgatacattagaacagcacaaattctcaaaaccatagcgagaactacttcatcaaaatttactcctttgttctgtagctgaacaaattcctctaagaccctatacttttctactccgaaattctcagccttttccaaaaaatccctccatgaaacttgattccgagggaaccccatgaagaacacagtactagcatatccaaattcttgaaattcaaggtaacgagtgatcaagctcttagcgatgaactccaattcgaatcgatcgaataacttcatcatccgagcatgagtagctttaacagaaaccagatttttgcatccatttagcttcttcaacggataaaaatcccaacttggagacgacggttccagagatattgagaatggtatagattcaaacgactcatgtttgatttccagagaagaacaagaaaatgaatggttacctagatatcttcgctgcgagtgatgaagaaacaaggagctgtaacaatggcggtaagttgaagagaagttctccattttattcacttcacagtttccggataagaggacactatccgttttattggtattttcactacgatctcagaaacgcagcgttttatatgtttgaagaagattcactagcagaagatagcaaattactcatctaaacactacaaaaagttgagaaagattcaacatcattctcaagtgttcttacaacaaaagcagcaacttacataagcttgagctattagtgttcatcttcaagaatgatacaagacaagtaaacattttttcatgaaactaatctgtgatagtttaccatttttcccttggagtaccatcagggaacacaggagtaagtactttctcttctttctttctaggactacttgattttctacttgaaggacttaatccaatcttcacgctatcttcttcttcgtcttcatcatcatcatcaaagttaggaggcacatcttcctctccttcgtcatctgtccaatcgccatcatcatcattgccaccatcttcaccttccaagtaaccatcaacatcagaccattcttcagcatcactttcttcttcttcctcctcaccatctgcatcgcttccatcgatctctacctctcttccttcttcgtctttcctgggtcctcctctccttgggaaccttggtacagaaacaagtgcacgcatcttctctttcacaagagttaaaggatctttatctatcaattcagagttcctgtaagcttctcttaagaacaccgagtctctttcacctttcaaagacacgtagaagagatcagggtgcctaataagcattcccctcagttgttgtgagaatctgaattcctcacggaaatgagtcaagtgatccaccagcgttcttttctcagtcgttaagctcaaaagctcatgaataaccccacaagcatgcttttctttctcgagtgttcccgacctcaagtgggagaaatccttgtaaggagatatatactgcatgtcacggaactgagatatcttcctcgtctcactctttgaaagattgagaccccttggaagcttaaccctgttgaacttaggtggtctatcaataatcaaattcctttcttctgactctctagtcctattatcatcctcagataactcagcagctgacactgcaagctcaggatcccagtgagtcaactctaaagccggacctctaggcgtaggaaccacacggaaatattgcgggtaacgctgacaaatcgtgtcgcggaactctaacggaagccctaaatcagtcttcaaatgggaaatcttctccaacaatatccgcttatcaatagacatcatcaccagtttcctcagcttaacaaccagtacatcttcaagctcattcctaatcctcatttcgtcaaggtacaacctttcagcctctgatgtcatcttaaatctcaaagaataagctccttcttcaactatctcaaacacaccaggatatttcctaagcagagctataaaccgacgacgtttcttcaaacccaaatctctcctgtacttacccaaacccctaagagacatcatcctatcaggttgactcacaagaatcttcctaatgttcaacactaacttaagtttcttatccctttgaacaacgctatcgaaagtaagctctttccttctcttcacagcagctctcacaggctcaacaacaacacgagttttcctagaagtactccaaaacccatacttgttccccaaaatcaaaccttcccccataaactgagacctcgcagctcgaattgtggacatgggcaaaccggatttgaccgaaagcttggttttttcattgaatggagagttacaagagacaaacaaaggtttatgtgcagaaagcagaagcttgggctccatttctgagactccaagcctgtaaattgataactcctaataagtattctccgacgaaaaattgattccaggaaataaaaaaatcttaccttatcccttcggttcaatctagtaagaggttctgcagaagaatctgtttctggtcgcgaagatttggattggggtttaacgataaaagtcataaaaccctcttcttttttccagaatgatgtgtccatctctctgatatcctcttattggtctttaacgtaatatttgaccagaagcaggggtaaatatggaattaacatcattccaaaaatctcctagttctaacgatgttgtttcgttctctgtttcactggtgagaaactcgatg

SEQ ID NO: 29141 - DNA, 3003 bp, Unknown
  misc_feature (1)..( 3003): 2750-1469P.txt file - cDNA_ID_2999902; gDNA_ID_2926150; Annot_ID_139257
gtttcttatccctttgaacaacgctatcgaaagtaagctctttccttctcttcacagcagctctcacaggctcaacaacaacacgagttttcctagaagtactccaaaacccatacttgttccccaaaatcaaaccttcccccataaactgagacctcgcagctcgaattgtggacatgggcaaaccggatttgaccgaaagcttggttttttcattgaatggagagttacaagagacaaacaaaggtttatgtgcagaaagcagaagcttgggctccatttctgagactccaagcctgtaaattgataactcctaataagtattctccgacgaaaaattgattccaggaaataaaaaaatcttaccttatcccttcggttcaatctagtaagaggttctgcagaagaatctgtttctggtcgcgaagatttggattggggtttaacgataaaagtcataaaaccctcttcttttttccagaatgatgtgtccatctctctgatatcctcttattggtctttaacgtaatatttgaccagaagcaggggtaaatatggaattaacatcattccaaaaatctcctagttctaacgatgttgtttcgttctctgtttcactggtgagaaactcgatggcgaggaggcgacgttcatcggcggcggagagtttgaaacggcggaacgacggatacgagtcactgtgtcaagtcgtacaacaagattcagatcggagactcatcaccattttcgtaatcttcttcattgtgattcccgccgtttcgattgctgtgtacaaagtcaaattcgctgatcgagtcatccaaacggaatcatcaatacgtcaaaagggaatcgttaaaactgatattaatttccaagaaatcctcactgtgagttccatagttttgggtcaatgttgcaattcaaagaagaaaagctgaaaactttaggatgaattttcattaaatttggtttgaatttgtttcaggaacattccaaggcttcagagaattcaactaggcactatgattatccagtgttagcttacattactccatggttggtttctttggaacatttttagatttgagatattgaaaatatacaaattgttgtcactgagggcagtagggattggattcatatgctaaaaatgctgtgtaggaactctaaaggctatgatatggcaaagatattcaactcaaagtttacacatttatcgccggtatggtacgacctgaagaggtatattgtatacatttgttaatgagttctaagttcctgcaattatctcatggtttccacaaaatagtagtgacatttttggtttctgtttctggtagccaagggtctggattggttttggaagggagacataatgctgataagggatggattcaagagcttcggtcaagaggcaatgcactggtagtttaaccagcacacctatttttcttccttctctgaattggccagagatcggtacccggaaaatgctgatgtttaacttgtttttccttctttgattgtctggacttttttccccttttatgtagatattaccaagagttgttctagaagcaattcctggggagatgcttaacaaaaaaaaactaagagagaaagctatcagtcttattgtcacagagtgcaagtaagggtctcccaaagctctacaattcctgtatatttcatgctctgaaaaggatgaatttctttacattagagcttgtgaattttaacacttaccttgtcatcatgtttgccttgaactctagggaaatggaatacaatggtatcgtgttagagtcttggtcaaggtgggcagcttatggcgttttgcatgaccctgatttgcggaaaatggtatgccctgtaatctcttccaggccgctgcgattttttttccacataatgcatcatgtcagcaagcttttttataaatcttctaggcactgaaattcgtaaaacaacttggagacgctcttcactcaacgagctcaccaagaaacaaccagcaacatatgcagttcatgtatgtcgttggtccgcctcgttcagagaagctccaaatgtacgattttgggccagaagatcttcaattcttgaaagattcggttgatgggttctctcttatgacctatgatttctcaaatccccagaaccctggccccaatgctcctgtcaagtggatagatttaactctcaagctcctgcttgggtcatccaacaacatagactcaaacatagccaggaaggttcttcttggtatcaacttttacggcaacgattttgtaatctctggaggtatataaagcatccaagcttatataagcaacttgttctcttcccgcctttctttcaaaaccaactgacataaactgttttcttttgcgcaagattcaggaggtggaggagcaatcaccggaagggattacctcgcattactccagaaacacaagccaactttccgttgggataaagagagcggcgaacatcttttcatgtatagagatgataagaacatcaagcatgctgttttctatcctacattgatgtcaatccttctacggcttgagaatgctcgtctctggggaatcggcatttcaatctgggaaatcggacaaggtttagattatttctttgatctattgtaagttccatacattgcatcatgttatgttttcttaatgttatacttgatcctctttgttcacttaaatcaaatgctgaggaaccttttgtatctagtctagtctctgttctttgtgttctagataaaggacattttggtaaatatgcagaggcttctcttgaagcatcttcaatattctctggccacacatttgacatgcaatttcggactaagtaagtcactatgctttagtcctctacaccaaaacatgatcaagaggtatctcatccgaatattccacgtgtcaagcaagcggtggctaggattgattacacagtccacgtcagctctctagaaacggctcaatg

SEQ ID NO: 29142 - DNA, 3000 bp, Unknown
  misc_feature (1)..( 3000): 2750-1469P.txt file - cDNA_ID_2999909; gDNA_ID_2926150; Annot_ID_197999
agttgattattggaatggtgtcatcaaattgatgaagaaatggttgacttacttgttgttgttgcagccatttattgaagagtttagccatccaatgctggataactgcgctgcaggaaacacagacgtgtttgtgaatggaagagagcttcacaagagagatttcgagttacttgtgggtcgtggtctgcctagagacaagaaccgttcttacattgttgatatatcaggaagaatccttgatcaagattcaggagaagaacttcacagccttggcaaattagccccaacgtaagcagattcacacaaatgatttttattcttttgagattttgagatcacctaagattctaaagttttagtgtgttaaacttgaaacaggattgagaaagtgaagcatggatttggtatgagagttccaagatcattagcttcatgaaaactccccctagtaacaactacacaaccaaaatatgattctgcttcttgtttccatcttcatattatttatttgttaaacacaactgtaaagtgttttttacatcttgattttgatttttggtattctttttaaaatatctttggggaaatgtctgtatgttttttattgcgaccagaaccggtttaggggttatagactgtatacaaaccgggttctctcggtacaaggtttgtgctttgtattatttccatttttttatggaatgatattagtttgctcttaatgacttttttttttatctcttttattgctcttttgtaagttgtaacagaagcttcatcgataacatggtttactcctcctaattccttattatctctggtttaactaaatcgtttatttaaaccggttttggtttgtaggtttctttcatgtcagcaacaatatatgtaggtcattcgaccatactcaacaattcaattaaacaatgttctcctagctgatctttctttcttcatgattagcttctaggcttgatttgccctttcctcgagttctaggtgaattatggattgggattatctatctatcggttagttatccggtttcatctttctttccactaaaatgttcatattgtctgctaattcctctcttggctgatggactagtttttgcacgtttctgaagtgggtccttcctaaaatacaagacaacagattataacttactcatgggcccaatatcaatatcaatatcaaacaagaaagagaatctgttcttaacaggcctcgtggtccgttcgtttagttttcatgtttcaatatttcttagaaaaatacaaaattagagtaagaacaaaaagatactaactagtagcgagcatgagaaaaacgagtaagcagaagttgtccactaataataaaattgtgaggaatcaagaaattctcaatacaaaaaaattttagcaatgaagaaataaaataaaatattattagcaataattggagtcactagaatgtttcatatctctttatatactaacactagtgttagttcattcacgcaaatgttaaaaaccaattctaccattgttaaacttataccaaatatttaaactagttacctgcatcattctaataactaataagtctcatgaattcacaaacatagcaatgttttgaataacccaatatatcatcaaaaagtgtggtgcttccgtgtttgctaagttccaagattcaagagaaaggttgatattgttgtaacgaaaggctgtggagatacaagtataccacctaagttgagataaaaggtgtgaggaccaaaagcagggcatgtgcttcttcacataaattaaaagaaaaaaactcaagttattactaatatgtgattaataaacacaaggacaatgagaccatctgggctggtccaacatatttttggattcctcaagcaaagttgaaaaaaaaaaacttttctgaattttttaatcagaatttcactatcaaaagtcataattgtaaaaaacaaatcctgaaatattctttattccatttccaatatatattgctgtcacaaagaaatctacaaaaatatttgttataacttaaaagaatgcccaacaatttagcctataatcatatatgcttcttggacaaaaaaaaatcttggaacaacaatgctaattaaatttttctttttttttttcttacacagagctaattaactttttcttttttgttgactgtggttaacataattccagggtgatggtatattcaatgtcgcagtatattcaatgttgcatggtgtgtgaatagttgtactataatattccctcttttcatttttatttgatattttaggaaaaatacacatattaaaaaaaatatattaaaattgatattaaatatattatttttttgtgttttacaattttttattattttaaaccaatgattgaactattaaaatttacaatttattaataataactaataaatattgaatagaaaatttacaaaatcaatctttttaaaacaaatatttttccaaaaaaatcaaataaaaaggaacagaaaaaatataatatgacagttcgaaagtataattcaaatctgtaattgttacggttttgttattcttctttcttgtcgttgtttgtgacaaaattgtaatcaaatatattgtatatctcacaatggtgtgactttttaataccatatttttttgtaacgattgtatcactacaatttactacttgtcacaaattcatgacaatagtttttactgttacaaatatgtttctattgagacaaaatattttgtatcaataaaattactttttctgcagtaattaataaatagactgtctgaaattcacaaaattattattcctgcatttaataaaagtaaaaaagggtaacaaaacatcactttcatggtcacaaagatcctaaaagttaatctcaaacctaaccatctcattctcacgagtccaactataaaatcattgaatagcttccaccaaattcactgtgctctcttcttcaatg

SEQ ID NO: 29143 - DNA, 3003 bp, Unknown
  misc_feature (1)..( 3003): 2750-1469P.txt file - cDNA_ID_2999909; gDNA_ID_1621155; Annot_ID_57014
tcaagttgattattggaatggtgtcatcaaattgatgaagaaatggttgacttacttgttgttgttgcagccatttattgaagagtttagccatccaatgctggataactgcgctgcaggaaacacagacgtgtttgtgaatggaagagagcttcacaagagagatttcgagttacttgtgggtcgtggtctgcctagagacaagaaccgttcttacattgttgatatatcaggaagaatccttgatcaagattcaggagaagaacttcacagccttggcaaattagccccaacgtaagcagattcacacaaatgatttttattcttttgagattttgagatcacctaagattctaaagttttagtgtgttaaacttgaaacaggattgagaaagtgaagcatggatttggtatgagagttccaagatcattagcttcatgaaaactccccctagtaacaactacacaaccaaaatatgattctgcttcttgtttccatcttcatattatttatttgttaaacacaactgtaaagtgttttttacatcttgattttgatttttggtattctttttaaaatatctttggggaaatgtctgtatgttttttattgcgaccagaaccggtttaggggttatagactgtatacaaaccgggttctctcggtacaaggtttgtgctttgtattatttccatttttttatggaatgatattagtttgctcttaatgacttttttttttatctcttttattgctcttttgtaagttgtaacagaagcttcatcgataacatggtttactcctcctaattccttattatctctggtttaactaaatcgtttatttaaaccggttttggtttgtaggtttctttcatgtcagcaacaatatatgtaggtcattcgaccatactcaacaattcaattaaacaatgttctcctagctgatctttctttcttcatgattagcttctaggcttgatttgccctttcctcgagttctaggtgaattatggattgggattatctatctatcggttagttatccggtttcatctttctttccactaaaatgttcatattgtctgctaattcctctcttggctgatggactagtttttgcacgtttctgaagtgggtccttcctaaaatacaagacaacagattataacttactcatgggcccaatatcaatatcaatatcaaacaagaaagagaatctgttcttaacaggcctcgtggtccgttcgtttagttttcatgtttcaatatttcttagaaaaatacaaaattagagtaagaacaaaaagatactaactagtagcgagcatgagaaaaacgagtaagcagaagttgtccactaataataaaattgtgaggaatcaagaaattctcaatacaaaaaaattttagcaatgaagaaataaaataaaatattattagcaataattggagtcactagaatgtttcatatctctttatatactaacactagtgttagttcattcacgcaaatgttaaaaaccaattctaccattgttaaacttataccaaatatttaaactagttacctgcatcattctaataactaataagtctcatgaattcacaaacatagcaatgttttgaataacccaatatatcatcaaaaagtgtggtgcttccgtgtttgctaagttccaagattcaagagaaaggttgatattgttgtaacgaaaggctgtggagatacaagtataccacctaagttgagataaaaggtgtgaggaccaaaagcagggcatgtgcttcttcacataaattaaaagaaaaaaactcaagttattactaatatgtgattaataaacacaaggacaatgagaccatctgggctggtccaacatatttttggattcctcaagcaaagttgaaaaaaaaaaacttttctgaattttttaatcagaatttcactatcaaaagtcataattgtaaaaaacaaatcctgaaatattctttattccatttccaatatatattgctgtcacaaagaaatctacaaaaatatttgttataacttaaaagaatgcccaacaatttagcctataatcatatatgcttcttggacaaaaaaaaatcttggaacaacaatgctaattaaatttttctttttttttttcttacacagagctaattaactttttcttttttgttgactgtggttaacataattccagggtgatggtatattcaatgtcgcagtatattcaatgttgcatggtgtgtgaatagttgtactataatattccctcttttcatttttatttgatattttaggaaaaatacacatattaaaaaaaatatattaaaattgatattaaatatattatttttttgtgttttacaattttttattattttaaaccaatgattgaactattaaaatttacaatttattaataataactaataaatattgaatagaaaatttacaaaatcaatctttttaaaacaaatatttttccaaaaaaatcaaataaaaaggaacagaaaaaatataatatgacagttcgaaagtataattcaaatctgtaattgttacggttttgttattcttctttcttgtcgttgtttgtgacaaaattgtaatcaaatatattgtatatctcacaatggtgtgactttttaataccatatttttttgtaacgattgtatcactacaatttactacttgtcacaaattcatgacaatagtttttactgttacaaatatgtttctattgagacaaaatattttgtatcaataaaattactttttctgcagtaattaataaatagactgtctgaaattcacaaaattattattcctgcatttaataaaagtaaaaaagggtaacaaaacatcactttcatggtcacaaagatcctaaaagttaatctcaaacctaaccatctcattctcacgagtccaactataaaatcattgaatagcttccaccaaattcactgtgctctcttcttcaatg

SEQ ID NO: 29144 - DNA, 3003 bp, Unknown; identical to SEQ ID NO: 29143
  misc_feature (1)..( 3003): 2750-1469P.txt file - cDNA_ID_2999909; gDNA_ID_1621155; Annot_ID_173482

SEQ ID NO: 29145 - DNA, 3000 bp, Unknown; identical to SEQ ID NO: 29142
  misc_feature (1)..( 3000): 2750-1469P.txt file - cDNA_ID_2999909; gDNA_ID_2926150; Annot_ID_139260

SEQ ID NO: 29146 - DNA, 3000 bp, Unknown
  misc_feature (1)..( 3000): 2750-1469P.txt file - cDNA_ID_2999914; gDNA_ID_2926150; Annot_ID_198003
atgcatcggttagagactatagatatatatacctggtcggtccaaagaatgtgactcgtcgacattaaccttgaattgtttcatctgattcagctgaatagcgagtgagaaagggctgattccggagacaaataaagacgtgtttggcaagagaaccgtggacgctaacgtcgcaaagtttgcgccatgtcgaaaatccgatccaatagattgcaaatatgggcttaggaaaggcattccaagagatttggctaaaataatttaacactacgtttagcactatagtgataatttttgggtaataacagtaagtattatagattttgtttaaaatttcaatctaaaatcctaattattagacctggaaaaataaattgaaccgaacgtacagaaccaaatccgaagaaatgaaaaccgagtcggtaccgaaccaaaatattttgagtaaccgaaaatatccgaaatataattatcttttcaaaaatattagttattttttgactaaatagtaaaaatacttgaaaatatccaaaaaaaatcaaaaagaaccgaaatatccgaaaatattcaaagcaaaataaccgaatggatactaaatatttaaaccgaaagaaccggaaccaaacccaaatttcaaaataagcgaatagatattaaacattagacccaaacagatacgaactgaaactgaatggataactgaacgctcgaactactaagtatatcttaaatatttttaaaaaatattttaatactaaaggatacaaaaaattatactttgtagaggggatttgatactgctgtcatattatacgttttttgaaaattttgagagtatttgttagtcatttgttacctagaaaatcaatgataagacgaccgtctgaagcacgaccggctggtttcttgaaataagtcattccccatggaccagattgggcaggaaaagcagcccaaaatccgccagtgtccgaattcgagtctccgaagttgaaaattgcttcgaaatcacattttgaatcacctttatgcccataaagcatcacaataatcaagactagaagagagaacgatcttcttctgtttatatcggaagccatgtctatctctgtgtgaacaaaatgtgtgtttgtatgtgagagtgaggatgagatatttggtgctatatgattcttgtaatcatcccgtccgtgactctcactctcattgtacgtgtaattagtgtgttatagccttaatggtttttttagtccaacaattccctttaagcccaataaaagataaataaagcccaatctattatattgattccaagggttcaatatatatgagatatgtctaacaatacatcaaaagaccagtttgaataacaacacatcaatttatggattggatatgaataagatgtcatgtatgcaacaaccaaatttgacatttctcttgtaatgccttgcaataaaagttattttgttaactttttgcaaagtatgtgccaatcaagaacaggataaaaaggttgggtctaataattcaactacggcccaataataacccaataaaggagggtattaacgtaaatttatgtcttggaccgggagtctaactgcacgcgtcaagtggctcccactagaattggcatcaagaacacgtcaccttgaccttgtcggatttgtctgaaattgaattcattctttttttagtgactctcttaaattggaattagatcttcagtctaaatcttaatgattataagaaacaagattatatgcatcatttcggatttaaacaacatggattaatctcaactaatttagcattaaagataagattttgttaacccttttttattgggtggatcctacgtggcgaagattgagtcatcgtctaaaattttaaaaaagatttcaagaaaaaattaaaaaatgagctggcgtcgaatcccacgttgtccgtagggaccacaacggtattccttattcagtgggacacgtcagctttataaaaccactaacggccgacacaagtcagtagatcctacagtggggaccactctaacctttttctggttaaaaaaagatatattttaccgtagatgaaatcaatattagccgtcgattaaatggtaaaaacaaatatgcttgatttggtagtccacgtttcgtcatctgtggatctcaaatgaattatacattatagtttaattctgtattttcattatttaaaaggaataaaatcagcagcacgtcaagtctacgtagagatctcaagatgaacggtggcgattatgactacgtgtaccaatcattatttaagtcagatatttaaaatgtccagcgcagatctagggttgccagctcagcatatgcgttccctttgcaaacccttcaagatcatgacacgtgtacggtgacgtgttcatcagcctcttggcgctccgttgtgtctctcttctttttcttctcttctccttcctctctcttcttttaccgaactctggttctagagagagaaaccattctctccgactaagagagagaagcgaatttgtttttttttcttttgtgggttcaattcgaattgttttccctgagactcaaggtacgtttttggattttggttttcgttattttcttcaatgaatatctgagtgattatatatgaacgctctgttttctcgagaaagtgtgtattgagtgaagaaaattactaggaaagttaaaggtagattgaattgtgtaactctactagttggtgatagttttgaacttttgacagaggaaaaaactcgactttgaatcttttactggtagattcagtggtgctatactttatagttactcggatctctgttatatttatagtttgatgtccacaattgcgagatctaggtgtaattgaatactgttcttttagatttatgctttacagaggaactgctaaaagatctgatcatttttttgtttataaagttactgtgtcattactctgcattgagcaatg

SEQ ID NO: 29147 - DNA, 3000 bp, Unknown; identical to SEQ ID NO: 29146
  misc_feature (1)..( 3000): 2750-1469P.txt file - cDNA_ID_2999914; gDNA_ID_2926150; Annot_ID_139264

SEQ ID NO: 29148 - DNA, 3003 bp, Unknown; identical to SEQ ID NO: 22476
  misc_feature (1)..( 3003): 2750-1469P.txt file - cDNA_ID_2999918; gDNA_ID_2926150; Annot_ID_139265

SEQ ID NO: 29149 - DNA, 3000 bp, Unknown; identical to SEQ ID NO: 7648
  misc_feature (1)..( 3000): 2750-1469P.txt file - cDNA_ID_2999922; gDNA_ID_1621155; Annot_ID_57009

SEQ ID NO: 29150 - DNA, 3003 bp, Unknown; identical to SEQ ID NO: 22885
  misc_feature (1)..( 3003): 2750-1469P.txt file - cDNA_ID_2999922; gDNA_ID_2926150; Annot_ID_139267

SEQ ID NO: 29151 - DNA, 3000 bp, Unknown
  misc_feature (1)..( 3000): 2750-1469P.txt file - cDNA_ID_2999930; gDNA_ID_2926150; Annot_ID_139273
tcgtatgcgccgttagctatccttacttgccgtttctcaacaattggttgattagtgtttctagacagaagcatcaggatcaagttctcgtcatcgctgaggattacgctactctctacaaagttaacgagaaatggcctggtcacgccgttctcattcctccggcgctcgattctcagaccgctcacaaattcggttctcaggtataatacatctacacagagttttcatcttctcgatccaattttatctctagcttccagttcatgaaatctagctgaaaaatggctttgaaatctgagaatccatacttagttttgatcagtgattcacttatcttgaatgttcgttgattagcttgtttagtccctgaggtttcggttttaagctgtgttttggctgatcacatgaataacaaaagatagtgaacttgtggttaatatatatgcttaagagcttctattgcaatggaatcgattgtttaaactaacttctcgtatgcatatcttgaatgttcgttgattagcttgtttagtccctgaggtttcggttttgagctgtgtttttgtacatccatggctgatcttatgaataacaaaagatagtgaacttgtggatctagtagcagcagccatttttcccctgtttctgtatgtgatactatatatgctaagagcttgtattacaatggaatcgattgtttaaactaatttcttgtatagggattcttcaatttcacagcacggaggccgcaacatctcttggaaattttggagttaggttacaatgttatgtacaacgatgttgatatggtttggttgcaagatccgtttcagtatttagagggaaagcacgatgcttacttcatggatgatatgactgcagtatgtatatttttttctcagacatcttcttcattgatggtatttggattagtgtacttattattgtcttgattatgttgtcagattaagcctttggatcactctcatgatttaccacctccgggtaaaaaaggaaggacttatatttgtagctgtatgattttcttgcgtcccactaatggcgcaaaacttctcatgaagaaatggatcgaggagcttgaaacgcaaccttggtccagagctaagaaagcaaatgatcagcctggttttaactgggcacttaacaaaacagctaatcaggtatgttctttcttcctagttccacagtaaaacagtaacttctcttctctgtaaattggtctcaataagtagttactacacaattggtgaattcaatgaaattctagcgtaaaatctcaaaagactgaagcttttgctacgccgagagaggttccgctttatctaaccgtagctactcaagcttttaatcaactctgtaatctacttatgaatgtttagttacgataagcttttttggcacacacatggctgatcttatgaataacaaaagatagtgaacttgtggatgtagtagtagcagccatttttaccctgtttctgtatgtaataatatatatgttaagagcttgtattgcaatggaatcgattgtttaaactattttcagaggaattttatgacatcaaagtttaaaatctcaaaagactgaaccttttagtactcactcctacgaatgttgtttcaattcgagaggtaatttgatttggtttgaattcattcttcaactctttttgtattatctctgttctacaggtggatatgtacttgctttcgcaggcagctttcccaacaggaggattgtatttcaagaacaaaacatgggttaaagaaacaaagggaaaacatgcgataatccacaataactacatagtcggttttgagaagaagatcaaacgtttccgtgactttaatctatggctagtcgatgatcatgcttccgagtctcctttagggaaattagagtaaattccaatggcagaaaaagattttttgtcgctccatctttcttcttgttattggaatattcaggctgcagaaaggaagaaagatccatcgagtaaattcttttacattttttgggggtctttaaagtcatgtgaagaggtgttgttattggctaattcaatacgagttgagttgaatttggtaatgtagactactagaattggtattgggtctgaaatttcttaaataatcgaaacaaatactgacagctagcatatgaatacgagggtccacaagagtattaaacatatttattttgaattatagttgggtgttatttccacactttataacatgtgactaattttacaatctaatagaccttttggaggatgctgcttatgtaagatttaccgtaaatgataaacataaattaaatacgctctttgacgtcccattgtttggtcacacacactctagacttttcattcattcgtgtgttactcaaatctatttattcccagatctgatatatatatttattgcaattactaaatcccaatttccataaataatgatttctatgtaactcgttccataaattaaattatgcgtctaagttgtaacatataataaaaggataatatatttttcagtcacaccaaaaaaaaaattgataagaaagaaaaaaaaagagtgaaaattagaaagacagagaagcaaagattcttgctccctgcgaatccgcagctgcttcgaaacgcaaatccgatttgtagtctcctttgattcttccattgacgatacagcttctctttctctcttctctctgcttactttgctttttactaagctcacaagaatctacgcatctgtactgttattatgctgatgctctctacttaatcatcaccaccgcacgcagttcgagatttctggaattttctgtgtcggatgcgtttgagattcatcgaatctacttggttatagattggaaatttaggtggggatttgagttgcttagcttgtggtaggttacattttcttgtttgagattcagtgaatctctccagagttgcatgtatagaaatg

SEQ ID NO: 29152 - DNA, 3000 bp, Unknown
  misc_feature (1)..( 3000): 2750-1469P.txt file - cDNA_ID_2999941; gDNA_ID_2926150; Annot_ID_139281
catcaatcgatcaaaacaaacagcaacagcaaaattatctttctgcagatcgaaaccctaattggtttctccgttctccttttgttcttctagaatcggcgactcttacttttttttctttctaattatccttttctgatggattctggaatccatgtaattccccattagcgctaaaaaccctagctgtcgaagaccttagattactgcagaaatgttataatctgttttcatcttttcccgatttgaggtttttatttattttggttgggtgagagaatccgatacgagagattaaagccttgtgagtttaggatgagctagttttctttggctttgagctgtaatttctcttctctgaaatctttcactgtacatatagctagatcctgatgaagttgcgtggtggtgaatcgtggtttaagttttgctagttgagatattattggtggttactgtaatatcgaagaatcatatttcacggtatttactatagacaactactgtagagttacttgattaaggcgttaagaagagatactggtgttttttggcctcaatcagctaagatttttgtgcattgtatgatgagtatagcaaatgaacaacaatttgccatggatcaacttgtcgaaaccaatgatgattcggaaaagtatgttttttctgttttttgtaaaatccatgtctctgttttgctgcttattgtacatttctcagctgcagttgcaattgttttcaggaaaccaagaattacatacacgaggaagtttcttatatccttgagcgagaaagacgtttgcaagaagctgccaaatctgcctggtgaatttgatgaagcactgttgctgtgagactctatccgatagttttttttttagtttggatttctagaaactgtgtaaatgtgtttgatcatgttggagtgacatgtcttgatttgtacactctttatttgagtagtgacttcgaagatccttcacccgagcgagcaagaatttcaggcgatttttcgtcgcatggtttcaggcggaatgactatagttcatcgcctcccaccaggggggaattaggtactaactctcgaggcacccatggaagatgggaagggcgctctggtggatggaatgataaagatagtgattcacagtcagaccgggactcaggtagccggagcttactcgtatcctattctttacatgctgtatgatgacgttactacagtaacaaggtggactagtattctgaatagttaccttgttgttatatatgacctataaaatactcctacgaattatgtctttctgcaaaaaagtgttcattattatgatttcaactctatccatctggctgttcaatatgcgtaaatgtagatttccacctttttttaactaaagtgaatggcatgaagtctgcttgtctagtgaacatgaaaagaaggtcttttcgaaaaattctggaatttgggtgtattatagttgatttggaactgtgtattttgttaggagagcctggaaggcgttctggtatgccatctcggaggtcttggcaagcacctgagcatgatggacttcttgggaaaggttctttccctaagccttctggatttggtgcgggaacatctgcccctagacctcaatctaatgactcacatcagctgagtagaaccaatgaaccttaccatcctcctcgcccatacaaggttaagtacccaaatatctgctgtagtcatcttgaatagtctctggtaccattgattcttgaatactgctccatcacgttactgggtttcatcagctggtttgtgaggtgtatttgaatgatttaacggcatagattcataaatctctcatgtacatttgtaggcgccacctttcactagacgtgacgctagagattcattcaatgatgaaacatttggttcttctgattctactagtgaagatagagcagaagaagaaagaaaaagaagaggtacagaggatctattgactttgatctgtactaaacttagctctctgccaatttgtgcacttctttcagttaatccatgcgtttctttttgtgtcaatctttaattgacattctcaactctctgtcagcttcttttgagttgttgaggaaggaacatcaaaaagcattccaggagagacaaaaatcaaacccagacttacgcaaaaacgactttgattttactgaacttcttggggagtccaaagatgataaagggcgtccaagtagaagtgatgaagtcaatcacgctccaacaattcctggttctagtaacacctctttgccttctcaaagtaatgcacccagaccgcttgtacctcctggttttgcaagcacaattttggaaaaaaagcaaggggaaaaacctcaagtaagtcgctatctttctgagaccctcatccatacctaatatctgtgttccatgaaggtttcatttttgtttgcatattgattgttaaagtcttaaggatagcaaaatcccagaagaaatatcaaaatagaggggctttatgataatagttggaaaggggaatatgttacaagaactatgcaaatcctgatagaatgattctctgcaattcatgacagtaaagtcaaaaggaaaagcgcacgcctagttcttctgactagtgacaagctttgaacatactttttttattctatcttatagaaggcaagtcgtgccgagtaagagaatttgggaatagaggaaataaattttattgccttgaatatcaagtaaactaggaaaatataaataaagccaattccttcaataactccgtcattgggtgtaagtgatccaaggctgtggtctctttatctaccacttccattcgcttactgcagatcagtgagggttgaaatttgagtgtggtggcttttgttttaatttatcttttcttcgtaaatgttttgtttgaatgtatgctgtgtttgaatgtatctttggtggcgcctattatttactggttatcacaccatatg

SEQ ID NO: 29153 - DNA, 3003 bp, Unknown; identical to SEQ ID NO: 16250
  misc_feature (1)..( 3003): 2750-1469P.txt file - cDNA_ID_2999948; gDNA_ID_2926150; Annot_ID_139284

SEQ ID NO: 29154 - DNA, 3000 bp, Unknown
  misc_feature (1)..( 3000): 2750-1469P.txt file - cDNA_ID_2999967; gDNA_ID_2926151; Annot_ID_139304
ctatcttcggatagagcagagaagatcgcggctttatttcggacaagcaaaaaggttgtgatatggattacgactaagattgatgccacaaatgtaacttggagcaatttcttcacaatatatatatcgaaccttgagcgaaatctttcatgtaagagtttcttcacaatatatatatcgaaccttgagcgaaatctttcatgtaagagtttcttcattgacatggagaagaaagttgctatggtttttgataaagaaaaaggaaaaaaagtcgctcacaacattattaatatcattggagaggctggatgcgtgaggaaattggttcttaaagaatctggagacaaaagctgttggccacttgtgtgctcttatgttccaagtacagtgcaaatcaagcaacataatagaggcaaaaggcaaaaaaaagtgattaggaaaggcatcgacattgatatgagacatgataaacgtatcaaggttgattagtctcaatttacaaagtctatatagtttatatgtttttcacttacccgtttaacttttttcttcccatctattgttctatatggacaaaattttcatgttttaattttttaagttttacaaaaccgctgtgtgatctattaaatgactagttttgtcgtctgaaatatcacatccgtctccggcggtgtggttgatgcaagttgcaagtatagaagaatatgtgtacttgtctcttactctgcacttgatgagattgtgttgcggcttctgactacatgtatgtggtttattccttacattgtttcatgatttgaaagtaggttatggatgtgttatggtttgtacggctacactttcagacatacacaaaatattacgaattgatctcatggcacatcactccgtcttcgagtcacctctatgtgtatctagtagctttctcgttatgattgtttttcttcttggatcagttttggttgctcaatttaaccttttttctagagaacattcaactaggaatctcactatcataaaatcattaaaggttttgttagttgtagtatgttatggatattcacttgcctgtagagaacaaacattcaagttgcaaattgtgtatatgctttacttttgaaacttgcatgaaacttttgtcatggcgtgtcagtacatagagttgagtaatcatggctttgctatatttgccctgatctacgttgaagtttccatatagtatctttttttcctagtcaaaagttggtttttcactaataaaaatttatgcagatagagagaaaccaaactgcactaaacgagcttaaccatgcattagaagatagagatatatactcgatttggtatgttaaggaagcaaccaactttgaacccatatccatttttctaataaactacgtacatgagaatcctcgtagcaacatttatagaagagatacccaaaccatgtgtaacataattaattaaagtctaaagacagcattggaagagattacacacatgagtatccaaaacgaacaagctgtcactatccaaaacaaacttcaagtgagaaaagtaataaaacatgaactaaaagatagtttaagagattgttaaagcattttcttgcagagttaggttttctcctgatcccacattgtaattaatgatgttgtacatgtcctctaaaaatctgtttgctggcattcgaatctttgcagctatcttttcctacaaacaattgcctagttttctgataatgacggcagtgtgatcttaatgacacaatggacgccgtcacatttctagagtgctattagctagggaatggttattaactttctcaaactttgatcaaggaactatgttttgccttttcttttgatgtaagttgaaatgatacatattttctcacatatgggctaccaaatcttttcttatagttgtcgaacgtaactaaacatatgctgacacagttgtataaataattttacgattcacgtttctgaaaatgttagttagtattagcctatgataattaactatacttcgctttatgtaaatcaaaggccaacttttttgaatatctatatgtaagaataaattacagctattaataaatacgagatgtaacttaattcagaaatgttcacacacatatggaacaagaagatttatccctgaaatagtattcacagtttggatcttatacctttttatgtaaaagaaaagattcaaacaaaaatctttcttatacaaataagattcaatcaaacatatattcctggaagttttgaacataaaaaaatgatttacaaaaaaattctcctaatttattaaaactgaatatttaataacataaaatctcttataatttatgtatatacaaaacaaattccatgatattcatagaatctcataaggttagattcttattataaaaagtagacaatctctaataatttatgtgtcgtgatattaattagaaatctctaataactcaaataggatattaatctaaattcgttgacaaaaatagatagagaatcattgttattcaacgcccaaaaccaaagtcattagtcaatgtcactcgtgaaactatccaaagataagagtttatgggattcgctaatctattacattaaagccacgtgtcttaatcttagatgttcaatagacttgccacgtcacacattgtctctctcgtttctcaaatcgcgtttcttctggtggaggtcaaactttttgattagcaaataaaagtcacacaagccgaatccaaaaatgtaacaagaaaaacaaatcttcacaaggcaaaaaatccaaaattgagttttttttttcttcattttttacaatggtgtctcggtttcgtcttgctctagagtacttctaagtctctctgttcttacttcgatttcgatttttattctcttttttttttttttttgaagacggatttggttggtggtttttagggctgttttgggttcgagacgacgtaagaagatg

SEQ ID NO: 29155 - DNA, 3003 bp, Unknown
  misc_feature (1)..( 3003): 2750-1469P.txt file - cDNA_ID_2999974; gDNA_ID_2926151; Annot_ID_198080
tcaatcctatatggcggttaagacagatgtgagtaaggcgtatgatagagtggagtggaattttttggagacaacgatgagactatttggtttcagcgagacatggatcaaatggataatgggagcagtgaaatcagtcaactactcagttttagtgaatggcatacctcatggcacaattcaaccacaacgtggaataagacaaggagatcccttatctccatatctcttcattctatgtgctgatatactcaaccatcttattaaaaacagagtagcggaaggggatattcgaggtatccgaattggtaatggtgttcctggtgttactcatctacaatttgcggatgactctctttttttctgccaatctaatgtccgaaactgccaagctttaaaggatgtctttgatgtttatgagtactattcgggccaaaaaattaatatgtccaaatcaatgataacgtttggttcacgagtacatggcaccactcaaaatcgtctcaaaaacattcttggtatacaaagtcatggtggaggtgggaaatatcttgggctcccggagcaatttgggcggaaaaaacgagacatgttcaactatatcattgaaagagtaaagaaacgaacatccagttggagtgcgaaatatttatcaccggcaggaaaagaaattatgttaaaatcagtggcgatgtcgatgccggtgtatgcaatgtcttgcttcaaattaccattgaatatcgtttcggagattgaagctcttttaatgaatttctggtgggaaaagaatgcaaaaaaaagagaaataccatggatagcttggaagagattacaatactcgaaaaaggaaggtggtttagggtttagagatttggctaaattcaatgacgctttacttgcaaaacaagtatggcggatgattaacaacccaaattctttatttgcccgaataatgaaagcaagatactttagagaagactctattctggacgctaaaaggcagagatatcaatcttacggatggacttctatgcttgcgggtttagatgtaattaaaaaaggaagcagattcattgtcggagatggcaaaaccgtttgaatcagtcaagataattttattgcatcgcaccctccacgacctctcaacgtcgtcactcctacgttggatatcacggtggatacgttaatctcaactcagggttcgtataggtattggaacgcacatctcatttctcagcttgttagtcccgacgaccaccgttttgttatgaaccatcatctttccaggattgtgcatcaagataagctagtttggaactactcttcttctggggattatacagttaagtccgggtactggtttctctttaatgacccaacgaatatttaggttagaccagtggtgcctcatggttcagtggaaattaagaacaagctttggaaactccctattattccaaaaatcaagtacatgctttggcgtacaatctcaaaagcattaccaacacgctcgcgacttctcactcgaggaatggacatcgatccacactgccccagatgcccaactgaagaagagacgataaaccatgttttatttacgtgtccttatgctgcgtcaatttggggtctatcaaacttcccttggttaccgggtcatactttctctcaagacacagaggagaatatttctttccttatcaattctttttcaaacaatactctgaatacagagcaaaggttggccccattttggctcatatggagattatggaaagcacgcaataatcttgtgtttaataagttcagtgaaagttgctcaagggttgtgacacaaactgaagcagaagtcaatgaatggttacaaagtgtgaaccgaagagaggacgcttccgttttaacacgatcatcacacagggcaaacgtgcggtggaagaaaccggtctttcctttagtaaagtgcaacttcgatgcgggtttcacgggtaataatactcagagtacgggagggtggatcatacgtgatcatgcaggattagcgaaggcttggggatcatcaatagtctaaaatggtaccactgctttggaagctgagacaaaagcgttattaatcgcaatgcaacaagcatgggtacgagggtataagtgtgttcagttcgaaggtgattgtgagatccttatcaaggcaattaatggtgcaatttctagatgtgaaataaccagtcttctccgagatgtggatttttgggcatcaagattttctactgtggttttcactttcacaaatagactctgtaataatactgctcacctcttagcttctccactttattcgtgttacaagtttcaatcgaattctggttatcagccactttggctcaaaaactctctttgtaaagatttactcatataaataaattctgtttgttggaaaaaaagaaaaaaaaaaaacctacattctaaatactgaaaccataaaccatatggtaaaaagtggataaatgctcaactatctccatttcaatatacacatcataaaaaagatttatattcaatttattgtaaaatgaaaacttagattgcattactttttttaactctcttctctaatttaatttactatctaaatttgtgagttcataaaattttagattgagaacaattcatcagaaattctgattcagaacagtacaaatcttgtcatgcaaacttatctatcttgtaaaatctatctatcacttgtcgtcactaagtacaaaatctattttagtttgttttttttgtgtgtaagaaaagtttttttatttaataatctatcaccaatattttccaacacaacatgaccgttatctcctccaatctaaaacttaattacgaaactacccttacctctttcactgactgactcgtctccttctccacttggatctcaaaagtccgatccaaaaccaaatccgccataactctctctctctctcccacttcccacagagagacacattcatg

SEQ ID NO: 29156 - DNA, 3000 bp, Unknown
  misc_feature (1)..( 3000): 2750-1469P.txt file - cDNA_ID_2999974; gDNA_ID_1621151; Annot_ID_56891
atcctatatggcggttaagacagatgtgagtaaggcgtatgatagagtggagtggaattttttggagacaacgatgagactatttggtttcagcgagacatggatcaaatggataatgggagcagtgaaatcagtcaactactcagttttagtgaatggcatacctcatggcacaattcaaccacaacgtggaataagacaaggagatcccttatctccatatctcttcattctatgtgctgatatactcaaccatcttattaaaaacagagtagcggaaggggatattcgaggtatccgaattggtaatggtgttcctggtgttactcatctacaatttgcggatgactctctttttttctgccaatctaatgtccgaaactgccaagctttaaaggatgtctttgatgtttatgagtactattcgggccaaaaaattaatatgtccaaatcaatgataacgtttggttcacgagtacatggcaccactcaaaatcgtctcaaaaacattcttggtatacaaagtcatggtggaggtgggaaatatcttgggctcccggagcaatttgggcggaaaaaacgagacatgttcaactatatcattgaaagagtaaagaaacgaacatccagttggagtgcgaaatatttatcaccggcaggaaaagaaattatgttaaaatcagtggcgatgtcgatgccggtgtatgcaatgtcttgcttcaaattaccattgaatatcgtttcggagattgaagctcttttaatgaatttctggtgggaaaagaatgcaaaaaaaagagaaataccatggatagcttggaagagattacaatactcgaaaaaggaaggtggtttagggtttagagatttggctaaattcaatgacgctttacttgcaaaacaagtatggcggatgattaacaacccaaattctttatttgcccgaataatgaaagcaagatactttagagaagactctattctggacgctaaaaggcagagatatcaatcttacggatggacttctatgcttgcgggtttagatgtaattaaaaaaggaagcagattcattgtcggagatggcaaaaccgtttgaatcagtcaagataattttattgcatcgcaccctccacgacctctcaacgtcgtcactcctacgttggatatcacggtggatacgttaatctcaactcagggttcgtataggtattggaacgcacatctcatttctcagcttgttagtcccgacgaccaccgttttgttatgaaccatcatctttccaggattgtgcatcaagataagctagtttggaactactcttcttctggggattatacagttaagtccgggtactggtttctctttaatgacccaacgaatatttaggttagaccagtggtgcctcatggttcagtggaaattaagaacaagctttggaaactccctattattccaaaaatcaagtacatgctttggcgtacaatctcaaaagcattaccaacacgctcgcgacttctcactcgaggaatggacatcgatccacactgccccagatgcccaactgaagaagagacgataaaccatgttttatttacgtgtccttatgctgcgtcaatttggggtctatcaaacttcccttggttaccgggtcatactttctctcaagacacagaggagaatatttctttccttatcaattctttttcaaacaatactctgaatacagagcaaaggttggccccattttggctcatatggagattatggaaagcacgcaataatcttgtgtttaataagttcagtgaaagttgctcaagggttgtgacacaaactgaagcagaagtcaatgaatggttacaaagtgtgaaccgaagagaggacgcttccgttttaacacgatcatcacacagggcaaacgtgcggtggaagaaaccggtctttcctttagtaaagtgcaacttcgatgcgggtttcacgggtaataatactcagagtacgggagggtggatcatacgtgatcatgcaggattagcgaaggcttggggatcatcaatagtctaaaatggtaccactgctttggaagctgagacaaaagcgttattaatcgcaatgcaacaagcatgggtacgagggtataagtgtgttcagttcgaaggtgattgtgagatccttatcaaggcaattaatggtgcaatttctagatgtgaaataaccagtcttctccgagatgtggatttttgggcatcaagattttctactgtggttttcactttcacaaatagactctgtaataatactgctcacctcttagcttctccactttattcgtgttacaagtttcaatcgaattctggttatcagccactttggctcaaaaactctctttgtaaagatttactcatataaataaattctgtttgttggaaaaaaagaaaaaaaaaaaacctacattctaaatactgaaaccataaaccatatggtaaaaagtggataaatgctcaactatctccatttcaatatacacatcataaaaaagatttatattcaatttattgtaaaatgaaaacttagattgcattactttttttaactctcttctctaatttaatttactatctaaatttgtgagttcataaaattttagattgagaacaattcatcagaaattctgattcagaacagtacaaatcttgtcatgcaaacttatctatcttgtaaaatctatctatcacttgtcgtcactaagtacaaaatctattttagtttgttttttttgtgtgtaagaaaagtttttttatttaataatctatcaccaatattttccaacacaacatgaccgttatctcctccaatctaaaacttaattacgaaactacccttacctctttcactgactgactcgtctccttctccacttggatctcaaaagtccgatccaaaaccaaatccgccataactctctctctctctcccacttcccacagagagacacattcatg

SEQ ID NO: 29157 - DNA, 3003 bp, Unknown; identical to SEQ ID NO: 29155
  misc_feature (1)..( 3003): 2750-1469P.txt file - cDNA_ID_2999974; gDNA_ID_1620662; Annot_ID_47981

SEQ ID NO: 29158 - DNA, 3000 bp, Unknown; identical to SEQ ID NO: 29156
  misc_feature (1)..( 3000): 2750-1469P.txt file - cDNA_ID_2999974; gDNA_ID_1621151; Annot_ID_173266

SEQ ID NO: 29159 - DNA, 3003 bp, Unknown; identical to SEQ ID NO: 29155
  misc_feature (1)..( 3003): 2750-1469P.txt file - cDNA_ID_2999974; gDNA_ID_1620662; Annot_ID_163815

SEQ ID NO: 29160 - DNA, 3003 bp, Unknown; identical to SEQ ID NO: 29155
  misc_feature (1)..( 3003): 2750-1469P.txt file - cDNA_ID_2999974; gDNA_ID_2926151; Annot_ID_139315

SEQ ID NO: 29161 - DNA, 3000 bp, Unknown
  misc_feature (1)..( 3000): 2750-1469P.txt file - cDNA_ID_2999982; gDNA_ID_1971823; Annot_ID_58361
aaaagacgaagcagtagaactctcttctctagtcttttcctgcgaagaacttggcttagatgttgacaaagaggctgctcgctcgtagttcttcaaataaaatggtttcctctcttcgtctactgggaaaagcaaagaggaaactgatgtatttccatttaagacagtaccagaatgagatttctcactaatgcctgcacagaaatgatcaaacattgaatgtgaagctgccccatggagtacacgttctcgagcacctgttttcacatcccaaatgtataagacatcaattggatctgattttctcgaaagggagcgaaaaagacatgcaatgtagcctcttgtaccatcccatacaacttttgtaggatagtttgggtgcccaggaaacatcctttcgacccgcaaagtctcaagagaagaaagagcaacacatgaatcatccccaacagatagaaagcacttgctccatgggcgttttgttggagctggggatagaatgatctggcgcactggagcaacatgatgatgcatgatcatgataacatttccgctttcgagatcccaaatgcggatggtacagtccatacttccggagatcaaaacatgagaagaattacatccatttgcatccccaaacattcgatgcgctgctaagcatagaacagatcctgtatgtcccaatagacgctgtttatagacgagtggatcagtatctgatctcgggcttgaagcaggagaatcaattccatgaagaaaatcaaactttgcaatctctatctcaccactaaagaaaccatagacaacagcatatgggacatacatattctcagaaataaccatggacgatgacacacactgtccattgtcactaacaaagctttgtagatcatttttggcactgcactgacttcctgactgcgaagtaccagtttctgcactaaccgagcccttgggatctaaacaggagcttgaaatccaatcagcaaaataggagctttctccaagcactttgcgctgaagttctttttctttaccatttcctaggcacaatgaccagatcgttatatggggcctccactgagaaggttgttcaacatcacaacaactagactcaacgcgaagaagattctgcctcaactgaacaaaacaaaacgttgatttcacggaacgcttatcatcaggggcagtaacaatctcaccgaagtttttatatgtaaattcaccatctatatatgacatagtaaacagcacagcagaaccactaccatcccacagcacaaaagtttcagaaatactatcatctttatcaccttcaatagttgatgtactagagtaaagtatcattgcttctttgaacagaaaatttgaagaatgcgaatcatcaacaaaagatatctctcctattgcctcctcgcgattcaacaaccaaaagacacacctactcttcgagaaaaacgcaacaagatcccctcgagttattactgatacagcaatttccccttcactcaaccagtttctagacactagagagcctttgctcggttcagatttctctgacactgagaccaactgcaacctaccaaacgaatcagccataagcaatgattcctgctcatctaactgaaccacgcccataaaattcaaacaaccaatagataaattcccatggaaaactgtatgaacaatagtaagagtgtaagtatcaacaacaaccaccgtgcatctcgacttctgaaaatcagtatctgctaaagtctcagccccatcaacatcgatataagaacaaccaacacatacatatctaggctctgatggcaaagtagacaaaatcgatggacttccaacccaaggaggtaattttcttcgtttcctacactgaccactacttctactccatacacacaagacaccatcagtacaagcactgatcaatgcacaacagttaacaaatggatccgcattaccattatctgatgcaacaactccattacttgaaagtattgtaggatcacaaatagcaagatccactattggtgaagtatggccacacaacatagcaatcggtttaatctcatgatgagggagacgagttacagaattggattcggaagaagaagagatgctccaccagatgattgacccatcggatccaccggtatagagagtcggtggattggttagagaggctgtggcggtgacccgatgagacggaggagcacgagaccataggcaggccacagatcggcacttcatcggcttgaatcaagcggtacaagcatcgaccgagtcagtgaacgagtcggggtgagagaagaaggaagaacgaactggtaaacgacgtcgtaacagtaatcacgacaaatatatctgtacatatttagatggatttttcgaggttgcaaataaattttttaaggtaaatatttggcaaaagtttgataattgatattttaactttactagattattatcaacttaaaatacttaaatctgtgtattggacgacgggtcctaatctagtcaatatataaattataacttgttaaaatatatcatagtctaaattcacaaatcacattgtatttgctaaactatgagtaaacgattacgatataaacaaaatgagtagaaaatgattattttaaattattgtagttctctataaatatctttaccattagttttctttccttttttcagtattattcttttgtcaactaatttatttgttaaaaaatctggacttatcaagaatcaatcttatgttaaaaaataaaatcaaaaggaaattagaaaataaaataaaatctaattacctttttgtttttggttatatgacctagtagaggtattaaaacgttcttaaaagaaaaaaaaaatcccaaacacagcaaaaaaaaaaaaagcctagaggaatagaatcggtctctttctctataatctctctctctctctgacttgtttgtgttctctcaaatcctctgataagaatcaatg

SEQ ID NO: 29162 - DNA, 3000 bp, Unknown; identical to SEQ ID NO: 29161
  misc_feature (1)..( 3000): 2750-1469P.txt file - cDNA_ID_2999982; gDNA_ID_1971823; Annot_ID_176254

SEQ ID NO: 29163 - DNA, 3000 bp, Unknown; identical to SEQ ID NO: 29161
  misc_feature (1)..( 3000): 2750-1469P.txt file - cDNA_ID_2999982; gDNA_ID_2926152; Annot_ID_139357

SEQ ID NO: 29164 - DNA, 3000 bp, Unknown; identical to SEQ ID NO: 29161
  misc_feature (1)..( 3000): 2750-1469P.txt file - cDNA_ID_2999982; gDNA_ID_2926152; Annot_ID_198151

SEQ ID NO: 29165 - DNA, 3003 bp, Unknown
  misc_feature (1)..( 3003): 2750-1469P.txt file - cDNA_ID_2999986; gDNA_ID_1971823; Annot_ID_58364
ttttcctcatatttcaactagttaatctgaaaattgtaccagtcaagccatcataagaagagaccaataaattaagagtttgtctttatattaaatcacgctttgtatatttttatttaggattttggttgggtgaatattttgatctttagagataggttgttaatatttagacgttttgacaactaattttcctaacgatgaaactagtctaagttttaatgatttttaatcatgtgttctgtttattcttttaatgcttcacgtggatagattgttttcaatttctctgttagtagcatagtagccaaatgggcttagtgtttttattaattagccatgcgagattagctgtcaaatattctgttacaatgcactaattttcaaatgaagagaaacgagccttcttttctaaagggtcactgcaaaaatgcattaacattctgatgaaaaaaataaaatatagtatcagatggactttgaatccattaaaaaaccaaccctcttaaactaacactaggccaccatcatgtttagaattctatattttgaaactagtacatttacgtgttctttggtttcttgattgggatactatagtcatttttaggtttcgttcaaagttgacaatcgtataaaaataaaaactgaataagaagttttcgtgaaaagtaaattaatttagagagaaagttgtgtctgcgtaaagtatccatacaataatggattaatttttggacatatataaatttgataactaacgctaatgtcgttatgttcttgaatctatttaaaatatataagagttttatgtagaatagtgttagaaaatctcagtaacgtggacggtcttggccatggactatggcggctacaaatggtgggagtaggtctatgggtaaaatataataataccataaccagattgagttaaggattatttcttaagattttaaaattatacctaagaattatatttaattgcatgtgtatataaagtgcaaatgcacacatgactctacctagctagctagctattcgcatatagtaaaaagaaaagaaaaaaaaaagtctatgaattgataaataggtttttgaaatttgaattagattgtatatatgacccaacaaaaaataatgtcatagaacatatgatgaaattcgctatacaaattcttttacccaatgtatagtctagttttgcaccatacgtaaatgtttattctttaacgtaaaacctatatatagatttttgcgtttaatttgaactttataagccatacaatacgtaactacattcgtcaagataagttgtttttgttaattatcaacaaccatgatttaaaatatgaaaaaatggttaagggttagatatattttattttttgttaaagcaagggttagatatataatatattacaaataacttcaacttcattaaaatacgtcacatgccatgatttgtctaccaaatacaattaattaacttaccgactttctcgacgaaattaaaaaaagttatcgaaattatcatctgtgtacacctttaattccacgaggaatctatataggctaataaatagccatcgtacgtaacatcaaacaaaatatatactagctttggaatttttgttagtgtcctggcatggcaagttggataaatacaaaggaaggtaataaaaattaaaatagtaataaaattatcacaaattttaggtatatagatctccatatctataacaaacatataacatgttaagaataaataaaaaagacgaaaccaccaagcaaattctaaagatcgttggtttgaatgacattaggaaggaaatgatagtaaatatactagttctcgagaaaatgtagggatttaagcttagaacatcttaattattcaaaaataataattgaaaaccacataaaattataaatcttgcctaatagttaatattgagactaaaactcaaactttttttttttctttggttttacttttttgattatatagataaatggatgatgattaatagttttgttggagatgattttttgctaccaaatatagacacgagttatggctctattgtctctcacataaaaacgttaaacgttctactaaaggtggcatgaatcctatgcattttggaactgacaatattcagttgtctctaatagataactaagacttataactttaatctccatttttttttccgcgaatcaggatcggttatgactaaagcgttaaacagtctctattaggacaaacctaattttgttttccaataagttatttcagttaaccttgctactatcgcatatcgttacccttcggtaaggtggttgggaagctttgatcattcccatgcggacaaaccagctacagttactctagagcactcaacattccatcgaaaaacaattcaaccattaagaagatctccaaaaatctggctcgaacaaacttttaaaatatttgttaattaattttattattcaatctcagttagtatagttttatgtaaattcaactagtcttcatacttattttctatcttcattaagtaataatacattagttttggtagaattagtttttgtctggctttataagctagttagtttaatttacaatattattttcaaaatcatttgattttatctattcatgtacttatttgtttaaattttattaacatttggagagaatctatttttttcttaattatatagattatttaccataactatatcaatatttccttaagaacacattagattataataataacaataagaaaagacaaggcaatagtatctttatgatgataattgaaatcaaacaggaataaatagaacatgtttggtagcttctttcttcttgttctcttctccacattgctttatcctctcacgaccaacactatatataatccctaacttgggaactcttatcctccaaacatagttaaaccaaattttctaagtgtctcataaaaaatg

SEQ ID NO: 29166 - DNA, 3003 bp, Unknown; identical to SEQ ID NO: 29165
  misc_feature (1)..( 3003): 2750-1469P.txt file - cDNA_ID_2999986; gDNA_ID_1971823; Annot_ID_176259

SEQ ID NO: 29167 - DNA, 3003 bp, Unknown; identical to SEQ ID NO: 29165
  misc_feature (1)..( 3003): 2750-1469P.txt file - cDNA_ID_2999986; gDNA_ID_2926152; Annot_ID_139360

SEQ ID NO: 29168 - DNA, 3003 bp, Unknown; identical to SEQ ID NO: 29165
  misc_feature (1)..( 3003): 2750-1469P.txt file - cDNA_ID_2999986; gDNA_ID_2926152; Annot_ID_198155

SEQ ID NO: 29169 - DNA, 3000 bp, Unknown; identical to SEQ ID NO: 8321
  misc_feature (1)..( 3000): 2750-1469P.txt file - cDNA_ID_3000008; gDNA_ID_1971724; Annot_ID_175193

SEQ ID NO: 29170 - DNA, 3000 bp, Unknown; identical to SEQ ID NO: 8321
  misc_feature (1)..( 3000): 2750-1469P.txt file - cDNA_ID_3000008; gDNA_ID_2926153; Annot_ID_139375

SEQ ID NO: 29171 - DNA, 3000 bp, Unknown; identical to SEQ ID NO: 8321
  misc_feature (1)..( 3000): 2750-1469P.txt file - cDNA_ID_3000008; gDNA_ID_2926153; Annot_ID_198192

SEQ ID NO: 29172 - DNA, 3003 bp, Unknown
  misc_feature (1)..( 3003): 2750-1469P.txt file - cDNA_ID_3000016; gDNA_ID_2926153; Annot_ID_139377
tgtagggattgtatcatggacgtcacaagacagttaatacagacatgtcccaaccagacagcagcaattcactggtcaggtggagggaaaactgtatgtatggcacgttactataaccagccgtcttctagaccattggatttggaatcagtttctattggttataacgttggaaatctcagcacaaacttaacagattttgatagattatgggagcgattgatagctcatatggtgactaaagcttcatcagcatcaataaaatatttatcatttgataacagtagattctatgcagctgatgaaacaaacttgacaaattctcaaatggtctacgctttgatgcaatgcacgccagacgtctctccttccaactgtaacacttgtttaaaacaaagtgttgatgactatgttggttgttgtcatgggaagcaaggcggctatgtgtatcggcctagttgcattttccggtgggatctataccctttcaatggcgcctttgatcttcttacgctagcgcctccaccctcatctcagctgcaatccccacctccagtgaccaacaaaggtatgtgatttacttaaataaatgatagaaataacccttcttgtattcaactctaagaagagctaggtgatttggtcttgcacagatgaaaaaacgattcatacaggaactatcattgggattgtcattgtcgttgcaatggtcataatcatggctctgcttgctctaggggtttctgtttgcaggagtagaaaaaaatatcaagcttttgcctcagaaagtgagttcctcttgttttctttcttatcagctggtcttgctgctaatttacgaaagaatttcaccgacctgaccataaaaccacctacattttcattgtgcagctgccgatgatattacaacagttggatatctccagtttgatattaaagacattgaagctgcaacaagtaactttttggcgagtaacaagattggtcaaggtggtttcggcgaagtttacaaggcattttctccccaactactcttaagttgtatttgtgttatgtttgaagatattgagatagtgggatgattagttagattcagttgtaatatgcagggtacgttatcaaatggaactgaagttgcagtcaagaggctgtcaagaacttcagatcaaggtgaattggagttcaagaacgaggtgcttcttgtagcaaaacttcagcaccggaatctcgttaggcttctcggttttgctctgcaaggagaagaaaagatactcgtctttgagtttgttcccaacaagagcctcgattatttcctcttcggtagtactagtagtctaattttcctcttgatccaatattcttgaaatcttaagcttggatttgcaaatggatgtgcagacccaacaaaaaagggtcagctggactggacaagacggtacaacatcattggagggattacacgagggcttctctatcttcatcaagactctaggctcaccatcatacaccgtgacatcaaagcgagtaacattcttttagatgctgatatgaacccgaaaatagcggatttcgggatggctaggaatttcagagatcatcaaactgaagacagtacaggaagagtcgttggaaccttgttagtattctccttattatttacaatgggcacaattctctgatgaacggtttttgttactgactaacgtaaacattgtcatgtatatatttgcagcggttacatgcctccagaatatgttgcgcatggccaattctctaccaaatccgatgtctatagcttcggagtattgattctagagattgttagtggcaggaagaatagcagcttctatcagatggatggttctgtttgcaacttggtcacatatgtgagctgaaatctaaaatgctttttttactttctaactgtgatcatcgattctgaatacgagtttgtttgcaggtttggagactttggaacactgattcatctttagagctcgtagatccggcgattagcggaagctatgagaaagatgaagtcactagatgcatccatatcggacttttatgcgttcaagaaaatcctgtgaatcgaccagcattgtctacaatattccaaatgctcactaatagctccattactctaaatgtccctcaaccacctggatttttcttcaggaacagacctgagtcagacacattacgccgtggattggagccagaccaatataacaatgaatctgttacttgttctatcgacaatgcaacaatcactacactcctcggtaaaactcttgcttctgcactctgttgtattacctcaactctattttcaaagtcaatgtatagaaacactgaggattgaattatttttgaatattaaaagttatctcattttgattctggtttatgtattcacgttcattttttgttaagaataaatgcttggctcacctgcccaataacatctttttttgaccaaatcaaggttctcaaaatagtacggtgaatgaaatcaaactaggctatccactgttttatcctcacatgtttctgctttgtgtcttccttcacaaagatgcagggactcagtattttagacccaacggtactcattccttaatggagactaagagatttttaaaacaataggaaccgacgacttaaatacttgtgtttggtcattgcttgttgcattgtgttttggagtaagttagaacgttttggtgtcaaatagggcctagaagagctacagatcaagaattggtctacgttcactttcatcatatttacctaacgtgtttataaagtattaaattatccaaaacgttgacctaggtgacttgtgcattaatgcacgtatccactacttgacgaaaattctacacgcgaaagctgttttgaccaaatcaacgttccaaaataaacatttccttttaaagattcaagttctaagatctgcaacaagtatctgagcaaagtaaaatgtcaagagaaaaaatg

SEQ ID NO: 29173 - DNA, 3000 bp, Unknown
  misc_feature (1)..( 3000): 2750-1469P.txt file - cDNA_ID_3000036; gDNA_ID_1620726; Annot_ID_49280
accgcgatatttgttatattgtgctttattgcggccatagttttcttcataacaccgattcagattgttgtagcattggctggattcttcacgatgaggcatccgaggttccgacatcggcttccttctgttccagttaacttctttcgccggttgcctgctcgaacggatagtatgctctagcttatattggctggagtattttatgtgattgtcggatatagacttatgttactatttgtaatctggatttgttttatctacaatttttttttcatttgaaaacgttataatattttggatggtattcattagtgtttccttttcaaaaatacctctaagaaaatcagagaaaggatcagtgagtccaaaattcccaatttggtataaactagaaatgaaatttcttttagattcaattttttttttctttttgtgagcttctagattctgttagctagagaactctgaatccaaaagattcacactcacaaaaaaaaacaagaaaggaaatcactctttctttctcttaaaataaagatatcccttctctctacaaaaatctctaccgccgccgtttagggttactggttccgttggctttttcagcaccaaccgagttttctttgttttagtctctctagtttcgatttcttttgggtttgatgtgatttgaatcctgcttttcttccaacggtttcagatctaaattctcagatctagatttataaagtctaaatccttcttctaccggatttgctgcttgttttgtctccttcatctgcagtttcagttctggtcgttccaaccatgacagagacagttctttctgatccttcaatgcctcagatgcatatttctcaatattgaagctcttggtctccttcctttcttcatgagactttttcctttgaatctcgggagtgttgattgatgtctcactgccgttggtggtaaggaaagtcttagttttatttcctttggatagatctctagtcttagatctgtttttaatttaacttggatttatactttgtactttgtttttgagttcttttagtaatgagtttgagaagtttagatttagtatcaatgtttttctttatttttgagtttttttttcattttcgatatgtttttattcccgagagatattgtttgctcgccggcttaattttgggaaggattgttttccttgccgacatatgtgttaaaaataaaataaatacaaaaataccctttaaaaaaaattccagcaattttataaaagtctatcgtttaattacggcagatttattcttattccgcagacttttttaactgcgacagattttctatggcagactcttttggttgacagactttttagaagatagtgatgacagatttataaattatagctgatttaatttgattgacagatttttattttattcaaccacaaacttttatataattttatagacttatttttttgtcgttgtattttcacggtaagtgatggcagatttatgattttgttaaacaaatctgtcacattgtaacagatttgttgtcaaaaaattaattactagaatgacgtctaacgataaccaattttttttaatgttatgacagacttgttttaagttataacagatttatgtaatcttacacaatatctgtcgtttgttggcagatttattttctaaaatatgatgttttgtgttatgacagagttgttttatgttgtgacagataaatttatattaccataaatctatcgtttgatggcaggtttaataaataagaaaataaattgctgaaatgaccttaaaaatattttatgttacgacagatttgtaattaggaattcttatggtgactgatttttagttttcttgttccataattttttgtagtagaataatactaactgttgtgacagtttttttttcattttagcttgttatgactgatttactaaaattagttacaatatttaactcataaaaaatattaatatcgagatacaactagggttttggttacaaaaacttagtctccttacaaaaaatatgtggcctcctttctttcttttgtttatctttttttttcctttggaaatctcttttcagtttttggagtagtggaagcaatatattgtttcatctcttttcctcgtatgtgtgtgggttaaaaaaatatgaaacctataaactcagaattttgagcgatatttttttaaatttttccttacttatttgtttttattttatttttaatttcattttacattatttttttaatatcagatgttaaaaatttcaaaaaaaatacagaccaaggttttttggtcattatacaccaaaattgtgtcaatctaattctctaatcaaatagagagtcattctagttattattggctatatttgtgtcaatctaggtaattttgacaaaaaaaaaaaagaaaaaaaaaaaaagagaactccaaatccagattgtgaagcatatttcaatttcgcacttattcgatcataaaagaatttacataattcgttcataaaatgtatgggctaaatttaggcccagtatgagaaaaaatccaaaaggcagtagtaacgttcacattatgccgccacaaaaaacgcaactgatgacgtaagcacaccgagtgttccgacgattctccaacgtggctttctcttaaacatccacgtgtctattccattctccaaccactgaacacggatcaagaaactaaaatgatattttgactccaaccaaaataaatatctaattttgtgagaaaagaatcttcttttgcaaatgcttcgctcctcaattcgacttctctatataagaagaaccagtcctctgcttcgaagtttatcatcatcatcatcatcatcatcatcaaaacgattcgattctgcgaaaccacttttcaattctcatcggattatttctcttccaatttctacaacgggagctaaactatctagatcggagcattcaatg

SEQ ID NO: 29174 - DNA, 3000 bp, Unknown
  misc_feature (1)..( 3000): 2750-1469P.txt file - cDNA_ID_3000036; gDNA_ID_1620726; Annot_ID_165951
gaggcggtccatccagacgagcttgatgaagagtttgatacgtttccaaccactagaaaccctgacatggtgcgtttaaggtatgaccggcttagaagcgtggccgggaggattcagaccgtgatcggagatcttgcaacacaaggagaacgttttcaagcacttttaagctggagagatccacgcgctaccgcgatatttgttatattgtgctttattgcggccatagttttcttcataacaccgattcagattgttgtagcattggctggattcttcacgatgaggcatccgaggttccgacatcggcttccttctgttccagttaacttctttcgccggttgcctgctcgaacggatagtatgctctagcttatattggctggagtattttatgtgattgtcggatatagacttatgttactatttgtaatctggatttgttttatctacaatttttttttcatttgaaaacgttataatattttggatggtattcattagtgtttccttttcaaaaatacctctaagaaaatcagagaaaggatcagtgagtccaaaattcccaatttggtataaactagaaatgaaatttcttttagattcaattttttttttctttttgtgagcttctagattctgttagctagagaactctgaatccaaaagattcacactcacaaaaaaaaacaagaaaggaaatcactctttctttctcttaaaataaagatatcccttctctctacaaaaatctctaccgccgccgtttagggttactggttccgttggctttttcagcaccaaccgagttttctttgttttagtctctctagtttcgatttcttttgggtttgatgtgatttgaatcctgcttttcttccaacggtttcagatctaaattctcagatctagatttataaagtctaaatccttcttctaccggatttgctgcttgttttgtctccttcatctgcagtttcagttctggtcgttccaaccatgacagagacagttctttctgatccttcaatgcctcagatgcatatttctcaatattgaagctcttggtctccttcctttcttcatgagactttttcctttgaatctcgggagtgttgattgatgtctcactgccgttggtggtaaggaaagtcttagttttatttcctttggatagatctctagtcttagatctgtttttaatttaacttggatttatactttgtactttgtttttgagttcttttagtaatgagtttgagaagtttagatttagtatcaatgtttttctttatttttgagtttttttttcattttcgatatgtttttattcccgagagatattgtttgctcgccggcttaattttgggaaggattgttttccttgccgacatatgtgttaaaaataaaataaatacaaaaataccctttaaaaaaaattccagcaattttataaaagtctatcgtttaattacggcagatttattcttattccgcagacttttttaactgcgacagattttctatggcagactcttttggttgacagactttttagaagatagtgatgacagatttataaattatagctgatttaatttgattgacagatttttattttattcaaccacaaacttttatataattttatagacttatttttttgtcgttgtattttcacggtaagtgatggcagatttatgattttgttaaacaaatctgtcacattgtaacagatttgttgtcaaaaaattaattactagaatgacgtctaacgataaccaattttttttaatgttatgacagacttgttttaagttataacagatttatgtaatcttacacaatatctgtcgtttgttggcagatttattttctaaaatatgatgttttgtgttatgacagagttgttttatgttgtgacagataaatttatattaccataaatctatcgtttgatggcaggtttaataaataagaaaataaattgctgaaatgaccttaaaaatattttatgttacgacagatttgtaattaggaattcttatggtgactgatttttagttttcttgttccataattttttgtagtagaataatactaactgttgtgacagtttttttttcattttagcttgttatgactgatttactaaaattagttacaatatttaactcataaaaaatattaatatcgagatacaactagggttttggttacaaaaacttagtctccttacaaaaaatatgtggcctcctttctttcttttgtttatctttttttttcctttggaaatctcttttcagtttttggagtagtggaagcaatatattgtttcatctcttttcctcgtatgtgtgtgggttaaaaaaatatgaaacctataaactcagaattttgagcgatatttttttaaatttttccttacttatttgtttttattttatttttaatttcattttacattatttttttaatatcagatgttaaaaatttcaaaaaaaatacagaccaaggttttttggtcattatacaccaaaattgtgtcaatctaattctctaatcaaatagagagtcattctagttattattggctatatttgtgtcaatctaggtaattttgacaaaaaaaaaaaagaaaaaaaaaaaaagagaactccaaatccagattgtgaagcatatttcaatttcgcacttattcgatcataaaagaatttacataattcgttcataaaatgtatgggctaaatttaggcccagtatgagaaaaaatccaaaaggcagtagtaacgttcacattatgccgccacaaaaaacgcaactgatgacgtaagcacaccgagtgttccgacgattctccaacgtggctttctcttaaacatccacgtgtctattccattctccaaccactgaacacggatcaagaaactaaaatgatattttgactccaaccaaaataaatatctaattttgtgagaaaagaatcttcttttgcaaatg

SEQ ID NO: 29175 - DNA, 3000 bp, Unknown; identical to SEQ ID NO: 29173
  misc_feature (1)..( 3000): 2750-1469P.txt file - cDNA_ID_3000036; gDNA_ID_2926153; Annot_ID_139388

SEQ ID NO: 29176 - DNA, 3000 bp, Unknown; identical to SEQ ID NO: 29174
  misc_feature (1)..( 3000): 2750-1469P.txt file - cDNA_ID_3000036; gDNA_ID_2926153; Annot_ID_198205

SEQ ID NO: 29177 - DNA, 3000 bp, Unknown; identical to SEQ ID NO: 4617
  misc_feature (1)..( 3000): 2750-1469P.txt file - cDNA_ID_3000039; gDNA_ID_1620718; Annot_ID_49145

SEQ ID NO: 29178 - DNA, 3000 bp, Unknown; identical to SEQ ID NO: 4617
  misc_feature (1)..( 3000): 2750-1469P.txt file - cDNA_ID_3000039; gDNA_ID_1620718; Annot_ID_165710

SEQ ID NO: 29179 - DNA, 3000 bp, Unknown; identical to SEQ ID NO: 4617
  misc_feature (1)..( 3000): 2750-1469P.txt file - cDNA_ID_3000039; gDNA_ID_2926153; Annot_ID_139410

SEQ ID NO: 29180 - DNA, 3000 bp, Unknown; identical to SEQ ID NO: 4617
  misc_feature (1)..( 3000): 2750-1469P.txt file - cDNA_ID_3000039; gDNA_ID_2926153; Annot_ID_198228

SEQ ID NO: 29181 - DNA, 3003 bp, Unknown
  misc_feature (1)..( 3003): 2750-1469P.txt file - cDNA_ID_3000046; gDNA_ID_1971867; Annot_ID_58440
atgttatatgtttggatttctaaacaacaatgacctcctctgaacacacttctttttagtgaaataacccccaaaaacgaaaataaaaattgttagtgagttggttcactatttggtgtggtacacttggacatatgtatagatgacaaccatctgtcattatttctctactttagaagtttaattctctcacgtcacttctttattaactctttattccttctagaattttggaccattactttcaagttcccatgttttgatacacaaacgaaccattcgattcttttcttgcgtttgctagttttattttgatacttttgtttcaggaggactaagagtgaggtttagtatcgaaaacatggttacatgttattatcttgatgatcttattttgttatgatcaaaaaatttaaacctaattgagtgcatgtgcaaaattaaagacgacaaagttaatgaagcatcaaattctgattggcgatacacattagactatatcaaatggtcgaggactatatatcaagcttgcatctggttgcaacttgacttattattggctacggttccattattatgttttagggagagagtgaaccaacgttgattacgttcaggggggaaacgtaagcagacattgagacaactatctgtacgacctaagagtgatcgagtcgtataaagctcaggtgaaacaagactaaaactaaaccgataaccattggatctcattaattcacagtaaaccaaattgtacccaattaaaccggaaatagatagtaccatacggagaacattttctttttttgagagagtagtgagtgtcacaataattgacagatgacgaaaagaaaaccagagcggaatctacgagctgaaacacaagaactcactgttaagactcagtttcaagtaaaagtttctacaaagttcgaatgttttcaacatcgagtgaagtaaaccagatttcactgaaaaccttatcgtgtttctctctacttcacgagttttcttaatacagattctgcgcgctgctcaaatcgaggtagtgcccattcgtgctggattatgtctaaaccatccttctctgcacccagactctgatcaattttgcaaggcaacgataccaaatcaggtatggccacggagcgaacaaaacaacaacacttagcaatcatatattcatatatagtttgattacctttgatgcatcaaatccaaacccacccatttgcatcatacgttgtgtgtcatcaatggctgcatacgaagcaaaagtaaaagattatgaccacagtttagtttttgaggaatgtggagcaaattcgtatgtgacagctaaccattttcatctccgagaatgagactgaacaagcctcttaatccaaacaagttcaagaagtacctgaagagcgaaagaaaaactcataaaaaaaaaaaagagaaagggcaaatatccagaagcaaatatgattagcatactgaaaatctgaagaggaccggataacacaaagtcctttgtgtaatttgagtacttaccaggaacgactactcacatagctaacatcgacagtgctcaagtcaatgccattctgtaacattgatctgaacctctgagtcagtggaaatggtattttggctgcaagataaacaaagaagccttagatgctatggaattataaaaaaattagagtatcatggaaacaattaactggtttctcagatgaaagcagtgaaacagccagttataaaatcaaatacatgattgctgtttatgaagtaaccaagaaaaataattgcaaaacactttgtttaggaaataaacctgcaacaaatccagagaagaagaagttgacccatgcaaaagtgagtgtctgcaaaatggtaagtgatatcagtttcttaaatgaccagtaacgcaaaaacatagatgaaacatttcaaatacaactcacctgaggaataatcatagaaagatttttcttcatcatatccatggccatgttaggatcagaaaacatagcagcttgtggattttgagcttctcccttgggaacatgtagcaaaccattctcctacaacaaacaaaaccacatacttctcacattccatatccatcaatacactcatcagaaactattgaacagattacttcctctagcaaaacaaagagacaatataagaaagacgatcacaaatgaatgctaagtaaaaaggtcaaagatcaacaacaaactcaagctttcaatggaatccacacaatgaatctcttaaaatcagaaaaccagatcaagaccaaatgtcaaatcttagaaaactcattacctcgttgctgaagtagaatctccgagcacggaatgatttcggcgggataaaattagcaccgactttaagattccgagctctaataacaacttgcctatcaaacaaatcaaatcgaaatcgaatcagctaaacaaaaactcatagatacagacttaaaatctacgcatagagaatacaatccagagaaggaggaagaagactcacccttctttaaccatcttagcatcaggagttggagtagaacgcataagcttagagacaaagtatctcaaaataccgattagaaccatcactacggagagaggaatcagaacccaatctctgatcgccgtatcgagaactagatcctccgccattctaaaccctaattatctctctttctcgtcttcttcgtcttcgatcttctctggtgaagcaaacaaaacacgatctgagattctgagagaagagctgagaatccgataatttagtggaaattattttattttttttatttaaaaaatatctgaaaccttctgagtcagagagaggctttgatgtgttccctttataaaaccctaattcgtttgtctattaaacccaaactaaaaccctagctaccttgttctcctcaccgcttctttcttccctgaactcagaacttagaacaaagaactctcgtagacgaagaagaagatg

SEQ ID NO: 29182 - DNA, 3003 bp, Unknown; identical to SEQ ID NO: 29181
  misc_feature (1)..( 3003): 2750-1469P.txt file - cDNA_ID_3000046; gDNA_ID_1971867; Annot_ID_176506

SEQ ID NO: 29183 - DNA, 3003 bp, Unknown; identical to SEQ ID NO: 29181
  misc_feature (1)..( 3003): 2750-1469P.txt file - cDNA_ID_3000046; gDNA_ID_2926155; Annot_ID_139487

SEQ ID NO: 29184 - DNA, 3003 bp, Unknown; identical to SEQ ID NO: 29181
  misc_feature (1)..( 3003): 2750-1469P.txt file - cDNA_ID_3000046; gDNA_ID_2926155; Annot_ID_198354

SEQ ID NO: 29185 - DNA, 3003 bp, Unknown
  misc_feature (1)..( 3003): 2750-1469P.txt file - cDNA_ID_3000049; gDNA_ID_1620711; Annot_ID_48992
ttcggtaatcttcttacgtttctctgtacttactggagataaaaaaaatcgaaaattctcatcttttaagtcaattttgttactttctttcgaaagtttggtgattgttttgatgtgataacgcaggacgacgttgatgaagaaaacccgaaaactcacgagaatggtccaattggaggaaagactcaaaatttagggcaaagcaagggaggtgatagtgataatgttgtaaagactaatacttgtttcgtgtgtgatgggaaagacaattgggttttggtatgttacggagaggaatgtactatagctattcatcagagttgtgcatctgatgaacctgatttcgatgaatttggaaatttctattgtccttattgttggtataagcgtgtagttgtcaagtgtttggagttagggaagaagcttatgctgactgacaagtctaggaagggatgtagagagagtttaggaggagtagatgtgggtttaatgatggagaaagaagctggaggtgttgagaatgtagtggaggttaatgtttctggagcaagtggtatggttagtgggaagagaagggaaggtgatggattaaacaataaatggatagtgatcgagaagagtcagaaaatgcaaaaagttgctgctgaaactcattctcgggaaaattctaaggctgatgatattgattcggataagggaagaaagcagcgaggaagatttaatgagaagaattatgaaatttcatatgcgtgcatttctaatgcaggtgagggaagaaagggaagggtaagaagaggtaatgagaaaaatcatcaagcaccagaagcgcacagtattgatgttggtggggaaagaaagcgacagagaagatgcgatgatataaaccatgaaaaagcacaaccgcacagttttgctgttggtatcaaaacaaaagagaagaggagatacagtgagaagaaccagcaaaacaaaacagttgcaactactcatgaacacgacgtcttaactaatgatggaagaacagaagcccgcgattctgatttcggtgagggaagaagtgggcaaggatgtttccatgagaataaccagcaaacgaaagtgtcgtctactgaaagatgcgagcaggaaatccctaggaccaataaaagagtgtcactcggttctggattaggggaggggcgatatcgggagggaagacatattgaaaagaatcagcataccgaaactgttaaaactgaaactcatgggaaggaagtttctaaggataggaagagaaagcgggaaagaggagtggaaagagatggggatgagttctatttggcggagaatcaagacagacaatgccaagctgatatgagaaatgatgatgtggccttcaataagcaagcgactggtttcagcacagttgaacaagtagagcgaaagtctgtatcatctatttcatctccggagtctacaaacaatgttaacgaccctaatgttgcttttcaagagttagctttgatcatccaccctaaggctggtgtacaagaacaacctatcgaagcacgacctttacgctctgtctcttcgaagaaaccatcttttcaacctgaaaaatacggacacaaaagttacctggagaagaatggacctgcgtctaatgatcccgcacaaaggtttctattcatttggaacttcgtgacatttaaattgcctttagcataatggatgtttttgaggaagattcctaagcagcttgtcacgggctttaagctaacaatttttcttccatgtagtgctacaaaaaggaaaagacgattttggacgctggcagaagtagagatgcttagggtatgtaacttgcacatttctctctatcctacgtatatttcatgctgcagttatcttggtttttcgtaatttggagcttacacattcaacggctctttttaaaggtttatgcctgttttagtttatcagctttataaaaacagccagggtagctggtcttatcatctcctaagaggcggtatttcattttcagtcgtaatgcaattgttttgtagactagacttcataaataagagcttatcctccaaatcattgtgaaattatatctgagatatataacattgtttgtggctgtccaaattaaatattttgctatgtagtgcacaatggtgataaatgtggatttgtctaacttcgtcctgtcctttaggttggtgtgcagaaattccctggcgagaggaatattccatggcgcaaaatcttgcaatttggtcgggatgtgtttcatgatgaacgggctccaagcgacctcaaggacaagtggaagacgttaaacaaaattccttctgacacggggaaatgggtaagcctttcaactgaaagacaaccgaattactatgtgtctgaagttagttctgaatgacctatcggacttagcaagcattagagcttagaagagtagtagatagggctttgcagattttgtacaaccttgcttgctcctagtttgctaaatgtatatggagcaaaactgatcttaccttttaacactaaattcaaaaaaaaaaaaaaaaaattgatcttacctttctaatttgtatgtcctcggcaatgtagagaattcacaagagtgagatgatatttcatgacacttgaacacaagtttatactaaaaatcatgaaccaatgttgtacttcaatatctattaaacttttacatgtcttttgatatggatttctctgcaattgtaagacaaagaagaaaacagtaaggtcaattttacacttcgtgtaaacaaacttttttctaagtttttaatgaattaaaaaatagatgttttagacagaaaatgatgagggtagaattcccgccagtgcgtgggttcaactataaatcctttaaccgccacgtgtcctagaagagtgccacgtacagccactatcctccactttcggcttatttctgtcggtttattctctgctcactgagtggcaagaaaaaaagaaatg

SEQ ID NO: 29186 - DNA, 3003 bp, Unknown; identical to SEQ ID NO: 29185
  misc_feature (1)..( 3003): 2750-1469P.txt file - cDNA_ID_3000049; gDNA_ID_2926155; Annot_ID_139494

SEQ ID NO: 29187 - DNA, 3003 bp, Unknown
  misc_feature (1)..( 3003): 2750-1469P.txt file - cDNA_ID_3000053; gDNA_ID_1620711; Annot_ID_48996
atttaaactgtttaacagacaaagaccaagaataccaaacttcaaaacgaaaatgccgaatcaatgtgacgagacagcgtaaaaagcatgaggaagggttctgatatacacatgacccataaccaaaagtatgtacaaaagggaaagaaaaattcagccttcaaaacttagcaaatggtttttcttccaactccggagaggtaagactagacctaaacccggctctaattcttgaatttttccagatcagaacctgaaacactacaaatctcgtaatgcaaccttcttgcttctacgatatcaataatattaccactacgatcgttagctattcgatttggaagagatatcaggaatagatgcacaagacgcagccttgtgctggatgcttttcatgctcagctccatgcttctatgaaccatgtcctgcagcagtttcttagccgtttcagcagctttttctgccccgtcgacttgtactgcaatgccatagacaattttctctagtgttaatggagtcatttctttctcacgaggggtttctctcagtaggtccaagagaactctggctctatctcgggactttgatgttccatctactgttgaacttaggagacccgggattgcaccttctttcagtatgagttttcggtacttatctcggtcgctgcggcatagagaaagcagagctccaactgcgtgttctatgctgagtggagaaccatcctctacagtctctactaaagtcagaataccatcttcacagctggtgatggcatttcgcccgtcctcagagtgagacaggatcatctcaaccaaggctgtggctttttcagcaaacttggaatgttttttgcattctttaaggaggtggatgagcgggtagacagctttagcatcaagaattggagcagagtactctttgcaagctgataaattatgaagggctgtgacagcatctactttcccttgtacagttccggagctaagcatctgaatcagaagcggtggaactccagaacttataatcatcgccttgttggctggtgcagctgaaagtgttagaattgctgcagtggccaattcacgcaaactagcattgtggagcttcagaatctgtatgagaggtggaacggcaccggctttcacaatctcaatcttattcctggtcagaaatcacaacccaaaataagtaatgaccaccacaagaactgaaaatgcaaatctatttccacacagattacaaaggatctgtagaaaatactgctggagcaagtaggtaaattacatcctacatttgctatctttatccaaatagcagtaaactacaggtaaagctagacctagagcaatcagatcagtgtccaaaaagcagtatcctcttggtttcaacagatctaaagtccaaaatgtagctactctcagtacattctgatgcctgattgatagagttaaacaattgccttaacactaaaactacaaatccagaacaatgtcataaatcaagctctgagcagagattagtgaagtcactaatcctaaacactgcctaaagcctcagatcgagttaaattagacctagaagacaagacgagagaatcagtttctggtacatggcaataaaacctagaacaatccaagagagattaccgttcatttctaacggcgaggttaaggagagcgaggagagaggcgtgacgagcatcaacgttagaggagaagagcatgggaacaagcggcgggataacgccggcgtcggcgagttttgacctagcggaagacttaaccggagactttctaagcagctttcggatttccttagcggcttcaattcggaaatcgagatctccatggagaagcttcttggagagatgtagaatcagtaattcctttgtggttttccatgtgttggtggtggtttcctcctctgcttcgtcttcttccgatatatttgccgtcaccgttgagtcgccggcgatggaagccatcatctgattctggttctcttccaccaccattatctctgtctctctcgctcgcttgctcgctcttgtgtttgtttctctctagtcaaagacgaaacgacgacttatcgaatcatctacttaattaaaacgaaagttatggtattagttgaaagagcccatatttctcgaggttagttagttcacaatttaccaaccgggacatttcaatattttaactttttcaattttatgcaaggaaagaatataagaaagaattagctagaaaaattattttcaaaattaacaacaaatcccgaatatttatataactatttaaaagtataattaggttgttcgtttgatcgccgcatctatttgcgacagcagcaaccatgatgatattcgtttggtggacgcaagacgatgtggtcaaacgttaaggcaaacgcaagtagctgcggttaaaaattgttgacatcattttacttcaacaatatgcggtagagtttgctgctgccgttaggcgtaatgaaacaaatagactaacacaaagaataaacgactacaatttataatttttcatttataaaataaaataaaaattggaatatattgtgcggaattcctatatatcagaactcattgatctgctgcttcttctgaaagttcttaagtggttccacgatgtttccattttgttctgacttccgaggccaacgagatgagtccaataaacaaagggcacggaaacattctttttaaattaggtttgtttttttatttttggtttttggtttttcccggaaattgtatgaagtcttcgttacagtttctctctctcaccttctctgtataaagtcttcttgagatcgaaggataacttcaattcaattctctccaaggtacacacaggtacagttttctccttcattctctcttgtttgagatttctgaagatgggtttgttaaaaaagtgtacttttttttgttctctctcgtgtagctgatttttgtgataagaagattgattgagatg

SEQ ID NO: 29188 - DNA, 3003 bp, Unknown; identical to SEQ ID NO: 29187
  misc_feature (1)..( 3003): 2750-1469P.txt file - cDNA_ID_3000053; gDNA_ID_1620711; Annot_ID_165415

SEQ ID NO: 29189 - DNA, 3003 bp, Unknown; identical to SEQ ID NO: 29187
  misc_feature (1)..( 3003): 2750-1469P.txt file - cDNA_ID_3000053; gDNA_ID_2926155; Annot_ID_139498

SEQ ID NO: 29190 - DNA, 3003 bp, Unknown; identical to SEQ ID NO: 29187
  misc_feature (1)..( 3003): 2750-1469P.txt file - cDNA_ID_3000053; gDNA_ID_2926155; Annot_ID_198365

SEQ ID NO: 29191 - DNA, 3003 bp, Unknown
  misc_feature (1)..( 3003): 2750-1469P.txt file - cDNA_ID_3000057; gDNA_ID_1971822; Annot_ID_58341
gttagcaatgttattaaacccgacccgcataatgaaccagactactttctgggtcattaggtcatcgggttaactaattaaaattatatatatgaaagttggtcaactctttccatatgagtgacacatcatcacactagtgaatgtcatatgtcattctaaattaatattattaaaaaagaataaaacttagtgataaaaaattaaaagtttcacattgcattgaatcatccattaataatctcacacttaactatcttcatttaaaagaaaaaaatacaaaaaaatcattttaatgtatcaaacactactttcattttatttttcttattatgctatttttttaatagtcattacttgataacgactagaaattttcgtgtattacaacttagttgtttgttacttaacctttttaagtttagtaattttaacttagtcttttttttattacgctttttgtctacatgatatggttttttgtgcattacgataaattggtaacattaataattaataatgacatgcatgttttttaagtaatgatcttttgagacgttagatataccaacaagttaaatatatgatactctcgcgtgggtactcacctactttatttaataaatttaatattaatagagattttacagtttttagagttcttacaaattaaaaataatcatatcctgttgaaccggttgaaccagccgggtgtgggttttaaaatattctctttattttggaataaaatatgggattttagactttattcaatcattttagaaacaatttcagttcgtaaactcatttgatgttttagattgtgatgaagacttcacaatgtcgccttaaaaaatgaatcgaatggtgagtgagacacctgatattagttgtgtgaattcacgatgttttattagtttatttccgtcattggtgatctcctactatatttgttacggtattagacatttaattggatttaaacaatttaatcacttacggtatttacggtattagaattattattgtttgattatatatatatatatatatattttttttttggtgtaaatgattttatattttatcaaacataatctggttttatattttataaacatgatatgattattttaaatttataaaaactctaaaaactctaaaatctctattaatattaaatttattaaataaattttaattagttgacccgtgatccaacctggttgactcgattacccagtgacaaagaaagtagtccggttcattatccaggtcgggtttaaaaacattggtttttaatttttggattttggttttaggttttcgatttttgtagtttgtgatttttgttgtagattttaatttttacagaatcttaaatggaaatttatttagtttttagttctctactttaatttatagttttttattttttgtttaaaaattactaaaacaatgaaaaattgtttaaaaatcttgaatggaaattcgttaaaggtggattgtcaaagtcaatccataactgaaattagcaattttagggtaaattagcaattttctgcgagggtagtagctgtttacccaaaatcttgaatggaaatttgtttcaacgtttttaagttctctattttattatagttttttattttctgtttaaaaattactaaaacaatgataataaatattttcttaataataaaaaattaaaaagatgcagaaaaaaaataatcataggtatattgcatataaacatagattttgtaaataaaaccaatttttacgaaaaactaaaatgaaaaactcatattaatacaataatactaaaataatgatgtagaaaagaaaaaacatagcatatttaaaataataaaaaagaattaaaaaataaatatcacataaatcttctagaaatttggtttccttatgttttagaaaatctactttttattaatcataaatgagtaattattagtttttgatttaatctacgtttttcttaatcataaatgggtaattattagtttttgcaaaatcaaaatccaaaaattgttctaaacactgcaaccatttaaggcctatatcactcagaaaatttctggtgggagaactaatcgtttgtcctttctaaatctcacatattagaatttagaattagtgtgctacataaaaatattagttcagctcggaacaactattttttggtaaaacagagaacttaaacaaatgcattattttatcaacatgcattttgaattgaatataaaatttcataattgtaaagacataaattacataaaattttacatgaaaaaatagatatagaaagaaaatgaaactaactgatgatatgctctctaaattttttaatctcataacaagaattcaaattaattagttcatatttttggttaatataacatttacctgtctaagttggaactttcattttttttctgttttgtttagtcagtattcttaatgtgaaacggaaagttgaatttattcaaacttaaattcaatagcattaattaaaggcgaaagctattatctctacatgtggttcaaactagacatccaatttaattagcttattgacgttgaaatgttttccaaaactactatagtttggcaatttgaaagatgcatcagaactactcagacaggtaaaagtagaacctctagctgtgtgaattgtatgttagtccataaagaacatcttgtaaacttcatacttaagatatatattacaatatatacttgaatggtagataaaaacgattagtctgattgctagcatactcacaactatttggaaatgagtaagatattggcatctagagttactactatggagacaaaagtcgaataaaagagacctcacgtgaaaatgttacgagctagtaactaaagcatttacactaacggtaaaaaaagtatctataaatgtttacacaaggtagtagtcattagcactcaacttaaactcttttagtaacaatg

SEQ ID NO: 29192 - DNA, 3003 bp, Unknown; identical to SEQ ID NO: 29191
  misc_feature (1)..( 3003): 2750-1469P.txt file - cDNA_ID_3000057; gDNA_ID_1971822; Annot_ID_176210

SEQ ID NO: 29193 - DNA, 3003 bp, Unknown; identical to SEQ ID NO: 29191
  misc_feature (1)..( 3003): 2750-1469P.txt file - cDNA_ID_3000057; gDNA_ID_2926156; Annot_ID_139522

SEQ ID NO: 29194 - DNA, 3003 bp, Unknown; identical to SEQ ID NO: 29191
  misc_feature (1)..( 3003): 2750-1469P.txt file - cDNA_ID_3000057; gDNA_ID_2926156; Annot_ID_198418

SEQ ID NO: 29195 - DNA, 3003 bp, Unknown
  misc_feature (1)..( 3003): 2750-1469P.txt file - cDNA_ID_3000059; gDNA_ID_1971822; Annot_ID_58350
aattatattatattatctcccatttatagaccagccgccgaaacgaagaaagcagcatagaagaaagcgagtacataaccaagaaccatgtttgatgagaggagtctactacaaaaacatgaaatggcaagccgccattaaagtcgagaagaaacaaatccacttaggcactttctcttctcaagaagaggctgctcgcttatacgataggtaaaactctttcgggttttttttttgcaattcaagtaattcattaccattgacaattatcacctctattagggctgctttcatgtgtgggagggaaccgaactttgagctctcggaagaagttatacgagaactcaaacagcaaagctgggaagagttcttgaattgcacacgccgaacaattacgaacaaaagtaaggttttactaacaacaaactgtagtgtattttgtttgataaccttttgctggactctttggatatgcagaaccaaagagtaggatagaacatgaggatacgaagatcaatgccagcatgccacatcaaccagaagaagaagagcaagattcagacaaaatgtgataagttgtgcaaaagatacaaccagactcatatacaaagataattattattcatcaagaaaatagtaacatatataaagcatagtcgtaaaaaacaaatagcatcactcatagtaagagacaaattagagactcgccattaagaccaaatggttatgtgacaccttcttgacacaaaaaaaaaaaaggttatgtgacacctttttaatggctgaggagatggccagcagaaacggttaaactggctatcgaggaggtacggaaaaatgttttgagttttaagaatcttttaagaaatccgtaccacacttttcctaacataactagttcaatttttgagatcaaatcacttttgtgtatcatgatttaaaactctgaagttctctagaacacatggataattctttacatcatatggaaccaaattcatatatggacgcttcacgtcctctacggttctcatgtgcttgaccatctttgtgatatattcggtgcccgagcaagctacttggttagccaatggttcttttgagtcaactttttattattgtgactcatactatcttctcctgacttctgctcttaattctctatagaaaagttctctgatagataacaagtaattcaaacaaatagatatagaaccatctcgtaaaaacaaaaacattagtatatgaaaattatgttttcttattattttaaacattgaaaaatacaaaaacatatcaaatgagctatttattagaagaaaaaaaaacaatttgactaaagagttagttcttatggcttatgtaggaggtcataagcacattatgaacgccagaacgtacaggcaatgccgcacgtccatccattcgaaaatatatatgatctactctagcaatatacacacgtagttgaccacattgaatataatttggaattgtaggatagtttaaaaacttttggaacatatgcttcaacctcgttataaaacttcatgttaatctcttgcctaaaaagacatttccaaatcgatcgcttggttccgacttccgtcatccttaaatttaatgatttttgtacctttggcgtttaaatattggactcctaaattttggttctctgagcggcaatgatattggagaattctactagaaccgaaattgttcttaatcacaatctcagttttcttgcaagcatcatttaccacaaaataaatcgcactaactaatatgaaaattattagacgactcatttgtttgaatctaaagtaattgtcagagaaacaagagcatcaacatgtaatagtttttttttctgtgtgtggaaacctttttctttatttagcaaataatgtttgctgaagtgttaactatatttagagacaaacatgcatgaacatattagaaatttggtcaaaagagattttagtgtctaaatttatgtttaaccaataagattccaaccaaatgaaataacctaagttattataattgaccttgaaactcaaacaaaaaccttatcaaaaggttattggcaaaatgttgaagtatatcataaatgtgtagtaaatttgaaaactaaaattggaaaaaaaaaattatgcgataggcatgaataaaaatcagcttcacaaccaataagcaaacatcgagattttgaagaaccagttagggagagcaaatagagcttaggtggaggcaattgatctaggaagtatgtgggcttatactatgacataaaatcaaaggagctatcaaaaaaacccctcctccaattgtcttcatacttaaaaagagactcatacaaaatgagactaacatagtttctaatgagtttgtgtacatttgggtgtgtttagttttgtcgttgttgattctgttagtgtttagcgtatgatccattttagaaaagtttttttaggtaaaactcttaataaattatttaaaaaatatgctaccccgagacaactattgtttcttacaatttaattgtgtttggtgtttggatacatagatataaattaatgatattttttgtaaatatttactaaaataaaagctattatctaaaatgaaattcaaaataaataattaataaataaaataataattagtaacctcaaataattgttttgtcgtattgagtcaatctataacatggaagtcataaaggagcggcgagtgaagaggagaggtcacgtgagaaaaaccgaaacataaagctttcttattcaccacacatgcctcctttaaccctttgccaattggccaataacaatcaatggcaatctcgtaaattttccaattttcaatttccactgtcctcggtctcatcgtcgttgacaaatacgaacaccaatccttgattctctcctataaacacaaaaaccctttgattctaatataaccataacccatctctcaattttcgaaatttactcagaaatg

SEQ ID NO: 29196 - DNA, 3003 bp, Unknown; identical to SEQ ID NO: 29195
  misc_feature (1)..( 3003): 2750-1469P.txt file - cDNA_ID_3000059; gDNA_ID_1971822; Annot_ID_176225

SEQ ID NO: 29197 - DNA, 3003 bp, Unknown; identical to SEQ ID NO: 29195
  misc_feature (1)..( 3003): 2750-1469P.txt file - cDNA_ID_3000059; gDNA_ID_2926156; Annot_ID_139531

SEQ ID NO: 29198 - DNA, 3003 bp, Unknown; identical to SEQ ID NO: 29195
  misc_feature (1)..( 3003): 2750-1469P.txt file - cDNA_ID_3000059; gDNA_ID_2926156; Annot_ID_198428

SEQ ID NO: 29199 - DNA, 3000 bp, Unknown; identical to SEQ ID NO: 4847
  misc_feature (1)..( 3000): 2750-1469P.txt file - cDNA_ID_3000065; gDNA_ID_1620736; Annot_ID_49486

SEQ ID NO: 29200 - DNA, 3000 bp, Unknown; identical to SEQ ID NO: 4847
  misc_feature (1)..( 3000): 2750-1469P.txt file - cDNA_ID_3000065; gDNA_ID_2926157; Annot_ID_139560

SEQ ID NO: 29201 - DNA, 3003 bp, Unknown
  misc_feature (1)..( 3003): 2750-1469P.txt file - cDNA_ID_3000073; gDNA_ID_2926161; Annot_ID_139703
aaaacgttacgatagcaaacaaatgttatatgataattcagattgtatctcagtctacaagtattttgtagcgagaatgcaaaatctgaattctgttttaaaagtgaaattcttaaggaacttttttaggaagaacacatcaaatcaccaactaacgatgtgagcatgccaattatcacgactgtgcattcaggatcttgattgattaacgtttcttgcctttatttttaacaagtttcccttgcagaccttgttaaatgttttgtattcatattttcttttattctcgaaagcattaatcacatacatataccacaaagaaaagctacatgaaaagtaactaaaattgaattcaagatacttagggaaatgtttgtgttagggattaagcgaaaatgtgtttattcgtctagtcattctaatttttgtacttgcaccgtgtatacatgttattgaacaaaaaagctggacaaggcccacaactttatttgttgggttaatatgtaaacttatatggtctttggtataagtcgataccttcgcattaatatgtaaacttatatggtctttggtataagtcgataccttcgcattttcatcacttgaaggtgtgatttagtcataaaagcttaaccttgatttgcagaaaagtgatcacatacacttgaatctagcgacaagtaaacgaacaacttttggtcacggtcgctgatttatgtcgctatcgacatgtaaacaaacaggaccaaagtcatgacatcaccatttgtcgttaattttgtttgttcctcttttttttattattttttttttgaatatctgacagttcaagttcgaatgtcctatattttttagagatgagatctacatgaagttaaattcatgtcatttagagaaaaaatcccttccaacaggcgtcgaacccatcagctctatctcaaagatttactactggaccaataccacgttggttttgcttcttcctcttctcgtgagattcttctacttcaatgcttctgattcttctatgttcttaatctttcaacaaatacagtagtacctttaggatctgcccagaaggctgcggtatctttgatctcccttaccaggccccaatcttctcaaatcccatagcagtaaaacaattaagaatcgttggacttaggcttatctcagagattttaatgtaatgggttatagattacgaccggctttagattccgaggcatggccgacagtttagattcgtaatgatttagatatagtgcagccattgtgcttgagctacgtacatacgtccatgtcaacgatccactagctagtcttctaattaaattatttgtttttctttagtattacttttattttgttggtcactgagtcattagactattttgtattagtcacagtaatgacacacttctctttgatctttgggcaaaaccctactaagaaaattactagggttaaaactagatatggtgtatgaaagcattttttactttcaccgatttctccaaattcaggtattgttaattttagtgtagtgttcatagaaatattttttctcataagaaatgaaaccgatttagagtaaaaagtaattaagcatatcaaacaacttctaacagacgcagaatttaaaatatagcatttttgcgattcctagttccgtttttttttcactttttctaacaggttagttggatcttcacgtttgcgtgttgcaaactaaaatttgactatcctgttcaggacaaaatttgtctcttatatctagtagaatgtcacttgtaaaacttcaatatcgtcgcgagcatattagctaatagatctttgtagagttgttattttttgcccttttttgtttcgctaaaatcaatgtatgagttgttgtgcgttgtatatatatgcatgtccttgtcaatacatgacaaataaattggacattcatcatttatacttttttttccaacagattcatacgtattatatttgtgtaacttttgtatagtttggtctagttgtagacacgtcggtatcaattaactcattaaaacaacatatgaatatgaaaaagaaaaaaaaatataaacttgtcgtagtagaattttcaacctttatagatatcttttgatcacatttttaatatctctttccatgtaaaataaaagttcgacttaaaccaaacaaagaaaaaatgaagcttgacaagcaatatataacatggtattttaagatggtttacaaaaaaaaaaaaaattaacatattttagagtaaattatttggtgttctaaaaaaagagagagtaaattcttatgtaataaaataactcgtgaatgggacatatatattataatgatatataacagaatttgtctgttaaattatggtttagtttcataaattaaggcatatgaaattatggtttagtttcacaaataattaagagacactatatattgtattaagtttttatataagtttctcttttttacaaggttcatttttttcataatggcatttggttcaattttcgctttaaaatgttattttatatatatatctatatctatatatatatatatacagaaaaactttgataaaccaacttttattcaaatttatctttttttttctgatggaaagtataacttactcacctttttagtttcttatttaaactactaaatttaaatccggatttaaagattcctttgaaaatgatctaccaccagtaaattaaaatatattcgacataattttaacactagtgataaaaatttactacatatgttgatattatacttaggttaaaaaaaagaaagatatcctatgtggcaaccacctacaaactttattataaatataagtagatggcaaggcgtgtggttgccaaacacaaagaaaaacattcgacattacagaaaagaaaaaactataagaaaatcttaattaataaaataatatattcaggagggcgagagagagagagagggatg

SEQ ID NO: 29202 - DNA, 3003 bp, Unknown
  misc_feature (1)..( 3003): 2750-1469P.txt file - cDNA_ID_3000073; gDNA_ID_2926161; Annot_ID_198749
acgttacgatagcaaacaaatgttatatgataattcagattgtatctcagtctacaagtattttgtagcgagaatgcaaaatctgaattctgttttaaaagtgaaattcttaaggaacttttttaggaagaacacatcaaatcaccaactaacgatgtgagcatgccaattatcacgactgtgcattcaggatcttgattgattaacgtttcttgcctttatttttaacaagtttcccttgcagaccttgttaaatgttttgtattcatattttcttttattctcgaaagcattaatcacatacatataccacaaagaaaagctacatgaaaagtaactaaaattgaattcaagatacttagggaaatgtttgtgttagggattaagcgaaaatgtgtttattcgtctagtcattctaatttttgtacttgcaccgtgtatacatgttattgaacaaaaaagctggacaaggcccacaactttatttgttgggttaatatgtaaacttatatggtctttggtataagtcgataccttcgcattaatatgtaaacttatatggtctttggtataagtcgataccttcgcattttcatcacttgaaggtgtgatttagtcataaaagcttaaccttgatttgcagaaaagtgatcacatacacttgaatctagcgacaagtaaacgaacaacttttggtcacggtcgctgatttatgtcgctatcgacatgtaaacaaacaggaccaaagtcatgacatcaccatttgtcgttaattttgtttgttcctcttttttttattattttttttttgaatatctgacagttcaagttcgaatgtcctatattttttagagatgagatctacatgaagttaaattcatgtcatttagagaaaaaatcccttccaacaggcgtcgaacccatcagctctatctcaaagatttactactggaccaataccacgttggttttgcttcttcctcttctcgtgagattcttctacttcaatgcttctgattcttctatgttcttaatctttcaacaaatacagtagtacctttaggatctgcccagaaggctgcggtatctttgatctcccttaccaggccccaatcttctcaaatcccatagcagtaaaacaattaagaatcgttggacttaggcttatctcagagattttaatgtaatgggttatagattacgaccggctttagattccgaggcatggccgacagtttagattcgtaatgatttagatatagtgcagccattgtgcttgagctacgtacatacgtccatgtcaacgatccactagctagtcttctaattaaattatttgtttttctttagtattacttttattttgttggtcactgagtcattagactattttgtattagtcacagtaatgacacacttctctttgatctttgggcaaaaccctactaagaaaattactagggttaaaactagatatggtgtatgaaagcattttttactttcaccgatttctccaaattcaggtattgttaattttagtgtagtgttcatagaaatattttttctcataagaaatgaaaccgatttagagtaaaaagtaattaagcatatcaaacaacttctaacagacgcagaatttaaaatatagcatttttgcgattcctagttccgtttttttttcactttttctaacaggttagttggatcttcacgtttgcgtgttgcaaactaaaatttgactatcctgttcaggacaaaatttgtctcttatatctagtagaatgtcacttgtaaaacttcaatatcgtcgcgagcatattagctaatagatctttgtagagttgttattttttgcccttttttgtttcgctaaaatcaatgtatgagttgttgtgcgttgtatatatatgcatgtccttgtcaatacatgacaaataaattggacattcatcatttatacttttttttccaacagattcatacgtattatatttgtgtaacttttgtatagtttggtctagttgtagacacgtcggtatcaattaactcattaaaacaacatatgaatatgaaaaagaaaaaaaaatataaacttgtcgtagtagaattttcaacctttatagatatcttttgatcacatttttaatatctctttccatgtaaaataaaagttcgacttaaaccaaacaaagaaaaaatgaagcttgacaagcaatatataacatggtattttaagatggtttacaaaaaaaaaaaaaattaacatattttagagtaaattatttggtgttctaaaaaaagagagagtaaattcttatgtaataaaataactcgtgaatgggacatatatattataatgatatataacagaatttgtctgttaaattatggtttagtttcataaattaaggcatatgaaattatggtttagtttcacaaataattaagagacactatatattgtattaagtttttatataagtttctcttttttacaaggttcatttttttcataatggcatttggttcaattttcgctttaaaatgttattttatatatatatctatatctatatatatatatatacagaaaaactttgataaaccaacttttattcaaatttatctttttttttctgatggaaagtataacttactcacctttttagtttcttatttaaactactaaatttaaatccggatttaaagattcctttgaaaatgatctaccaccagtaaattaaaatatattcgacataattttaacactagtgataaaaatttactacatatgttgatattatacttaggttaaaaaaaagaaagatatcctatgtggcaaccacctacaaactttattataaatataagtagatggcaaggcgtgtggttgccaaacacaaagaaaaacattcgacattacagaaaagaaaaaactataagaaaatcttaattaataaaataatatattcaggagggcgagagagagagagagggatgatg

SEQ ID NO: 29203 - DNA, 3000 bp, Unknown
  misc_feature (1)..( 3000): 2750-1469P.txt file - cDNA_ID_3000085; gDNA_ID_2926161; Annot_ID_139716
aacaaggagcttgtgatgttggtaatggtgttggtttgtctgttcctggacaagctctgcttttgatacacattgtctggatgatgcttcttgggttttctattctctttgggctcttttgattttggttctaatttctctgaatcaaaacaacatatagaagattgtttaggttttcagattgcaaatgacgaatcttttttgtttatactcttctttttttctttatattgctctgtattcatattacattaaaactatgaggaaatattattattatttggtttgtttcgtacaaaagaagcttttttgaatcttgctttctccatctctttcccaagataatccaggattgtatctgttacgtggttaggtaaacaacctgcatctaacattgctttcaagtacttgtatgcttctttcaatttccctgctttactattcacttcgatcatcgtgttgtaactcacaacgtccgggtttattccattgctcttcatgtggtcaaacagttgtgtggcttcatctaaccgggttgctttccccagagcgttgatcaatgtgttgtacattacaatgtctagatatcctccttgctttgtgagtctgtcgagtaccgcgctggctaagtctgctcttcccatttttcctaatccttggattattacattgtatgttgctatgtctgctgcacaaaagttctcaaacatttggtcaagcactccacgggcggtttggaagtaaccctttttgacaaacgagctcatcatggagttgtaggtgtaactcgtgagatcggtaacacccattccattgaatatctcaaacaatttgcaggctaagctgagatcccctttggacagatatatagatagaaacgtgttcatcatgtctacgtcaaaagaatctggctttgcttcgaccctctgtcctcttgctaaaccaaacaagggcttaggttgatttctctggtgtgctaattggtccatatatggagatgatgaccaagggtcatcttccattggtgatacttcctcagcactagctccatcgtcttccgaacctaccatgctcataatatctaggaagcttcctttacttggaaacattggggtgtaatccttatctttgctctgtggacgttttagtgaagcttccactccagcgttccatctcagaacattaggcaccaagttaccttcccttatgtgcttcatcaacttctctttccaatcccacctaccttgtttatgaaatccgatcaagagtgaactaattgtgaccaaatccacagagaaacctctagtctccatctcctctaccaattttactgctccttctagcttcccttccctgcaaagctgcaacccaacaatgctaaacgtaatggcatcgacaaactgacccttcttcttcaagtcacagaacagagtaaacccagcctcagctcttccgttcctaaataacccgtcaattagaatgttgtatgtccagcaggaagctctaactccttcttgaaccatcttctcaaacaactgacaagcctcagtgacttttcttgccttgagtgtcccatctaaaagacaattatacacaatagtatcagggacaaacccgttatactgcatctcaccataaatcctcattgcatcatccatccggtaagatttacaacatccttgaatcagtatacgatatgtcgaattatcaggctcatggccagacaccttcagctcatcccatacaatcaaagcatctttagcttttccaaataaacacaacacatgaatcaggctgttatatgtgcatatatcaggaccaaaagaagacccatagaccgaacttcgctccttcatctccttgaacaaactcaatgcagcatccaagtctccccaacaaccaaatccatgaatacaaatgttataactccatgtatcaaacttgaatcttttcattccctttaacttttcaaatacccttttgaactccgacctcatatctgctctccttagaccaaccaagagctcattaacagcaacagttccaggaagataacttacaataataactctaccagtatcatcatcactatggttatcagaagcttctaaaagcttaaataatatagacagagcaagacgcaattcgtgtttcttcaccagagcaataagaacagaatcatatacactaggatttaagcaatctcctaattcctccatgtaatccaaaactcctaacgctgattcgaacttacccgaacggattagagaatctagaagtatcttcgccatcgtctggtccaagttaactccatcttccttcattgaaccaagcaaatcgggaacttctccgagaagccctgtccgacaaacagtgcgaaatatctgagagtaagctgtcgctgaatgtttgtatccaggacgaagagaataacaccatcggaagaaatctagcttcttcgatggatctatggagtttctacgaaggatctggagaaccacaggttccgaaatcggtatcgaattcgcgtcgaggcttcgtgtaccggactgagacaaggtcttggacaaagacgcgacgagaaggacattgcagagctgtggaaacggtgaattcttcgccggtgatagaccggaaattgcagctgatacggcgcttcctcttccatggcgcatcgcatagtgaccactgagaaacgaaattgatagctaacatacacggcgtcgtttaatatcgttataatgaaacgccatagtataatgtttcttcaaggcccagaattaagcccgttaatagactgatacggcgacggtttaacgaatattataaagatagataggcctatgcttaaagatgggcccaagcataggcccatttgtataggtttttcaattttgagtcgataaaccctaagttagtctccgtcgtcttcattctcagctttgccgttttcatcgattaaagagagagaggcttcgttcgccgtccgtcgtaaaaatg

SEQ ID NO: 29204 - DNA, 3000 bp, Unknown; identical to SEQ ID NO: 29203
  misc_feature (1)..( 3000): 2750-1469P.txt file - cDNA_ID_3000085; gDNA_ID_2926161; Annot_ID_198771

SEQ ID NO: 29205 - DNA, 3000 bp, Unknown; identical to SEQ ID NO: 8434
  misc_feature (1)..( 3000): 2750-1469P.txt file - cDNA_ID_3000102; gDNA_ID_1971801; Annot_ID_58091

SEQ ID NO: 29206 - DNA, 3000 bp, Unknown; identical to SEQ ID NO: 8434
  misc_feature (1)..( 3000): 2750-1469P.txt file - cDNA_ID_3000102; gDNA_ID_1971801; Annot_ID_175719

SEQ ID NO: 29207 - DNA, 3003 bp, Unknown; identical to SEQ ID NO: 27443
  misc_feature (1)..( 3003): 2750-1469P.txt file - cDNA_ID_3000117; gDNA_ID_1621182; Annot_ID_57400

SEQ ID NO: 29208 - DNA, 3000 bp, Unknown; identical to SEQ ID NO: 1977
  misc_feature (1)..( 3000): 2750-1469P.txt file - cDNA_ID_3000125; gDNA_ID_1620474; Annot_ID_158121

SEQ ID NO: 29209 - DNA, 3000 bp, Unknown; identical to SEQ ID NO: 7575
  misc_feature (1)..( 3000): 2750-1469P.txt file - cDNA_ID_3000132; gDNA_ID_1621153; Annot_ID_56918

SEQ ID NO: 29210 - DNA, 2308 bp, Unknown
  misc_feature (1)..( 2308): 2750-1469P.txt file - cDNA_ID_3011881; gDNA_ID_1620301; Annot_ID_152613
gatctttacatttgtacctttactagatgctctggttcctcaaaatatatggcttgtattgaaatttgattttgctgttgtttgttttggtttagcttgaagggatggggtttgatcgtgcgatggtcttggaagtgttctttgcgtgtaacaagaatgaagaacttgcagctaattaccttctagatcacatgcatgagtttgaagatcaataaacagagcaaatccattcctccctctaaactcagaccatctttctgtttctttttcttcttctttttaatatgataatctcttctccaatgccatttgacagtttcatgtttatgttcatgggagttgatgtgtttatgttactattaaaactatcatagtttatctggtttgaagatgctcctcttttatcatattattagcctttgaatccttcctctctttaggtctcagatgcaccaatattagctaagattaaaagtggatattttggttctatatgactcatctcgagttaggaatggtatgtcgaatctggtttaacagatctggcctaaaacgaaaccgctattcagatccaattattggcgcttacattgttttctcatagcctcaagctatgcaatatcaattattgcacatttgaattaacacaaacccatcaattaatatatcaacaaaaacccatcatcaattaacacatcaacacaaacataaagacatataagttgctcatgaagaacttataatggtggaaccagtgagcctttgagatctgtcataatcgtctctgaaattgtctcaaatcgagagagaaatgagaaatcttaaaattttaccctaaataattaaaccctagcttttaattattactgcacaaattatgtctaaataattttgcccatttactagcgagcttatatggtttgtaatccattttaaacactttaattttgggcttcaccaaaacccaaccattattatttggacgtggacatcccatggtcagaaaactcattcgataaccctacatttgatgatcaaagtggcacggaagctcgttcgatctacaagttttgtggtgaggagacttctcagtttttcttctagtgtggttgtacttcaggtaaattcttttcaatacttagtggaatttttcgctaactgttttgtgtaaataaggacgaggcctccatagcgttcagtgctttaacaatgccgtatccactctgctaatcttggatttcaagaggtatgacagtttgtgttgtgataggagccttcattaaattaaataatttcaacaatttatttatttttagaaccaaaagatttttcaaaaattttgattatcaaaaaaaaatccaacagattttctgttaaaatgaaaatatatattagattgtttttaaaaaaaatcatctgccggaatttgaatctggacatgcttattttcaaaaaaacattttagctaatgtgctagtgcatatgtttttgctaaggtatgaatttaaattggatatatagatcaatttatttattttaaaaccaaaaaaaatttaaaaagaaacttagcgggatataaaataaatatatattaaatttaaaaaaaaaagattttccgctacgggaatttgaacctgaaaatgctgatttttaaagaaaatttagctaatgtgctacatgagatgttttttttgctaaagtatgagtttaaattggatatatacatcattcaatttatttttctaatctagaatttgctttcctaggacaaatataggtactgaattattaaagaacatattttttggtaagatataagtgagtttttatataattttgatgattttaggtaagttgatgtgatttactgtaaagtcttttcaaattctatctaaaactatgagatttagatttctgtatttttaactaaagaagtcttttcaaatcctttcaaatccttcaaaattaataagaatcaaatccactaactattttcagtaacagtaaaaaggttgatttttaaatttttaatttaataacactcaatttcatttaaaaatttaaaatccataattaaataacataaaatttataaattttacataaattattagattgaatacaccgctctaaatatacacaatgtaaaaagtctgtttaagatcaattatagatttaacttaaatctaaaggcccataataccgtcctgtacatcatatagttatctcaagttgtaatactgtaatacccgttgggcccagtggcccatttatcagatttcaaataacagatctcaacactagcatg

SEQ ID NO: 29211 - DNA, 2994 bp, Unknown
  misc_feature (1)..( 2994): 2750-1469P.txt file - cDNA_ID_3011881; gDNA_ID_1620301; Annot_ID_152614
gatctttacatttgtacctttactagatgctctggttcctcaaaatatatggcttgtattgaaatttgattttgctgttgtttgttttggtttagcttgaagggatggggtttgatcgtgcgatggtcttggaagtgttctttgcgtgtaacaagaatgaagaacttgcagctaattaccttctagatcacatgcatgagtttgaagatcaataaacagagcaaatccattcctccctctaaactcagaccatctttctgtttctttttcttcttctttttaatatgataatctcttctccaatgccatttgacagtttcatgtttatgttcatgggagttgatgtgtttatgttactattaaaactatcatagtttatctggtttgaagatgctcctcttttatcatattattagcctttgaatccttcctctctttaggtctcagatgcaccaatattagctaagattaaaagtggatattttggttctatatgactcatctcgagttaggaatggtatgtcgaatctggtttaacagatctggcctaaaacgaaaccgctattcagatccaattattggcgcttacattgttttctcatagcctcaagctatgcaatatcaattattgcacatttgaattaacacaaacccatcaattaatatatcaacaaaaacccatcatcaattaacacatcaacacaaacataaagacatataagttgctcatgaagaacttataatggtggaaccagtgagcctttgagatctgtcataatcgtctctgaaattgtctcaaatcgagagagaaatgagaaatcttaaaattttaccctaaataattaaaccctagcttttaattattactgcacaaattatgtctaaataattttgcccatttactagcgagcttatatggtttgtaatccattttaaacactttaattttgggcttcaccaaaacccaaccattattatttggacgtggacatcccatggtcagaaaactcattcgataaccctacatttgatgatcaaagtggcacggaagctcgttcgatctacaagttttgtggtgaggagacttctcagtttttcttctagtgtggttgtacttcaggtaaattcttttcaatacttagtggaatttttcgctaactgttttgtgtaaataaggacgaggcctccatagcgttcagtgctttaacaatgccgtatccactctgctaatcttggatttcaagaggtatgacagtttgtgttgtgataggagccttcattaaattaaataatttcaacaatttatttatttttagaaccaaaagatttttcaaaaattttgattatcaaaaaaaaatccaacagattttctgttaaaatgaaaatatatattagattgtttttaaaaaaaatcatctgccggaatttgaatctggacatgcttattttcaaaaaaacattttagctaatgtgctagtgcatatgtttttgctaaggtatgaatttaaattggatatatagatcaatttatttattttaaaaccaaaaaaaatttaaaaagaaacttagcgggatataaaataaatatatattaaatttaaaaaaaaaagattttccgctacgggaatttgaacctgaaaatgctgatttttaaagaaaatttagctaatgtgctacatgagatgttttttttgctaaagtatgagtttaaattggatatatacatcattcaatttatttttctaatctagaatttgctttcctaggacaaatataggtactgaattattaaagaacatattttttggtaagatataagtgagtttttatataattttgatgattttaggtaagttgatgtgatttactgtaaagtcttttcaaattctatctaaaactatgagatttagatttctgtatttttaactaaagaagtcttttcaaatcctttcaaatccttcaaaattaataagaatcaaatccactaactattttcagtaacagtaaaaaggttgatttttaaatttttaatttaataacactcaatttcatttaaaaatttaaaatccataattaaataacataaaatttataaattttacataaattattagattgaatacaccgctctaaatatacacaatgtaaaaagtctgtttaagatcaattatagatttaacttaaatctaaaggcccataataccgtcctgtacatcatatagttatctcaagttgtaatactgtaatacccgttgggcccagtggcccatttatcagatttcaaataacagatctcaacactagcatggctacacacgtgtcagattcaatgcatcagtcatatcttcagcatccaacacttgtcaaccttccattggatctcttaactctacgcctcgaaaacagtttttatttatttatcattccatttctcattgtatcttcatcagtctcttcttattccattttttcaaaccacttgcaaaattcgaatcagatcttctcttcaatcgaaaaaaaagaaaggtaaatctctctctctctaatcatcgttcgtttcgtagtttcttcttctacgtgtagatctgatctttgattgtatgtttctggagatctcgatctcatcgattctctgttcttatcactgattcagtgtgtttgatatctaaatccgatttgtgtgtaggatgttaaaatttaggtttcggttttgtttctgcttttgaacgattttgctctagattcgttatccgtgaagaacatagacgagtatgtagatcttacttcggattcgcgttgaagaattttctctagattcgtcacctatgaagaagattcattgtgttcttaatctagatgattaggttattgtttcgactcatttgtttatgcctattttctctatgttcttaatcggtgaagaaatgtatcaatgtgtgtatgttttgggttctgattttgtaggatttgctctagattgttgaatcgaagatg

SEQ ID NO: 29212 - DNA, 3003 bp, Unknown
  misc_feature (1)..( 3003): 2750-1469P.txt file - cDNA_ID_3011881; gDNA_ID_1620318; Annot_ID_153250
caaacgcaaatccattaaacctgttcccccaggtagggtttttaaactggtgaaccgatttcatttgctcgttttcccttgtgaatttgttttattgacatccactcttatctgtctctatccagggcatgcccgctgcagatgctggtgctggagctggtaatcttgatttcctgcgtaacagtcaacaggtattttcaatttcttttccattcgagaacggaaatcttcatttctctcctcttatgtcatttgcaattcttttgccttttcatagttccaagccttgcgagctatggtacaagcaaacccacaaattctacaggtaaaatttttaacctcttattctttatttggtaggttatatgatattgatttcccacttatactgtttcgttttgcagcctatgcttcaggagctcggtaaacaaaacccccagcttgtgcgactaattcaagagcaccaggctgacttcctacgcttgataaacgaacctgtcgagggagaagagtgggtttaatatcatgattctcctttacgttttcattttattcttttttctcaataaagcatgtaatctgacatttcattcgatgccaccaggaatgttatggaacagttggaagcagcaatgccacaagctgttaccgttacacctgaagagcgtgaagccattgaacgggtttgttcctatgatctttacatttgtacctttactagatgctctggttcctcaaaatatatggcttgtattgaaatttgattttgctgttgtttgttttggtttagcttgaagggatggggtttgatcgtgcgatggtcttggaagtgttctttgcgtgtaacaagaatgaagaacttgcagctaattaccttctagatcacatgcatgagtttgaagatcaataaacagagcaaatccattcctccctctaaactcagaccatctttctgtttctttttcttcttctttttaatatgataatctcttctccaatgccatttgacagtttcatgtttatgttcatgggagttgatgtgtttatgttactattaaaactatcatagtttatctggtttgaagatgctcctcttttatcatattattagcctttgaatccttcctctctttaggtctcagatgcaccaatattagctaagattaaaagtggatattttggttctatatgactcatctcgagttaggaatggtatgtcgaatctggtttaacagatctggcctaaaacgaaaccgctattcagatccaattattggcgcttacattgttttctcatagcctcaagctatgcaatatcaattattgcacatttgaattaacacaaacccatcaattaatatatcaacaaaaacccatcatcaattaacacatcaacacaaacataaagacatataagttgctcatgaagaacttataatggtggaaccagtgagcctttgagatctgtcataatcgtctctgaaattgtctcaaatcgagagagaaatgagaaatcttaaaattttaccctaaataattaaaccctagcttttaattattactgcacaaattatgtctaaataattttgcccatttactagcgagcttatatggtttgtaatccattttaaacactttaattttgggcttcaccaaaacccaaccattattatttggacgtggacatcccatggtcagaaaactcattcgataaccctacatttgatgatcaaagtggcacggaagctcgttcgatctacaagttttgtggtgaggagacttctcagtttttcttctagtgtggttgtacttcaggtaaattcttttcaatacttagtggaatttttcgctaactgttttgtgtaaataaggacgaggcctccatagcgttcagtgctttaacaatgccgtatccactctgctaatcttggatttcaagaggtatgacagtttgtgttgtgataggagccttcattaaattaaataatttcaacaatttatttatttttagaaccaaaagatttttcaaaaattttgattatcaaaaaaaaatccaacagattttctgttaaaatgaaaatatatattagattgtttttaaaaaaaatcatctgccggaatttgaatctggacatgcttattttcaaaaaaacattttagctaatgtgctagtgcatatgtttttgctaaggtatgaatttaaattggatatatagatcaatttatttattttaaaaccaaaaaaaatttaaaaagaaacttagcgggatataaaataaatatatattaaatttaaaaaaaaaagattttccgctacgggaatttgaacctgaaaatgctgatttttaaagaaaatttagctaatgtgctacatgagatgttttttttgctaaagtatgagtttaaattggatatatacatcattcaatttatttttctaatctagaatttgctttcctaggacaaatataggtactgaattattaaagaacatattttttggtaagatataagtgagtttttatataattttgatgattttaggtaagttgatgtgatttactgtaaagtcttttcaaattctatctaaaactatgagatttagatttctgtatttttaactaaagaagtcttttcaaatcctttcaaatccttcaaaattaataagaatcaaatccactaactattttcagtaacagtaaaaaggttgatttttaaatttttaatttaataacactcaatttcatttaaaaatttaaaatccataattaaataacataaaatttataaattttacataaattattagattgaatacaccgctctaaatatacacaatgtaaaaagtctgtttaagatcaattatagatttaacttaaatctaaaggcccataataccgtcctgtacatcatatagttatctcaagttgtaatactgtaatacccgttgggcccagtggcccatttatcagatttcaaataacagatctcaacactagcatg

SEQ ID NO: 29213 - DNA, 3003 bp, Unknown
  misc_feature (1)..( 3003): 2750-1469P.txt file - cDNA_ID_3011881; gDNA_ID_1620318; Annot_ID_153251
tgttcctatgatctttacatttgtacctttactagatgctctggttcctcaaaatatatggcttgtattgaaatttgattttgctgttgtttgttttggtttagcttgaagggatggggtttgatcgtgcgatggtcttggaagtgttctttgcgtgtaacaagaatgaagaacttgcagctaattaccttctagatcacatgcatgagtttgaagatcaataaacagagcaaatccattcctccctctaaactcagaccatctttctgtttctttttcttcttctttttaatatgataatctcttctccaatgccatttgacagtttcatgtttatgttcatgggagttgatgtgtttatgttactattaaaactatcatagtttatctggtttgaagatgctcctcttttatcatattattagcctttgaatccttcctctctttaggtctcagatgcaccaatattagctaagattaaaagtggatattttggttctatatgactcatctcgagttaggaatggtatgtcgaatctggtttaacagatctggcctaaaacgaaaccgctattcagatccaattattggcgcttacattgttttctcatagcctcaagctatgcaatatcaattattgcacatttgaattaacacaaacccatcaattaatatatcaacaaaaacccatcatcaattaacacatcaacacaaacataaagacatataagttgctcatgaagaacttataatggtggaaccagtgagcctttgagatctgtcataatcgtctctgaaattgtctcaaatcgagagagaaatgagaaatcttaaaattttaccctaaataattaaaccctagcttttaattattactgcacaaattatgtctaaataattttgcccatttactagcgagcttatatggtttgtaatccattttaaacactttaattttgggcttcaccaaaacccaaccattattatttggacgtggacatcccatggtcagaaaactcattcgataaccctacatttgatgatcaaagtggcacggaagctcgttcgatctacaagttttgtggtgaggagacttctcagtttttcttctagtgtggttgtacttcaggtaaattcttttcaatacttagtggaatttttcgctaactgttttgtgtaaataaggacgaggcctccatagcgttcagtgctttaacaatgccgtatccactctgctaatcttggatttcaagaggtatgacagtttgtgttgtgataggagccttcattaaattaaataatttcaacaatttatttatttttagaaccaaaagatttttcaaaaattttgattatcaaaaaaaaatccaacagattttctgttaaaatgaaaatatatattagattgtttttaaaaaaaatcatctgccggaatttgaatctggacatgcttattttcaaaaaaacattttagctaatgtgctagtgcatatgtttttgctaaggtatgaatttaaattggatatatagatcaatttatttattttaaaaccaaaaaaaatttaaaaagaaacttagcgggatataaaataaatatatattaaatttaaaaaaaaaagattttccgctacgggaatttgaacctgaaaatgctgatttttaaagaaaatttagctaatgtgctacatgagatgttttttttgctaaagtatgagtttaaattggatatatacatcattcaatttatttttctaatctagaatttgctttcctaggacaaatataggtactgaattattaaagaacatattttttggtaagatataagtgagtttttatataattttgatgattttaggtaagttgatgtgatttactgtaaagtcttttcaaattctatctaaaactatgagatttagatttctgtatttttaactaaagaagtcttttcaaatcctttcaaatccttcaaaattaataagaatcaaatccactaactattttcagtaacagtaaaaaggttgatttttaaatttttaatttaataacactcaatttcatttaaaaatttaaaatccataattaaataacataaaatttataaattttacataaattattagattgaatacaccgctctaaatatacacaatgtaaaaagtctgtttaagatcaattatagatttaacttaaatctaaaggcccataataccgtcctgtacatcatatagttatctcaagttgtaatactgtaatacccgttgggcccagtggcccatttatcagatttcaaataacagatctcaacactagcatggctacacacgtgtcagattcaatgcatcagtcatatcttcagcatccaacacttgtcaaccttccattggatctcttaactctacgcctcgaaaacagtttttatttatttatcattccatttctcattgtatcttcatcagtctcttcttattccattttttcaaaccacttgcaaaattcgaatcagatcttctcttcaatcgaaaaaaaagaaaggtaaatctctctctctctaatcatcgttcgtttcgtagtttcttcttctacgtgtagatctgatctttgattgtatgtttctggagatctcgatctcatcgattctctgttcttatcactgattcagtgtgtttgatatctaaatccgatttgtgtgtaggatgttaaaatttaggtttcggttttgtttctgcttttgaacgattttgctctagattcgttatccgtgaagaacatagacgagtatgtagatcttacttcggattcgcgttgaagaattttctctagattcgtcacctatgaagaagattcattgtgttcttaatctagatgattaggttattgtttcgactcatttgtttatgcctattttctctatgttcttaatcggtgaagaaatgtatcaatgtgtgtatgttttgggttctgattttgtaggatttgctctagattgttgaatcgaagatg

SEQ ID NO: 29214 - DNA, 3003 bp, Unknown
  misc_feature (1)..( 3003): 2750-1469P.txt file - cDNA_ID_3011889; gDNA_ID_1620337; Annot_ID_153837
tatgagtagaagaacactagaagtgcattggggaaaacaccatcgaggttatgtagataatctgaataaacagttagggaaagatgatagactctatggatacaccatggaagagcttatcaaggctacatacaacaacgggaatcctttacccgagttcaacaacgctgcacaggtactttatattctaagtaacttgtacattatcacccgaggcacacactaatgttggaaggattgatgatgattatgttgttgtttaggtctataaccatgatttcttctgggagtcgatgcaacctggtggtggagacacgcctcaaaagggtgttcttgagcagattgataaggattttggttctttcacaaattttagagaaaagttcactaatgcagctcttactcagtttggttctggatgggtctggcttgtctgtgagaaacttgactagcttttcacttggtattaaactgtagaatgactttgaaaatggaaaattttgattctctttttgtttttttctggaaaatttcagtaaagagggaagagagaaggcttgaggtggtcaaaacctcaaacgccattaacccactcgtgtgggacgatattgtatgttagagttttattagttagttttcttgttgaacttaatgttacctcttgatcacatctcttttgttgttacagccaatcatctgcgtggatgtgtgggaggtacaccatctcctctcttctgtcattcttccaagaaacactttgaaacattttctaatatctttcgttttcttatcttactttgcagcactcttattatctggactacaaggtaaaaacctagcttaaattccgaccattctgtgttctttttgttcgttcaaaaggctaaatcagtgtttgtttctttctttctccggttgctagaacgacagggctaagtatataaacacatttctgaaccacttggtgtcgtggaacgctgccatgagtcggatggcccgtgcagaagcgtttgtgaatcttggtgaacccaacatcccaatcgcttaagctaaacacaactccttggaaacttgggcagtctcatttttgcaaacagaggtctcaagtcccaagtcccaaccaacaaaacaagagttgctttctgaatgtgacccatctttttgttctgtgtaatttagcgacagttttctcttcttttgccttttgagagactctctagctttaagatcatcagtgagccctgtatggtgacagtaatgttagtgacgcaattaacccttattaagttataataaaacgaaggctggctcacgtgacccgcacgtgactgagagtatccgtttcctcttctttcttttcttcttcttcttcttcttcttcgtctcctgacaatagggattgacaccatcgttcacttcaacgtaaaggtataaactttcttcctccttaacgtcaaagtttcacgcgatcgtctctgtggaactccctcagcatcgggtaattccctgattttcccaactcgctctcgcggaaactctcgatttcgattgggctcttgaggttctgttcatttcctcgtctatgaattttctacaattgattaggagtcgtgcccataactgcgtgagtaaaaagggaaaattttcttaaagataagcaatttcaagctttgtgttcgtgaaatttatccttgtatgaaacttgcaatgcgattgttgtgttggttggtgggttttctgtaaaatctcaatgttcatgtaggacctgggttttggcagattcagtgccataaagactgtagtgttagtcctcatattacatttgtatggttgctaaatggtcaaactgatactagtataactcagagattacaagatttatttggatcaagatcatatgtttccttgatgccaaaactaattcattgttaagattcataaaatcgagtatatagcgagttaacgtttacttgaatttcctcgttctttatcctttgtaggaggttatgcagttcttggatcccctgagatttgttgtcaaaaaccagcttccattactgatacactatgcctccgtctcattctcaggtctgttgtagttcttgaaacaaattatcataagctttgatcaaacaggaaagaaaacctcttataatctttcttgattgataaaaatgacagagatcttcagtgacaccagcatcagacagttatctcaaatgctactatcactaatcttcttccacatatccgaatacattctagccatcaccattcacggagcatcaaacgtaactcttagttcgcttttaatcaccaagcattacgctttagcaatgcttctgtcgcttctcgaatacctaacggagattatcctcttcccggggctgaaacaacactggtgggtcagcaactttggactcataatgatcatcgttggggaaatcatcaggaaggcagcgataataacagcgggaagatcgttcactcacctcataaagatcaactacgaagagcatcacgggcttgtgactcatggtgtgtatagactaatgaggcatccaagttactgcggttttctcatctggtcggtcgggacacaagttatgctctgtaaccccgtttcagcagttgcgttcgcggttgtcgtgtggcggttttttgctcagagaataccgtacgaggagtattttctgaatcagttttttggggtacagtatctagagtatgcagagagtgttgcctctggtgttccatttgtgaactgacacttgaattatttttgaacatatgagtttgatgtacttgacttgaggtcttaaagtcacaaaaacatacaagaccctctggctgaaagagaaggtcttgacgtggatatgaaatttaccacagcgttaattgtttatgtgacacctgtcaccggtgatgcatagctccggcgaagagtttcggagaacaagtttggtctttttaggggtttgagcagtggagtcggtaaccatg

SEQ ID NO: 29215 - DNA, 3000 bp, Unknown
  misc_feature (1)..( 3000): 2750-1469P.txt file - cDNA_ID_3011897; gDNA_ID_2926143; Annot_ID_197591
ttctatagttgtttatgtatttataaaaaaataaataattgtatttacttaactttgtttacccacataaaagactttcgtgctatggaaaagggttaagactatttacgaacgagaagagatttattagtttatacgaacggaaagagattcacctgtattaacgtacgaaaatgaggatttagttgaactcttacaggaaaagagaataaaacagttttaacgaacagaaaagaagtttatatatattttttctgttatattaggttttccttatttgtgtacaagttaaatttttggaacaaagacaatgatcaaagttcataactgtatttttttttctattataaattcagaattagaataattgcaagaaaacttattacttctaaagttgtttctatatatataaaagaaaaaaaaaagaaaaaaataattgtatttatctgactatgtttacctacgtaaaagactttcgtgccacggaaaaggtttaagactatttacgaacgagaagagatttactagtttacatgaacgaaaagagatttacctgtattaacgtacgaaaatgaggatttagttgaattttcgcgggaaaagagagttaacggttttaacgaacagaaaatgagttacttgtaaaaaatacttagcatatgtttaagtgaaatttctagttaactatgagaaactgtttcacgccctttggaatatatatggcaacttgatcaatgtatatgaccaattttagctaagttatcaattttcttacttttttacacatatcatataagttacttgtaaagtacactattttttgatatgatcaattttaaaaagaaaaatattattatttaagtaagatatctaaatattaattttaatatcttttgataaataatttactataattagttaatagacattagtgatcataaatatattaccagattatgtaatacaattattaataagtatttttaccaaatattaattgaattttagcctaaatagttaatcaacattaatatttcattaacatggtaccaaattgcctaattataatgtcaatgtgtctgaattttaaatatattaccaaattatacattaaaatattaatattttgttatagtatttatttgaataaagaaatttagtattttcttcctataaaaggatgactaggagacaaatttttagatttttaaaataaaaggctgactcttccagaactaaatatagatatattatttattaattaaaggttactaaagtgaagtctaagtgatttggtttaagaatttttgtttagaatttacaattttcagtttagttttagataattttgttaattggatattgacattttgtttgtagccagaagttgttgtttttaaaagaaaagctttatttttgctacccaataatgatgagaagagattacataaacaaattaaaatcaatacatgatacgaactaatctagctaaacgatttactcaataacttcacccaattcgtttcgaaatctaagcaatatatccctcaaaaaatcataactaacataaccaacataagtgtttccaattttgagcgaatgagaacaaacttcttccctgacacttaactcttcgtaagatgattaaaataatatatgattattgcttcttcacacacacgatctctaaagcaatttacccattaaatctttatatctatatataaaaataagtttgatacattactatgctctttgatgggcaaaagtaaaaaaaaattgctttgattttgtagacgagttttgggcatgcaatttttatttacatcttttcaacaaaaacaattaaacaaaacaaaattttgcttagacattgtccatgttaaagttcaaaaattgtacgaaaagtaagcggtagaaaattttgctctatttaggtttatcgaagtaatctttctatttgttatatgttgtataatttatagtaatatgtttatttagttacaatcttttcgtaggttaactatattacttctaacttttgtatgtttaacagattttttatttacctctatcaaaaccctgcaaaacacacaatcaaactcgcaatactctactacatcgattaactaatccacgacacttattttcttttgtacttaaaagttaaaaatatattaacacgtcctatagtaaagcggtgtatgcctcgtccacggattctaaagtttacacatgttttaagtttaacaccttaaaaccatctaaactctactttttaaaagggttttatgcaaaaaaatcctcaaactcgtctatttttacaactttattcttcagatccaaaaaatgcaaaatatcatatgaatttcaaaataatacacaatatagatttttcgttactatcaaattttaaaattttgataaataatatattaaatcggaacctcgagatgaagagttcaagtatatctttaaaagttttaaaaacaaatgtatgtaatcgtgaaaacatttacaatatatataaaattgcaaaataggctattttagatttcataagattattttgtattttttaaaacaacaaactcaagtctacataattaatatattcaactcaaaactccaaactgaaagcttaagaagcccaacaattgtaagcccaattaaaaagcccagtaagtgaacgcgtaaacaaaaaaagtaaagactctcatggaacaatcaaaaacgccgaaacaatgcttcgtctccgattattccacgaaacaccgcgtttttgtttacatttcttctctttctctctctctcttctctcatatctctctcttcgccgtcaggttttgcccaaatttctcggtcttcttcactcccgcgagttttttttctcgggaaaattttccaattccaagctccattgaagccaagtaagaggtgcgattctcttcaattttgacttggaacttgtaaatagcgtatggatttgagctggttatg

SEQ ID NO: 29216 - DNA, 3003 bp, Unknown
  misc_feature (1)..( 3003): 2750-1469P.txt file - cDNA_ID_3011897; gDNA_ID_1621164; Annot_ID_57181
tatttctatagttgtttatgtatttataaaaaaataaataattgtatttacttaactttgtttacccacataaaagactttcgtgctatggaaaagggttaagactatttacgaacgagaagagatttattagtttatacgaacggaaagagattcacctgtattaacgtacgaaaatgaggatttagttgaactcttacaggaaaagagaataaaacagttttaacgaacagaaaagaagtttatatatattttttctgttatattaggttttccttatttgtgtacaagttaaatttttggaacaaagacaatgatcaaagttcataactgtatttttttttctattataaattcagaattagaataattgcaagaaaacttattacttctaaagttgtttctatatatataaaagaaaaaaaaaagaaaaaaataattgtatttatctgactatgtttacctacgtaaaagactttcgtgccacggaaaaggtttaagactatttacgaacgagaagagatttactagtttacatgaacgaaaagagatttacctgtattaacgtacgaaaatgaggatttagttgaattttcgcgggaaaagagagttaacggttttaacgaacagaaaatgagttacttgtaaaaaatacttagcatatgtttaagtgaaatttctagttaactatgagaaactgtttcacgccctttggaatatatatggcaacttgatcaatgtatatgaccaattttagctaagttatcaattttcttacttttttacacatatcatataagttacttgtaaagtacactattttttgatatgatcaattttaaaaagaaaaatattattatttaagtaagatatctaaatattaattttaatatcttttgataaataatttactataattagttaatagacattagtgatcataaatatattaccagattatgtaatacaattattaataagtatttttaccaaatattaattgaattttagcctaaatagttaatcaacattaatatttcattaacatggtaccaaattgcctaattataatgtcaatgtgtctgaattttaaatatattaccaaattatacattaaaatattaatattttgttatagtatttatttgaataaagaaatttagtattttcttcctataaaaggatgactaggagacaaatttttagatttttaaaataaaaggctgactcttccagaactaaatatagatatattatttattaattaaaggttactaaagtgaagtctaagtgatttggtttaagaatttttgtttagaatttacaattttcagtttagttttagataattttgttaattggatattgacattttgtttgtagccagaagttgttgtttttaaaagaaaagctttatttttgctacccaataatgatgagaagagattacataaacaaattaaaatcaatacatgatacgaactaatctagctaaacgatttactcaataacttcacccaattcgtttcgaaatctaagcaatatatccctcaaaaaatcataactaacataaccaacataagtgtttccaattttgagcgaatgagaacaaacttcttccctgacacttaactcttcgtaagatgattaaaataatatatgattattgcttcttcacacacacgatctctaaagcaatttacccattaaatctttatatctatatataaaaataagtttgatacattactatgctctttgatgggcaaaagtaaaaaaaaattgctttgattttgtagacgagttttgggcatgcaatttttatttacatcttttcaacaaaaacaattaaacaaaacaaaattttgcttagacattgtccatgttaaagttcaaaaattgtacgaaaagtaagcggtagaaaattttgctctatttaggtttatcgaagtaatctttctatttgttatatgttgtataatttatagtaatatgtttatttagttacaatcttttcgtaggttaactatattacttctaacttttgtatgtttaacagattttttatttacctctatcaaaaccctgcaaaacacacaatcaaactcgcaatactctactacatcgattaactaatccacgacacttattttcttttgtacttaaaagttaaaaatatattaacacgtcctatagtaaagcggtgtatgcctcgtccacggattctaaagtttacacatgttttaagtttaacaccttaaaaccatctaaactctactttttaaaagggttttatgcaaaaaaatcctcaaactcgtctatttttacaactttattcttcagatccaaaaaatgcaaaatatcatatgaatttcaaaataatacacaatatagatttttcgttactatcaaattttaaaattttgataaataatatattaaatcggaacctcgagatgaagagttcaagtatatctttaaaagttttaaaaacaaatgtatgtaatcgtgaaaacatttacaatatatataaaattgcaaaataggctattttagatttcataagattattttgtattttttaaaacaacaaactcaagtctacataattaatatattcaactcaaaactccaaactgaaagcttaagaagcccaacaattgtaagcccaattaaaaagcccagtaagtgaacgcgtaaacaaaaaaagtaaagactctcatggaacaatcaaaaacgccgaaacaatgcttcgtctccgattattccacgaaacaccgcgtttttgtttacatttcttctctttctctctctctcttctctcatatctctctcttcgccgtcaggttttgcccaaatttctcggtcttcttcactcccgcgagttttttttctcgggaaaattttccaattccaagctccattgaagccaagtaagaggtgcgattctcttcaattttgacttggaacttgtaaatagcgtatggatttgagctggttatg

SEQ ID NO: 29217 - DNA, 3000 bp, Unknown; identical to SEQ ID NO: 29215
  misc_feature (1)..( 3000): 2750-1469P.txt file - cDNA_ID_3011897; gDNA_ID_2926143; Annot_ID_139033

SEQ ID NO: 29218 - DNA, 3003 bp, Unknown
  misc_feature (1)..( 3003): 2750-1469P.txt file - cDNA_ID_3011905; gDNA_ID_1620336; Annot_ID_153793
tatttcaaatgaagcattgtgcaaagtaatgaagcgaccagagattaagaaagaagatggaaaacatgatctgttactcaaaagttacaatgacagtaatgagaagaaagcagaagtagatacatgcatcaaaagttctcaagtttcaggtgttgagcataagaaagagatcaaagatgactcaattcttcttattgccgcagagagagtcccatgtcaagctccatcagaaaatgtaagcttactatttgttaacttcacatatataccatctgtatatgttagttctaatcggtgttggatgttcataagcagcatcatgggcgtatgttcacaaatgggatggatcaacaagctccaataccaaagtctgatggaaattcagatatattatccaagacagtatataaaggtaagaagcaaataatgaacttttggtttgtcttgttattaatctcattgcacatttttaaaaaatcactaataatcatttcgagcattatgtcaagattttgttttgataaaaatggaactaaaataagttacaattatttcagaaacaaaaggggagatagaagctggtttacccttgttggagaagcgacaagaacgccgaaaacgagaaacaacagagacattatccgaaaatgaaataaacctaaagaagatatttgtgaaaagccaattatttctagacacagcaaaggcacatttcaaactcaacattcctcaaaatgtctttcatgacaccaccagtgggagctattactatcaagaagacaagaatctaaccctcgagtgtgccttcgagctaatgaaacgaaaaaggagatttcaagagttaagtgtccatcctttcgtgaaggtacccataagttcctctaaaataaactcattggaccatcttattagacaaataagcaaagagttagagaagctgagagcctacggtagagactgccacattggatcacatgttgaagactacgtgttggaaagagatgttcactataaagacccatacttgaactcaatgtgggacatgggttggaatgattcgatgctcgcgttcatcgagaaagatgatgttatgagggatatagagagggaagtcttcagtggactcttggaagagataacaagagatcttatatgcatatagccgaaactcttctttctctccgatttaaaagtgagctcttgttttaggtgattagagtgtcttcaaacattaatccactccgttaatgttttgtctgataatggttttgcttttctttttattctactactcttttggattaactatcctgatatattgcatggttaataagaatggatgcgtatttgatgaaaaaacgtctactcattcatcataaacacaaaaagctaagtatctatttctcaaattctaacttcaaactatctaacttcttaattctattattatatacttttaaaactacctatttcactaaacttccacaacttattcttagcttttgtatgagttttatcctcagttttctatataggattttgaaaattcgttatttttattcgtgaagagaatgtacatactttgagatcaatctagctacaatagcacaaaaagataattgaacttgataatgtatatttgatggagaagttaacttgaagaggaccgatgaactttaatttcatcccaaaacaattaagtaacaaaagttatgttatagaaagaacattttggggttttaataacataaatttggggtttcacgaattaagaaccatgaatcggttaactcaaatacgataaacgactgctaccagtgaccagtcaacaatgttttggaagttacgttaatatacaaaatgattcaaacaatcgaaatttgaaatttgtggttcaaatgttaggccttttgtgcttttgttttttaataattttctcgtctttttgaggaaaaaaacaaacagtagtttaaacatgctttatcttttccttaggccacagcaaaagcgacttcttcttctttaatattattattctttttccatctttgtggtgtgtgttggaatgtctaattccttcctctcctcctccaccaccttcgatgcattgctccatttcttagtctagaaggaaaatctagttttcaaaaaagccctgaatttcttaaactagttaattacatgtttaatgctcttcattaagtgtgggaaaatccatttattataattctgtctcactttttcatgtaactaattaacgaaagatactttagggtttaattcccctttattgtctcttttaattgtcatgcaacacgtacttatacactgcaatgatgtagtattttgtatctttatctggtatatttgaaatttcaaatactcccttctaaacaaactattaaatgaatgtcagaaatatatatatatatatatatatatatatatatattttcaccaggtacgtttgaaatttgaaaatacacagctttaataaacaaactcttaaactgtatcagaaattgttgattataaaaaaaaaaaaaagaaaaaaaattcctagacatgaataatcaagagtttttttgttttcttcgttaacaatcaagagttctttgttatatatattgtttaaagtactcttgcgagcgctctttatggataatagatctagtagtcttcgtttactaattctctctcacaaatccaaacaaaaaggaactgtgtacttaaatcctgtaatgacaatttcatacatactaaacaagaactattaaatactaggataatacatacttgaagaaataacaactcttcatgtagtcgtgtctttttacaatttaaaatttgaaaaataaaagttacatttacctttacaacgtcggtcgttttccacacaatagattacccacttctactcgatagttttctctataatatagagacaaaagaagagagcatttaaattctaaagaacaaaaaaggaaaaacagagcagccatg

SEQ ID NO: 29219 - DNA, 1504 bp, Unknown; identical to SEQ ID NO: 190
  misc_feature (1)..( 1504): 2750-1469P.txt file - cDNA_ID_3012105; gDNA_ID_26053; Annot_ID_146543

SEQ ID NO: 29220 - DNA, 106 bp, Unknown; identical to SEQ ID NO: 264
  misc_feature (1)..( 106): 2750-1469P.txt file - cDNA_ID_3012143; gDNA_ID_94274; Annot_ID_147324

SEQ ID NO: 29221 - DNA, 379 bp, Unknown
  misc_feature (1)..( 379): 2750-1469P.txt file - cDNA_ID_3012233; gDNA_ID_93805; Annot_ID_147264
gcaaagttgtgttggaaaccaaataaagtaccatcatatattgcaggtttatcaacttgtgcaatgatccgcttgtagatcacgttagccccacggatagacatgctctgtttgctatagaacatcatcatctttagtatgaaacgacgaatccctacatagtctggttcatcaattctgagaggagagtctttaggcagagcaatgaacatggctttgaccaaaacatcttatccaagtttatctgtcaaacatagaacaaatccttttcatcaaagaagacacgattttccagaagcagttgactaaaagagcatgaatctaaatcacaaacatactaatgaaactccaacagaaaaaaagggatgaatcctaaatg

SEQ ID NO: 29222 - DNA, 603 bp, Unknown
  misc_feature (1)..( 603): 2750-1469P.txt file - cDNA_ID_3012251; gDNA_ID_99069; Annot_ID_147335
taggkttttttttttttttacttttcgaaaagccgatccagatttttgataattttgaagaagaagatgcaacaaaatcaagtgaagaaggttcgcttcttgctctctatctctctcaatcatgctttgattctaaatgtgggaaacagaggataaagtcttatccttttacaaatttaaagacaaaaaaaaataaaatctttcctttttcaattgcaattaggtttggttttgttgcatgagcataaataagatgtgtggataaagtttgtgttttgtctacttttgtgattcactagggcacgaaagagatggagtttttcacagagtatggtgatgcaaatcagatataggattctggaagttattggtaaaggaagctatggagttgtgtgtgcagctattgatacacatactggagagaaagttgctattaagaagattaatgatgtctttgaacatatttctgatgcgcttcgtattctccgtgaagtgaagcttcttcggcttttacggcatcctgatattgtggagatcaaaagcattatgctgcctccttctaagagagagtttaaagatatctatgttgtgtttgagctcatg

SEQ ID NO: 29223 - DNA, 450 bp, Unknown; identical to SEQ ID NO: 269
  misc_feature (1)..( 450): 2750-1469P.txt file - cDNA_ID_3012255; gDNA_ID_99073; Annot_ID_147340

SEQ ID NO: 29224 - DNA, 659 bp, Unknown; identical to SEQ ID NO: 271
  misc_feature (1)..( 659): 2750-1469P.txt file - cDNA_ID_3012301; gDNA_ID_99300; Annot_ID_147360

SEQ ID NO: 29225 - DNA, 1009 bp, Unknown
  misc_feature (1)..( 1009): 2750-1469P.txt file - cDNA_ID_3012309; gDNA_ID_78093; Annot_ID_147253
tcttggatttgtcagaacttggatcaagaacaactggtaagacttcaccatcagttcctgaggtgacttgattgatcaatatttccaaacgctctgcatcagtaacactggaaatagatttgaaagactcaactgcagaagtataattttggggtacattatcacaacttttcgctttatcctcctccttcacagcctgaacaacacacaacaacgcattggcacaaacaaaactaaaagatacaatcgaaacaaaacatagcttattgaaatgaggagagagacaaaccatctcaggaggcaagtccaaggatgtcaaatgaaccacattaccatccatatctacttcattaacaataaagtctgcgtatctacgaaacataaatacagaaaaaaagtttcaatttttctcctatatggaacaagaacgtttgtgtataagaagaagcataaaaacgtaaactgatctcacgacctttgtttgaggattccacggaagccagggagctgggagataaaacaggagatgcccacgtcagcttcatctactgttttcataccttcaaagtttgtagctatcgtcgctattttcgttgtccagctcaagctcgagtagggttttagcagagacggcaaacaagacaagacagttctacttaatttcattgccttcttcaccggaacggcgacgacattgaaatcgaatactcagtaaaacgcaccgtttcgttccccattgacctgacccggttattgatatttcaatcccaacaaaccgataaatatattctcaaccaaattgatataccaatgaatcagatgttttgttaaaacgcagcgtttcgttcgtcaatatgctctaagtttaaaccagatcggtgcgaatattaaaccgaaccggttcatgtcaatgtcttctttgtagaaagagactttcctgatcgaccttccactactaacagatccacaaatttcataaggttcagagcaaatcggagagagagagatg

SEQ ID NO: 29226 - DNA, 3003 bp, Unknown
  misc_feature (1)..( 3003): 2750-1469P.txt file - cDNA_ID_3012350; gDNA_ID_1620667; Annot_ID_48073
gaaaaataataaagacagagaggctaaaagagatgatgagttatataagaagtttgactaaataagtttgcagctttgactagcccaccttctcccaccgactgccaacccatccgtcaatatttctatcttcatttcctcacaaatatttattcaatctcttcattttcaaatatatagttttctagtactcgtagtatggtctaaagactttaaaactaaataaaatggtaggaagtaaatgcaaattacttgaatttgtaaactatattcatactttcgcaatgttagattagtctgaattcaaatgtgattaaatacgtttgtatatattacgttatcaaatataggttcaaattgtagggattgtccataactattgcgtatatatgttcaaaattatattatatgttgtatttgtataccatagacgttatgacatttgtaagttgtaatgtatcttaaattaatgttttgacaccggttttcaactattatggacgtctttaacgtaagaaaactgactttctgtgtgtttgaaaattagtctgctttacaaattaatctttgcttatataatttttaatgataataagattaaagaatttgataaaaaaaaaaatatatattaaaagtaatgtatattgtttttaccaaagataatctgaggttaaagttacaataataatcatatagaaacaagttcaatagcaaaattaacttagacatgcaatttaccgatttcttgacattagtcgaaaaacatttgaaactcggttatacaatgaggttatcgttcaggcctctggaaagaaaatcaattctataatacttcaataactttttagtaaaactaactggatcaactgatgaatcatatatcaaaaaaacaaaaaaaaaaactaacggaggtagacaatagtttagctggaatgcttgaagaaatggcaagaatatgcttcgagaagttatgatttatgaagaggttacctgcaaattttttcatttctttttgccgacggttggctgttagttaggaaaaagaatttttgttataggattttctcttccgtttcgtacaaacccaatcattattctcgtctttatacttaactttgcctctcattttcatgttatcaatcttttaaattaaatatatcgtcaatgactgttatgaataattagttcttcattctctgccttggttcgaacctcagtcacatggtgcacgttattgtgatttcccatacctcaagagttattcaagatcccttacagaaatatatttatataatcttttatctaatgtagttatttacaaacatgtattatctaccaaaataaaaagggctaaaagcttcttgagtgagaccgcttttggttcgattcattttcctacactccaatagtattacactattgtatataacaagaatcgtgggatttgtttaatccgtacaatgaaacaagaaagatatacaataacttaatatcatttttttttggggacaatcttaatatcatttctaatttctatagaaccaaaaacactcataacaacttaaactttgttttttgtgagaaaaataacaacttaattactagttactacattgacaatttaacatcttcagctaaaaccgaatgtatatgaacatttataatctagttgctattgtatatacgattggataatacgcatatcgacatttaaataattgagcctgaagataattcacaaatatgcaatgtaaatccgtccatacagccaaaagtatgtatgtcccatgcataattgaacaaaaagaaattatattaatattatttttgttgtcttctgcaaatgctaggactgctatcattatcatcattgattttaatattgatgtttccagaaaaataaataaacaaatataaagaaaaaaacaaacacaataagtaaagctacactattaggtaataattaaagctcatttttaagtctaaaattttaattataaaataaaaacattaaaaagttaagacccaaagaaacataaatgcttttttctttcatcaatgtcaaaaaagaagttttcccaccaaatggtcaaacttggatctttgacaatattgttccaatttcatcatgccctatcttttctatttatacacataccttagatataattattaaacccaaaatttgtgttaagaaaaaaaatagacccaaaatttgtgttaagaaaaaaaatagacccaaaatttggaatatatatataagtcaccgctggaaaaaaaattattgcaagtaatttcttatatgaaattggaatgataatattttgatcaagtatccattactaaaattttacaacgctagataacgagattgcttgaagtcgaacttgtgaacaaattataataatgtaaaactaacttgtattgactaatctttgattttttttacaataatgagtgatattacattcattttattaactaaatacaacgaatatgataaatattcagtcctcttataaactttatgatagtgaaaatttgagacattgacaattctagcattctaacattttatgagattacatgaaatgtcaatttagaccttaaaccaaacgaatacatgattcaaatttgaccgacaagtacatgatgccttccctttgatcacgaaatttccacaaagagtccgtgtctgcgtaattaaccagcaatttcaagggtgtttacgtaattgtagcttaacaaataaaaaacacgaaagaagatggcgaagaaaacggaaagtagtagatagataaagaaagagaaagagaagagctggattcacatggtcttgttctttctctctccttcttttctcatcttgcggcttccctttttctctctatcgccacaatgatcattaccaaccaaactgattgaaactcatttgttctctctctctcaaatccactctctctctttcttttctcttctcctctctgtgtctctatcgccatg

SEQ ID NO: 29227 - DNA, 3003 bp, Unknown; identical to SEQ ID NO: 29226
  misc_feature (1)..( 3003): 2750-1469P.txt file - cDNA_ID_3012350; gDNA_ID_1620667; Annot_ID_163987

SEQ ID NO: 29228 - DNA, 2081 bp, Unknown; identical to SEQ ID NO: 256
  misc_feature (1)..( 2081): 2750-1469P.txt file - cDNA_ID_3012350; gDNA_ID_77863; Annot_ID_147222

SEQ ID NO: 29229 - DNA, 3003 bp, Unknown; identical to SEQ ID NO: 29226
  misc_feature (1)..( 3003): 2750-1469P.txt file - cDNA_ID_3012350; gDNA_ID_2926171; Annot_ID_140118

SEQ ID NO: 29230 - DNA, 3003 bp, Unknown; identical to SEQ ID NO: 29226
  misc_feature (1)..( 3003): 2750-1469P.txt file - cDNA_ID_3012350; gDNA_ID_2926171; Annot_ID_199501

SEQ ID NO: 29231 - DNA, 6 bp, Unknown
  misc_feature (1)..( 6): 2750-1469P.txt file - cDNA_ID_3012366; gDNA_ID_77693; Annot_ID_147208
gagatg

SEQ ID NO: 29232 - DNA, 3003 bp, Unknown
  misc_feature (1)..( 3003): 2750-1469P.txt file - cDNA_ID_3012395; gDNA_ID_1620351; Annot_ID_154311
tttagctaataataatgaaattgtggaggtgattttttattttatttttctgaatagctataacaaatcaaagttacatgcgtgtgggaataaaagcaactttttctagactatctttatcaagacacagttatagagaaacaaacgaaccataaaggttataattagttaactacaaccaatcagaaaatgatgtttttaagtttcataaagattatatatcgtgttttcctttttccttttttgataatattatcgtgtccttttaatatacatagaattggattttgtcgtctaattgtgatatatattgaagctgtaaagtactgaacttttgatgatttaagctgtaaagagaagaacagtcgaatgattagcttgcttcacttgtgtcccgggccatataattagtttagcgtagttatattctggcttgtaggtaacgctatccttttggtatatcttgacaaataacatgaagaataataaatttgcaaaacaaaaaagatttcatcagtgtaacttactaataatagtggactttgaaatatgtaatgctaattatttatccattaaataataattccatttctattagactttgtcactttcatcaatatttacattctcttaatgtatgaagcatactgattcaaagtttaaacgaagagttcttccgtatctttagaatataaaacatcaaccagcatactgtaatgcgtttactaacgagttctattgaatatttttagaagtctgcttgttctaaaactctacatgttatttaaaattcttgaattgattaaagtaacgtgcgaaataatttaattgttagtgaaggatcaatcataagttctgagagcaaatcttaagttggacgattgtgtcacatgaacgactgaatgtcagtatatagatcctgaaattgaggtggtcaagttttttcatgtgtaattttgttttaaaattagttttgttttgtactgaagaaaatgttatttccatttgcacggaaaagtcgccgaaagtcagactttgattccatagtttccacttttaagattataaatataagttgtcaaagaatataactatatatgttctttaaaaaaaaagggaaaaagaaaataactatggggttgaatgataatatttgacccagacggactaatatgtttgcaaactggaccgtattatttttgcagttgataacaatttttatgaactgtttttttttttttcataataaaatttgtctgagaggaatataagttatataacgtataacggttggtaaatgattaaacgttggtttattttacaaacaaattgttacaacccttatccccattcgaatttttttaaaaacttgaacggtaatgactggcggtaaaggataatttgtttatgaagtaaaccaattatactttttaatacgaattacaatttggtgtactaagtttttttctttatgaaatcaaagcattacagatataattaaccaagaaaccaaaaatagttttgtctgtaaacggatttgtacatatggcctgctatcactattcaaagtttatggttcaatgttcttataaactaaaaaaatatattctgaccaagaataatgatccaagaaaatagttaaagtctataatttctagagataagtatttacggaataatcatgtttctacatatctagttaattattgtacattcatagagtggtgaaagattcttgaactagaaattcgatttgaaaaatacctcatccaaatacagaacaaacgaaagaatactaaacctaaagaaacttgatttggtcggtgttctttgcacctttttctttctttttatcttgtttttctttgtgtttttatttatttgttatgttctactattatgctaatgctttgttcttactttactttctttttttttctgcttactttggaaaaagtagttgaatgtgttggaaaaaggcatatgttctgttcctgcggttttcagttaatgactttataagaaaatagaaacagctactcaaaccttgtttttgaagcaagacattaacttcttttagggcttggtcaacatttgcaataagcaaatttaatcgaatcttttatctcgttgatcatatattgaacaatttggttagatgcaaacgtgaaagcgaagaggaatctcgcaacacatagtggttatactaatatatgtttatttgacgactatacttctttaggcttcacttcatgaaccttaaacaaaatgtaaatagtttacgaactgatcagggtttgccatattagtccattactgtggtatatgagacatttacacatatcgttggaaaaactgcaattaattttaatttcgatcaaactcccagttaaaaaaaaaaaaagtattattttcaatgtaaaactatcaatctatgtggcttttggaattataaacacgggaggtcaaatggtcaactgagccccataatatgaggtctaagtttcaaaagtaaaaccctttttaaatagcataaaattgcgtgaagaagttggcactctcgatgctgcttgctcgttaccaaattggagtttattaaagtaaagttttacaaattgtactactatctcctaatagatccataaaacaatttaaaaattactagtgtagtttagctaataaaaatcacttgcaatgcaagtgtttgattaaaaataatttaagtataattttttttcttttgcagaaatttcttctatatataatcatcccatctcctcataactcacaacaacattgaaacccatttcttcgcctttaaccttacttgaatttttgtgtgggtcctttttttttctttctccaagccattgtaagctccaatcttccacattctatctcttcttcctcattttcttccatacatacacacatatatatttctgttaccatttaagtgatcataaagttttcttgtgtaggaataaaaaggcagagaaaatg

SEQ ID NO: 29233 - DNA, 1716 bp, Unknown
  misc_feature (1)..( 1716): 2750-1469P.txt file - cDNA_ID_3012395; gDNA_ID_77477; Annot_ID_147181
ggtaaatgattaaacgttggtttattttacaaacaaattgttacaacccttatccccattcgattttttttaaaaacttgaacggtaatgactggcggtaaaggataatttgtttatgaagtaaaccaattgtactttttaatacgaattacaatttggtgtaataagtttttttctttatgaaaaaatcaaagcattacagatataattaaccaagaaaccaaaaatagttttgtctgtaaacggatttgtacatatggcctgctatcactattcaaagtttatggttcaatgttcttataaactaaaaaaatatattctgaccaagaataatgatccaagaaaatagttaaagtctataatttctagagataagtatttacggaataatcatgtttctacatatctagttaattgttgtacattcatagagtggtgaaagattcttgaactagaaattcgatttgaaaaatacctcatccaaatacagaacaaacgaaagaatactaaacctaaagaaacttgatttggtcggtgttctttgcacctttttctttctttttatcttgtttttctttgtgtttttatttatttgttatgttctactattatgctaatgctttgttcttactttacttatctttttttttctgcttactttggaaaaagtagttgaatgtgttggaaaaaggcatatgttctgttcctgcggttttcagttaatgactttataagaaaatagaaacagctactcaaaccttgtttttgaagcaagacattaacttcttttagggcttggtcaacatttgcaataagcaaatttaatcgaatcttttatctcgttgatcatatattgaacaatttggttagatgcaaacgtgaaagcgaagaggaatctcgcaacacatagtggttatactaatatatgtttatttgacgactatacttctttaggcttcacttcatgaaccttaaacaaaatgtaaatagtttacgaactgaacagggtttgccatattagtccattactgtggtatatgagacatttacacatatcgttggaaaaactgcaattaattttaatttcgatcaaactcccagttaaaaaaaaaaaaaagagtattattttcaatgtaaaactatcaatctatgtggcttttggaattataaacacgggaggtcaaatggtcaactgagccccataatatgaggtctaagtttcaaaagtaaaaccctttttaaatagcataaaattgcgtgaagaagttggcactctcgatgctgcttgctcgttaccaaattggagtttattaaggtaaagttttataaattgtactactatctcctaatagatccataaaacaatttaaaaactactagtgtagtttagctaataaaaatcacttgcaatgcaagtgtttgattaaaaataatttaagtataattttttttcttttgcagaaatttcttctatatataatcatcccatctcctcataactcacaacaacattgaaacccatttcttcgcctttaaccttacttgaatttttgtgtgggtcctttttttttctttctccaagccattgtaagctccaatcttccacattctatctcttcttcctcattttcttccatacatacacacatatatttctgttaccatttaagtgatcataaagttttcttgtgtaggaataaaaaggcagagaaaatg

SEQ ID NO: 29234 - DNA, 1617 bp, Unknown
  misc_feature (1)..( 1617): 2750-1469P.txt file - cDNA_ID_3012409; gDNA_ID_77263; Annot_ID_147169
aaatgcagayctttgagaagatataaaaaaagcgttttaatagagagatttttgcacatacagatttagattcgatcattagttatttgtttctaaattcctcaattcctagtaccaagagaatgacgattttctctagtaatactggcactcttcgtttttcaacatgtaaacattactttgtataattagtcttatatcaaataaatagttacaacatgaacgtaactatttatacacgagggtaaatttttaacaaatttaaaccgaaccaaaaagatttcagttaatcatagttttgttacaagcgaaatctgaaatattcaccctcaagtttgttacgtaattgtctaatctgtgtttttttgtgctagtgttataattgtttcctcgaatgttaagcaccacatagaagtatacacttttcttttattattttcgttcttcttccatttagaaacttttattaattctactgttaaatccaacgttattagtttattttctctgatgaagttctaattttttttgtttgttggaaaaagggttacttttctgatgaagttgccgatttgtttccaaccaaacctcagctaatatagttagggagacggataagaaattgcataaagggagaggctttgtaaacacgcaagtttacgtcaacttgacacatataaactcgtatataggaattgtgtaaaatgttaatcaatatatgtttatgaatatagtccttttatttccttaatctatagtcatgttatcatcatatcggcaagaaaattactattacaacatatgtttccgtgcttcgatttgtcgatcaggtaggcaaccaaaccgggccagattagtcacaaatgaaattaggctccactttggcaagttttttcacaattaaaaattagaaagtctaaccaaactaatagaaactgaaccaaacaaaaatgttcacgcaattacgtagcacttctctatgaaatactgtggataattcgatttgagctaatctatggtaagtcgtttctctcaaactgaattaagctaaaccaaaccgaaaataaaccgttgtagaacacccataataaacatatatatgttctctactcttatttggctatttttccatttgcagatacgtgtgacaacattccaaatataggcacatgatacaaattacaaagccagaaattaaaatttataaactatacataataaggtcagtagcctaattacatccatatatttagttgggcataataaggatagcctaattttggtgcatcccgccaaaaattcggacaaatggtgaatttcaaaccatgaatttctttgttatacatacattacgtgcactattacatcaaagaaaaatagtgacgtgcataaacgtattttcttcacataatctatataaaatatatacagccatgtacatttttcaacatagaaaaatcatgtatacaaatacggtaggtgcaatactgataaactgccattccccattgcattagacgctagtcaatccaaaccttataacataaaaagttatagtccatttctttcatatccaatcgagtcaaaataatattcgagcaaaaaacaaaagaaatg

SEQ ID NO: 29235 - DNA, 270 bp, Unknown; identical to SEQ ID NO: 245
  misc_feature (1)..( 270): 2750-1469P.txt file - cDNA_ID_3012455; gDNA_ID_76786; Annot_ID_147108

SEQ ID NO: 29236 - DNA, 965 bp, Unknown; identical to SEQ ID NO: 244
  misc_feature (1)..( 965): 2750-1469P.txt file - cDNA_ID_3012465; gDNA_ID_76771; Annot_ID_147088

SEQ ID NO: 29237 - DNA, 171 bp, Unknown; identical to SEQ ID NO: 241
  misc_feature (1)..( 171): 2750-1469P.txt file - cDNA_ID_3012505; gDNA_ID_76477; Annot_ID_147061

SEQ ID NO: 29238 - DNA, 3 bp, Unknown
  misc_feature (1)..( 3): 2750-1469P.txt file - cDNA_ID_3012592; gDNA_ID_75769; Annot_ID_146987
atc

SEQ ID NO: 29239 - DNA, 70 bp, Unknown
  misc_feature (1)..( 70): 2750-1469P.txt file - cDNA_ID_3012595; gDNA_ID_76057; Annot_ID_147019
tttttttttttaatctttgctttgtgtaggtggatcttgagaaattgattttagttcaaagcttctgatg

SEQ ID NO: 29240 - DNA, 848 bp, Unknown; identical to SEQ ID NO: 239
  misc_feature (1)..( 848): 2750-1469P.txt file - cDNA_ID_3012624; gDNA_ID_76074; Annot_ID_147033
  misc_feature (1)..(1): n is a, c, g, or t

SEQ ID NO: 29241 - DNA, 4 bp, Unknown
  misc_feature (1)..( 4): 2750-1469P.txt file - cDNA_ID_3012641; gDNA_ID_31582; Annot_ID_146937
gatg

SEQ ID NO: 29242 - DNA, 3 bp, Unknown
  misc_feature (1)..( 3): 2750-1469P.txt file - cDNA_ID_3012788; gDNA_ID_30094; Annot_ID_146800
ttt

SEQ ID NO: 29243 - DNA, 882 bp, Unknown; identical to SEQ ID NO: 209
  misc_feature (1)..( 882): 2750-1469P.txt file - cDNA_ID_3012824; gDNA_ID_29585; Annot_ID_146745

SEQ ID NO: 29244 - DNA, 1449 bp, Unknown; identical to SEQ ID NO: 213
  misc_feature (1)..( 1449): 2750-1469P.txt file - cDNA_ID_3012846; gDNA_ID_29783; Annot_ID_146771

SEQ ID NO: 29245 - DNA, 996 bp, Unknown
  misc_feature (1)..( 996): 2750-1469P.txt file - cDNA_ID_3012892; gDNA_ID_28580; Annot_ID_146691
catgttaatggtgtttgatgataatgaggatggttgtagtgttgtgttattgtgtgtatgtaagaattgtagactgtatatttgacggtttgggtttacaagtctaattctagggtatagcgtttaccattgacgtcgttcgttatccctcgccgtcaaagccgtgaaccaccaccaaatctttgtgctaccgtcaaagcttcacgtctaccgtcgaagctgcaaatccactatctaagccatatatctctgaatgtcaaaagaaacttaaaattgaatcagagatggggatgcattttttagaagataaacgcattcttttcacctcattctcaactccagctcatagtttaagggcaaaaatgtccgtaacaatgaaaattggagttattatatgcttttactgttgttgttttttacggcaaaataaggtcatccatttaagctaaaaacgggtcggttttcttcgagagaaaactagttcggagtagaagaacttacatgggaaaaaatagaacctcgtgctcttgccttcttatcaagacaatcagcacggacattgtttagagtgtctgttttgaaagaaatgttttcaaaatgcttgtttagaatataagctctatatagtatacctacacatgttatcgtgggtccaaatagaagagaaaaactatatttaaaaaathaaaattatatgagatatttattttcaatgaaaaggagaaaaataaaaaataaagaaggaaaaaatataaagtttcctttccctctcgttcgttggctttgccttcccgagagagaaagataagatttggttttgcattcctcttctctctcgccgctctcaatatgcttcgatttctattctcctcttcctcttgattttgtcttcttctctttgctgcggagagattaaggaacccaagggttttaagcaagagacgcggcgaggaagctatccagaactctctgaaacatccattcctttttctcatg

SEQ ID NO: 29246 - DNA, 3000 bp, Unknown; identical to SEQ ID NO: 3184
  misc_feature (1)..( 3000): 2750-1469P.txt file - cDNA_ID_3012928; gDNA_ID_1620630; Annot_ID_47232

SEQ ID NO: 29247 - DNA, 3000 bp, Unknown; identical to SEQ ID NO: 3184
  misc_feature (1)..( 3000): 2750-1469P.txt file - cDNA_ID_3012928; gDNA_ID_1620630; Annot_ID_162649

SEQ ID NO: 29248 - DNA, 3003 bp, Unknown
  misc_feature (1)..( 3003): 2750-1469P.txt file - cDNA_ID_3012928; gDNA_ID_2926193; Annot_ID_141154
aattccgacccatttgcaaatatcgatgttttcttcgatgaaagctcgaagactattgagttctccagttggatcataaggaagatcctacagaaacaaaagtccagaccgttaaacagaacacacaagacacaagcttcaactgtaaaaaaaaaaacacctcaccttctcccagtgacggtcaatcactatgaatcccactagagctgcttcgataatgattaaaagagttttgagaattgaatactaagacctatcaaggattaaacatcacaactgaatagtattaacagaaacatataggtgcagtctatatataaaaggatacgaaacacaagcaacatccattgatagcttcagctgcaatgaaaccaatgatagtgacaatgcagaccaaaatcccaatcgccatgaaacagtagataaacctacattgaatttgaaaccaaaccaaatcaattcattggaacattccttcaaacatcaaacagtgtcttagcttaacgctttgtcctttttcaacaagattagtcaaactaggcatagatttgaatcgaaaaccataaaaatggaaactttttcaataccatggagcaggaagatctaaagaacggagattgaaacccgaatctccaccaccagacccgagaacgatacccgatacgaaatcgatcggattcttcaaagaatcagaaacactgttgatctcaattattgaattagagaaggaataagaagaatccggtgatgaagctgccggaggctgagacggaggagggtcaacgggaacgtgatgattgtattgatcgagcatccaaatcgagtagattatgattgatataccgatgaaagcttggagaaaattaaggatcttgagaatcgaagcgaacgagacatggcaacaattgtgtcgcattttttctatcacgattcttgatatcgaaatcaaacttctgagcagcgatcgccgaaggaagagtctttgatgatttcggacaaaacagaaaaatgttgttttgacagataggatatattccgaagcttactaattaatcattaacgaaaatttattaattaacgaaaattttcattatcattaatgtaatagttcaaaattttgatatagttgatgaggccaaacaaactaaatgggctagaattcgaataaatgggcttagggtcaggaaagctcattgtgaagagacttcccgcttcagaagttcaagttcaagtgatggggggactcaggttagagatatttgagacttgaagtgatgcaaaaggtacagctcatgatgattgtattgtgatgatgataatggtatgaatatgatgatgagaattaagtatgcatgtgaatgttagatgactgaaaaagatagacaaccacttatataactaaccaacaacattttaggctttcctctttctctctctctgtttttatttattgatttttgggtacactaatgtttaaatctgtctctttaattggacggcctagcattcttagatctctcgatactgttttaccaataaaaccatattcagaggtgtcattttgtcatgtgtatttgttgtttttccccatgtatcacgtaaatgaatggtacatttaggggtgattacttcaaactttcatttttttctgaacaaaatgaaaaccaaggaaatcatgagttcacacccggattaataggagtattttggaatcgaattgaaattgcagttgaatttgaactttggactatatccacaaaagtaaactaggtaccactaaaccattaaaattttgttgaatttgttggttttaggcaaatgtttgagttttatgatttcagtgcaacttttataaggacataaatatctatttaattagtccataactaaaagtagcaaagttgtaagatattacagattctaaaagtcattttgtaagacataaatatatcatacctttttaatatgctgaaacatgtcagaacaaaatttataagtatcaaaatggattatcaatctttaatttataaaattaactgaataaattggaactttattagactttcaattaagttgtccttttaaaaatattttcaattaaagatgattttttttttgtcaaacaaaatccatgcatgatggataatattaaatccaaaatcttttttttgattacccacgcctaatctaaaaattcctatatcccatatatatatgtgtgtatgttacataatatccatcagagaaatcaacataaaccaaaaagtgatggataacaaaacatctttgtggaagataaggaagatcttaacagagaaaagtgatggttggttggactttgataataacaacgatatcgagaatcatattttgagaagtttgggcgaatccataattagtagagtgaaaaaagactctataaagataaagatcgacgattatgatacagggagccagcacgaggtaaccttcgggtataatcatgaatctgatacatattacattggatcattatggagattgaaggagcttgctgctggagatgaaataggattgttttacgatcctatttcaaagaatttgtgtttctctgtgttgaaacaagcaaaatcctgcttgatcaaaaaatgaaataagcaaaaccctgatgatcacaacttgtttaattatggttaattatacagcatagtaattaataagatcttgtttgaaaggacatatataagaatatgtatcgacgataatcatttctatatattaataaatatacaagttttgacatttcacttttgttcctcttaaatatgacaccttgtttctcaccattagatcgaccgacgacataagtaataacatttattacatacaccaaaaaaacaagcaaatcattaatacaattttccattagtgtatataacaaacaagagactaatcttttctttaacatttcatagtattacaaaacaacgccaaaagtcaaaaggtttcgctttctagatcatg

SEQ ID NO: 29249 - DNA, 3003 bp, Unknown; identical to SEQ ID NO: 29248
  misc_feature (1)..( 3003): 2750-1469P.txt file - cDNA_ID_3012928; gDNA_ID_2926193; Annot_ID_201240

SEQ ID NO: 29250 - DNA, 643 bp, Unknown; identical to SEQ ID NO: 197
  misc_feature (1)..( 643): 2750-1469P.txt file - cDNA_ID_3012997; gDNA_ID_27003; Annot_ID_146592

SEQ ID NO: 29251 - DNA, 186 bp, Unknown
  misc_feature (1)..( 186): 2750-1469P.txt file - cDNA_ID_3013010; gDNA_ID_26975; Annot_ID_146574
aaatcaaattagtgatgttacttgaacagttcaaaaagaactgggattattatgcattcagtttataacttaaggggttattatgttattaacaagtttactttcgtttggattttggaattagacgcgaagctgtgaaatctagaagaagaagaagaagaagaagaagaagaagaagaagcaatg

SEQ ID NO: 29252 - DNA, 373 bp, Unknown; identical to SEQ ID NO: 193
  misc_feature (1)..( 373): 2750-1469P.txt file - cDNA_ID_3013024; gDNA_ID_26737; Annot_ID_146564
  misc_feature (238)..(238): n is a, c, g, or t

SEQ ID NO: 29253 - DNA, 1626 bp, Unknown; identical to SEQ ID NO: 186
  misc_feature (1)..( 1626): 2750-1469P.txt file - cDNA_ID_3013044; gDNA_ID_26036; Annot_ID_146529
  misc_feature (1)..(1): n is a, c, g, or t

SEQ ID NO: 29254 - DNA, 520 bp, Unknown; identical to SEQ ID NO: 172
  misc_feature (1)..( 520): 2750-1469P.txt file - cDNA_ID_3013051; gDNA_ID_23898; Annot_ID_146422

SEQ ID NO: 29255 - DNA, 209 bp, Unknown; identical to SEQ ID NO: 28
  misc_feature (1)..( 209): 2750-1469P.txt file - cDNA_ID_3013115; gDNA_ID_1087; Annot_ID_144787

SEQ ID NO: 29256 - DNA, 3000 bp, Unknown; identical to SEQ ID NO: 9332
  misc_feature (1)..( 3000): 2750-1469P.txt file - cDNA_ID_3013269; gDNA_ID_1972069; Annot_ID_178539

SEQ ID NO: 29257 - DNA, 225 bp, Unknown
  misc_feature (1)..( 225): 2750-1469P.txt file - cDNA_ID_3013273; gDNA_ID_3424; Annot_ID_146291
acaaaaatatactaatctaaagtttttcagtttgttcttttgaaaaagaaaagaattatcataagttgactcaccaactctttaccatggttaagtaacttgttttgaagtctctatatatacaaatcactaacgacacatcataacatactactctcttaagccctttcataaccttgtaaaccattaagaggctttgctcaattacaagaagaagaaaaaatg

SEQ ID NO: 29258 - DNA, 3000 bp, Unknown
  misc_feature (1)..( 3000): 2750-1469P.txt file - cDNA_ID_3013289; gDNA_ID_1974091; Annot_ID_180599
taggtggggctgcccttgatgtgtttgagcaggagcctcacgtgcccgaggagctctttggccttgagaatgtagttctcctccctcacgttgggagtggcactgtggaaacacggaatgccatggccgatcttgtcgtgggtaacttggaagcgcacttttctgggaaatcacttctgactccggtcgtctgagtcatgtgacacatttgggatttggtttcacttcatttgaaaggtttttatgttaacgaactcatgaaaagggtaatttctcttccaaaagaaagttgcactgtcgtatataaggaacggatttgaacactaggcgaatcctctccgttttatgtctcttactcatctttcttttcacaaagtattggtctagtatacgagtggcgcatacggcaatacgtcaagtcattaaccatcccagaccaaaaaacgtttacaaaactactcatagatgtcagtcaagtgaagcaatatctattttgttgagaatcagctgaacctaaaaaaacgtagagaagaggatgacataaaacaaaacccaaaactttaattagggctcctttcgggccttcttggtaggttgcacgttttcaaaacactcatctttgcctttttcctttttgtgaccttctttcctgatgcacattaacaaagaatcttggagttaggttggtaaacaaccaatgaagtaccagcaaggagaacaaatgagtggtggtacaagccaaatcccaagtatgttccctacaatgaagaataaacaaggtttggtttgatgtcataccctccttccagctcagctgatgatagtcttttccacaactctctctccatctcccctgaaggccattagtacactagtcattttcaacgtttctatgattaactccatttctttggtataactaacaccatggaattgccaccttaccattaattgcttctaaggctactgagaagttattcttcacaactaaacctccaacaaactccacagctgcacgggctttcattgctgtttctgaatctgtgaaccaaacgtaacccgaatccaatccaccagagtattctatgtgctgcagtaagcacaggaaaagatgataactcaacaatcactttttaagggattggtggtttgacaaaaagtgttgcaacttacttcaacgctgccaaatctttgaaaaagatccttgagaacctcagagctgacagaattactgttgttccatgggggaaccacaagttgatcagtgttgtccttgcacaagctagcacatgagttatctccattttccttctctctatcagcaatgcctgtctccttatcttccttctctttaattttatttttcagagcgctgggtttttctgcaacccagagaagttgcttaaagagcagttcatactttttcagagattaacagtcctgagaaaagagaaaatacctttgtttgttactttttcttcactggctatccatttcaatgcaaatttgacaatttgtcctctgcggaatctgtagcaatataaatatgagcagtagaaatgagcaaagttgcatttcaatcaagaagcgttttgataagacaaaaaaacaagaaacggactcgttgtgggactctgattttccgagttgcttgatcatattctctctttgacagtcaaaatcactcctgcatatcaaacaggaatagtcaggtcatgccaatccgctatatatatatatatatatatatatatatatatatatatatcaaaacacaaagcatcccccactcccacttacttactttggtattaatactaagtcagcgcctgcatagaccaagctctgcctcaaaatatcttgagtgtcttgttcagaggagaattcaaccaacgcagtgccacaaaagcgtcgcttatcagcgatgttgggaggtagtctcacactgttcacctgaacaagtaaaatcagatgagcaaattcaaaaagctcgtttggacagtcatttgagaagaagaaccttggcatattgggagaagaaagatgagacatcctccatcttaatgctgtactcaaaaggtgaagccgcaagggttcttctgtggacttgttcaagcacctcttccggtttggagagtttagttcctctaccgatcctttgtcctggatcaacaaggttaaagtatatatctcacaccagaagaattgacaaacaaaccaaagggagggaaagcacaagtaccattattggaaactttaagaaaatcagaggtgcgcaagagattagcaacttcctccacaatcctcggagggatgtcttctctattgatgttaccgaggccaaggaggttcctcatacgagagaaggaacaaaccagaggcaaactaaccactagtttcgggcatctaaggaataacttttcaactatatctgtatgctacaacaatatatatgtatacaggatacggccatctttgctcttggtgacttccctgttgagaaatccgtctgtgggtagattactgtcactgaagtagaactcaaccttcaaccatcagcaaaagaagctacgaaaatgaaatcggggaaattagagatgagagtgaaggaagcatagataaattacagacctgggtaagcaacttcttggcggtttcttcgttgaaggaggaggccatggctctctagctgcaattgaagaagagacgacgagagtgaagaagagacgagagagagagaggggaattgaaggggttggatctcatacattaataggcccattaacagtgctggcttgacctctgtcacataggcccatctattaattgggcttaacttttatttctatcgtttgagcttagtggttgggctattcaatgtcccctatagaatagagtattcttacgtccaaacaggctcgtcttcttcgaaatcggcggcaaaatgccatcaaaccctccaaaccggaactgatttcccttactgtgacgacctcaatg

SEQ ID NO: 29259 - DNA, 531 bp, Unknown
  misc_feature (1)..( 531): 2750-1469P.txt file - cDNA_ID_3013289; gDNA_ID_3401; Annot_ID_146276
  misc_feature (1)..(1): n is a, c, g, or t
ncatctttgctcttggtgacttccctgttgagaaatccgtctgtgggtagattactgtcactgaagtagaactcaaccttcaaccatcagcaaaagaagctacgaaaatgaaatcggggaaattagagatgagagtgaaggaagcatagataaattacagacctgggtaagcaacttcttggcggtttcttcgttgaaggaggaggccatggctctctagctgcaattgaagaagagacgacgagagtgaagaagagacgagagagagagaggggaattgaaggggttggatctcatacattaataggcccattaacagtgctggcttgacctctgtcacataggcccatctattaattgggcttaacttttatttctatcgtttgagcttagtggttgggctattcaatgtcccctatagaatagagtattcttacgtccaaacaggctcgtcttcttcgaaatcggcggcaaaatgccatcaaaccctccaaaccggaactgatttcccttactgtgacgacctcaatg

SEQ ID NO: 29260 - DNA, 3000 bp, Unknown; identical to SEQ ID NO: 7203
  misc_feature (1)..( 3000): 2750-1469P.txt file - cDNA_ID_3013398; gDNA_ID_1621133; Annot_ID_56490

SEQ ID NO: 29261 - DNA, 3000 bp, Unknown; identical to SEQ ID NO: 7203
  misc_feature (1)..( 3000): 2750-1469P.txt file - cDNA_ID_3013398; gDNA_ID_1621133; Annot_ID_172541

SEQ ID NO: 29262 - DNA, 1359 bp, Unknown; identical to SEQ ID NO: 108
  misc_feature (1)..( 1359): 2750-1469P.txt file - cDNA_ID_3013398; gDNA_ID_2695; Annot_ID_145867

SEQ ID NO: 29263 - DNA, 2912 bp, Unknown
  misc_feature (1)..( 2912): 2750-1469P.txt file - cDNA_ID_3013405; gDNA_ID_2598; Annot_ID_145808
  misc_feature (26)..(26): n is a, c, g, or t
gcagcatcaagaacgtagacgtcgtngtcacactcaacctctagctcaccttctggtgtgatgaacttgaccttgtatgtagccatggctgtgacacgtccaccacgagcggtgcctgatttgagaccgaagagggattgtgtgttggctgatggaagggaacggagactgattggagctggggaacgacggatgaatgaagttccgacgatggcgcttgagagagcagtggaagccatttttttttgttttgtgttttgggagataaagttgagatttttgaggattatggcttgtggaaatggcgtggagaaagattaaaaggtgagaactttttagtgagaatcctatctaccacgtggcgtctattctgtggatcgatggattatcgtctttgtgttttatgatttgtgtgtgtgtgattgtgtttgacacactttaagaacactatcttgttgaggtgagtattacgtggtcttacttgggacagctcacacttattcggaccttgtttgtatcgtctaaataactcttcgtttgttccactaaaatcataaaagatgtggactggttgtaacatcatatctaggccgggtttaacttccaaaccgtatcaacctgaccgaatcaaaccattttaacccaattactgtaaattactccattataattatataacgtaaataattgaaccttacatagaatgtataccaaatcaacaagtgaatacataatctccaccttcacaattcagtcaacttctaatggcctttcagtacatgaataaattgtggggagaagaggtcatacttgcttgaattgggtggaagtagttttctagtgaagaccagcctcttggcataacgtcggaaagtagaaaaatcctcagaaacttaaacacaatcaacagagtagagtatgagaccatctacatcggttgattctcaaaaaagagtttctcatgaaaaaaatattgcttattttaattgaatttagataaagtattaaattttaataaaaagaataaaatcaatcatttctggaaaaacacgtggccataaacgtttttcagagtttctgaaaacagagacgattctcacttctctcttcttttcaccactttgtattattttaataataaatatctcttttaaatactgttgatggaagtgtcctgataggtttaaaactttttagttatttttaataaaaagtgactaaattttttattttagttaaagaaaagtggttgagatctcttttaaaaacaatctatctatcatatcgaaatgacaaattagataatcgtattatcaaaagctagatctaactaggaattgcaagagcatattttgcagccccagttcaatctactacatgttgcaaatagacaaatagataatcatatagataaaactcatcaaggagattgacttattgttaacgaaaccaaacccatgacataatttagtaatgatgtaagtgtttttgtacatgaaacagtttgccacaagcaacaactggacttatgccactgaaatcaacgaaattagaaaccatattaaaacctaatccatagtgccacgaacacaagaaacctacaacgcagtcgataaacacttcctagaattacgtttcttaaagttgtgcattagccttacttcatctattgggccttaaaatcataaagcccattacgagaatgcaatcgtaaatgttttttttttctttcttactcaacatctatatgatatatccgttatctgttggggtagcttaagcaaagtcacaactcacaaatctatccatcattcaatgttaacaaatctattgcttttttagttaagaagagaatttatttagtttgcatctcctattattttaacaaaactaataattttttgcaaattttaaaattatatctcaactttatacatataatcaaaatgtgatttcacatagccacattcggaaagtataaaccaaccattctacaaacaaccaacaagtcaatgtttaattacgtttttcaggttaattcagaagttgttccaaatcgaatctttccgtaaaaggcaaaaacatatctagacaatccaacaagataactaagtcatattcagattcgttatataacttatatagctttctactgaccgttagttgcaattatagtttatctaatattaaactaactttcttttttgtaactaaatactctcgggtaaaaaaagtcctaacaatctcattttttgataactggatactttaagataaaatccaaactaatctccagctcttataaagatccactagagaattatagtaaacattcttgagtacaagttgttttcgtattctcttgattctttaaaaaaagcatatccaataaacaaatgatgttctcgtagaatcggtaaattgcaaaaagatgaaaaaataagaaatagacgcaattctgtgacaactaaaatatccttttcacatatagcgacgtctcagtcactaaagaaccgatagaattggaatttgtaggtcccgcatttattaatatacctcttaaattaaccaaaaataattcaataagtaaactattacttaaataataaaaaaataagagccatcgtgacttcgagagaagaagccagcaaggaacgatggagattattacggcatcatcatcatcatcatcatcattgtaattcgtaatcatatcttcttttggaatttcttcacggataagaaaaaaggatatcgacaatttcgcttttgctttcaaaatctcattctatcactttgtgccttttttagccatcgcgaaaaacctctgaatcgcatcccttgattttctgggtttgtgactttgtgtagtggaaattaggcttgttgtttgatttcgctacgagaaaatg

SEQ ID NO: 29264 - DNA, 593 bp, Unknown; identical to SEQ ID NO: 88
  misc_feature (1)..( 593): 2750-1469P.txt file - cDNA_ID_3013435; gDNA_ID_2391; Annot_ID_145692

SEQ ID NO: 29265 - DNA, 3000 bp, Unknown; identical to SEQ ID NO: 14407
  misc_feature (1)..( 3000): 2750-1469P.txt file - cDNA_ID_3013477; gDNA_ID_2684116; Annot_ID_190808

SEQ ID NO: 29266 - DNA, 587 bp, Unknown; identical to SEQ ID NO: 293
  misc_feature (1)..( 587): 2750-1469P.txt file - cDNA_ID_3013477; gDNA_ID_1563442; Annot_ID_147685

SEQ ID NO: 29267 - DNA, 3 bp, Unknown
  misc_feature (1)..( 3): 2750-1469P.txt file - cDNA_ID_3013497; gDNA_ID_1759; Annot_ID_145348
cta

SEQ ID NO: 29268 - DNA, 791 bp, Unknown; identical to SEQ ID NO: 92
  misc_feature (1)..( 791): 2750-1469P.txt file - cDNA_ID_3013557; gDNA_ID_2413; Annot_ID_145709

SEQ ID NO: 29269 - DNA, 504 bp, Unknown; identical to SEQ ID NO: 85
  misc_feature (1)..( 504): 2750-1469P.txt file - cDNA_ID_3013567; gDNA_ID_2362; Annot_ID_145667

SEQ ID NO: 29270 - DNA, 3003 bp, Unknown; identical to SEQ ID NO: 26527
  misc_feature (1)..( 3003): 2750-1469P.txt file - cDNA_ID_3013579; gDNA_ID_2213624; Annot_ID_195779

SEQ ID NO: 29271 - DNA, 31 bp, Unknown; identical to SEQ ID NO: 46
  misc_feature (1)..( 31): 2750-1469P.txt file - cDNA_ID_3013609; gDNA_ID_1706; Annot_ID_145304

SEQ ID NO: 29272 - DNA, 16 bp, Unknown
  misc_feature (1)..( 16): 2750-1469P.txt file - cDNA_ID_3013635; gDNA_ID_3560; Annot_ID_146348
aaagctgcaacaaatg

SEQ ID NO: 29273 - DNA, 499 bp, Unknown; identical to SEQ ID NO: 80
  misc_feature (1)..( 499): 2750-1469P.txt file - cDNA_ID_3013649; gDNA_ID_2306; Annot_ID_145631

SEQ ID NO: 29274 - DNA, 3000 bp, Unknown
  misc_feature (1)..( 3000): 2750-1469P.txt file - cDNA_ID_3013660; gDNA_ID_1972133; Annot_ID_179131
ccggagaacttggtcacttataagttacttggagaaccagatggaccacattatgcacactatgatttggttggaggacgactggtatgtttgttccccagtcatttctaggtctcctcctatgttggaactttgttcaatgctgtatcatgtgcatgcttgtttcgtttgttaatcgtttctctgacaacttactgcaggcagtggagcaagtctatccttgcataactgaatttcttagccaccatgattccgcataagtgaaacatttcgggagtttctgttccttgcatgctatagcacatgtagattgtagacgtcgcactaaggtggtgtcgaagaagtgtgtttcagaagcgcctgttaaaaaggatgccatttccgtttaagacacgtacatttagtatctgggcaaactgtacatgagcttaggatgcagttttttcaagtcatacacctgtaaattaggaaaagcatcgaatgagatgctggaagctcttgtctactgtgatgatttcccttgttttgttatggcaacgagctttttatttgaacatttatctttagaagaactggtgtgttctcttgtactgctttgcttcttttggaggacttgagttatccatgagagcaattgtatagacatggatttatgtgtacattttctgtcttagatccattaatgacacagccctacttctcagataatgtgtgggatacatgatgtaatgatagatctgaattgtctagtattaaacaacagagctctctttcatgaaagatattgtctctccaccatcatgtaagaccatacctagttcttctctttctttgtccataaattaattcgttggattctctatggtacagaattctctagcacgacttacctatttcttttgtaacgtgtttgatgttgagtgattacaggttttgacttgagacaatgagttgtcaacactctctgataacattgagacacttcactagatagagatgtgcttgctgtgattagtatagtacaattctgacttcacgataatttcaggtttttgtgttggctgaccagatgtattgcagcgatcctccccatcccttgcacttagtggcatcagacaaacaacaaaaagaccacaaactgatcctttcctggaaggtaatgtgttcttgtcttttgtttgttccctgtctgcaatgatgtctcttaactctcctgacactcttagccttagctgcttgatataaatcaacatcattctcacctttctatgtatctgttatgtgctgaatatgtatttgttatagaaaccaacaatggactcagacccactcggtgttttcccaaattctcccaagtatcatccatattactcgcagaccacggagtttggtggcgtaatcgatttaggtctcagcctgagaaccatacaacatgagatttaccactcatctggccaaagtgagtttctttgccgtttccattagtatttccattacctttaatttcttggtaaattttttcaactctgagacggtgtttacttatgagttatgacatgtggcaaaggatattgtagtaatgaaggatacagacggaagtggggttatgtaaaggtcaccatggatggtttggtggtaggtcgcaaggtctgtgttcttgatcatggaagctattcaactcttgctcatcaactcgaggacatgtttggtaagtttttcatgggaagcttgggattcaaagatgagtaagtactataagtagtaatgttcctagtaggcttataccggatgttcattacaatctgtagggatgcagagtgtgtcgggattgaggttgttccagatggagtctgagttctgtttggtctacagagacgaagaaggtctgtggagaaatgctggggatgttccatggaagtaagctcttgatactttctttgtagattactgaaataaagcgtttacatgtgttgtgatttgtaaatgacagtgagttcatagaaagcgtggagcggctgagaatcacaagaagaaacgatgctgtacttcccttttaatattagcttctctctttcttcactctttgttataatttccaagtcagccttgaatcggaaatgaaacaaaagagaaaaggtaaatgtaactttgaatacgattatattcgaaataaagaaagaaccacgaactacttttttcggtgaaatcctgatcactagagctccgatatgttacgtctggattctcgtcttaccatgatacgaagatattgtgaaccatccagttttaagatatagtggtgtaattacgatggtgaatttgccattttatctttcatacttttcaattcataatccgcataaacgaaaaatgagtaggatatcgaaggccttgtgaagacaagagagctcaactccggcgacaacctcgatcttttttcttacattttcattcatacggagttgttgaaagtctacgacgttatcttttacacgtaagagtgactgaaccggtggctgattaggatgacgtgatttccataattaattcaacaccctccaaatacagaaagacatgcatttatatagtataaaataaagacatatacagtatatgctctgcatgcttaatattgttacaagtcaatgagtcatccattcatatctaatcctcctaagaacctaatctgatccatatccatttattactaagaaaacgtttttttgtttaacataaccaaatcaaaagaaggaataatttggaatatccagagaagtccatctcagcatccaataggcaataggaaaggtttgaccaaaaacgtatacagataataaaaagtgtgcgtcagctttgagtggacgctgcgcctcgacgcctccattccaatctataaataaagaacgagaactaagacataaccatccaattaagaaagagaggattaagacataaacaagacaaaacaagaagaagagatttatttattacataaaaatg

SEQ ID NO: 29275 - DNA, 1034 bp, Unknown
  misc_feature (1)..( 1034): 2750-1469P.txt file - cDNA_ID_3013660; gDNA_ID_3592; Annot_ID_146376
tgtgttgtgatttgtaaatgacagtgagttcatagaaagcgtggagcggctgagaatcacaagaagaaacgatgctgtacttcccttttaatattagcttctctctttcttcactctttgttataatttccaagtcagccttgaatcggaaatgaaacaaaagagaaaaggtaaatgtaactttgaatacgattatattcgaaataaagaaagaaccacgaactacttttttcggtgaaatcctgatcactagagctccgatatgttacgtctggattctcgtcttaccatgatacgaagatattgtgaaccatccagttttaagatatagtggtgtaattacgatggtgaatttgccattttatctttcatacttttcaattcataatccgcataaacgaaaaatgagtaggatatcgaaggccttgtgaagacaagagagctcaactccggcgacaacctcgatcttttttcttacattttcattcatacggagttgttgaaagtctacgacgttatcttttacacgtaagagtgactgaaccggtggctgattaggatgacgtgatttccataattaattcaacaccctccaaatacagaaagacatgcatttatatagtataaaataaagacatatacagtatatgctctgcatgcttaatattgttacaagtcaatgagtcatccattcatatctaatcctcctaagaacctaatctgatccatatccatttattactaagaaaacgtttttttgtttaacataaccaaatcaaaagaaggaataatttggaatatccagagaagtccatctcagcatccaataggcaataggaaaggtttgaccaaaaacgtatacagataataaaaagtgtgcgtcagctttgagtggacgctgcgcctcgacgcctccattccaatctataaataaagaacgagaactaagacataaccatccaattaagaaagagaggattaagacataaacaagacaaaacaagaagaagagatttatttattacataaaaatg

SEQ ID NO: 29276 - DNA, 734 bp, Unknown; identical to SEQ ID NO: 188
  misc_feature (1)..( 734): 2750-1469P.txt file - cDNA_ID_3013704; gDNA_ID_26049; Annot_ID_146539

SEQ ID NO: 29277 - DNA, 1156 bp, Unknown
  misc_feature (1)..( 1156): 2750-1469P.txt file - cDNA_ID_3013785; gDNA_ID_836; Annot_ID_144553
  misc_feature (709)..(709): n is a, c, g, or t
  misc_feature (715)..(715): n is a, c, g, or t
agtctcaactttcctagaattcctatgtggggtttgccttatgctcatatgtatatctcataaatccgatacaggttgcagaacgagcactgttcttgtggaacaacgagcacattgtgggtctaatcgcgcaaaaccgaagcgtgatccttccaatcatatatcccacactggagaagaacatccagtctcactggaaccaagcagttcatggtctaaccacaaatatcaagaaaatgttcatggaaatggatcctgaactgtttgaagaatgtcagagacagtatgaagagaaacaagcgaaatccaaagaagtagaagaacaaccaatatacatggaagagattagcagaagcagcggcggagcgagatggaggaggaggagaagaagatcatatgatcacttcctagatcgatcaaaaagggtataattctttcactttttttttgtttgtactcattttatcaaatgagttactatattaattttcttatcaaacttaggatttgtttgttgttttgagaatcatgggttcaaaatctgattgctcagagaagtagagagagagaagtgagccattactatcagagaatatgtctttagtactaagaaatgtgtttgtgatcttctgtctaattttgttcgtggaaaggcacttataaaattttgtaaaatttttaattatatatactgtggatggatgtttgnagctgngttattagccatctcaaaatccaatttggttttcttgttttgatccattcttaccctactttttgtgttatttgtatcaaaactttgaatttgtatataggaggaaactagtcttccaactgatccaggacaatgtatttgattcctcaatttccaaaagataagaagagttttcattttaactcttaaggtaaactaaacacaatatcgtcttctttattattaaccaaattggttcagagccattggaccgaaaacatagaccgagagaatataccaagttatatacagttaactgcgccaattcaccacgagaaaacctaaattttattgaggtagcttattgcacggcggcgattagttgttttacttgttacaagaaaatcattcacggcggtggagaaaaaacaaaagagagcgagacaaagagagactacaatg

SEQ ID NO: 29278 - DNA, 214 bp, Unknown; identical to SEQ ID NO: 38
  misc_feature (1)..( 214): 2750-1469P.txt file - cDNA_ID_3013870; gDNA_ID_1466; Annot_ID_145090

SEQ ID NO: 29279 - DNA, 1663 bp, Unknown; identical to SEQ ID NO: 178
  misc_feature (1)..( 1663): 2750-1469P.txt file - cDNA_ID_3013897; gDNA_ID_24677; Annot_ID_146450

SEQ ID NO: 29280 - DNA, 593 bp, Unknown; identical to SEQ ID NO: 160
  misc_feature (1)..( 593): 2750-1469P.txt file - cDNA_ID_3013944; gDNA_ID_3448; Annot_ID_146306

SEQ ID NO: 29281 - DNA, 3003 bp, Unknown; identical to SEQ ID NO: 22263
  misc_feature (1)..( 3003): 2750-1469P.txt file - cDNA_ID_3014067; gDNA_ID_1620655; Annot_ID_47846

SEQ ID NO: 29282 - DNA, 3000 bp, Unknown
  misc_feature (1)..( 3000): 2750-1469P.txt file - cDNA_ID_3014067; gDNA_ID_2926209; Annot_ID_141874
cttttcagattcaacccaaaattgaagacaaaaatgtctcgcagatcgctaactctcctcaagaatctagctagaaacgcgaatggatcaggtattcaaacccgatccgtgacttacatgcccagacccggtgacggagcaccacgcgcagtgacgctgatccccggagatggaatcggtcctctggtgacgaacgccgtggaacaggtgatggaagcgatgcacgctccgatcttcttcgagaagtacgatgttcacggagaaatgagccgtgtgccgccggaagtgatggagtcgataaggaagaataaggtttgtttgaaaggtgggcttaagactcctgttggtggtggtgttagttctcttaacgtccagcttaggaaagagcttgacctctttgcttctctggtcaactgttttaatttgcctggtttacctactcgccatgagaatgttgacatcgttgtcatcagagagaacactgaaggtgagtacgcggggcttgagcacgaggttgttcctggtgtcgttgagagtctgaaggtgagaattccgatttctgctcctcgttttggattcaatctgtatttgtggaatcatcttcgtttgcaagtggtctttgtatgttatgtgtgattgttctgatcctatttctatgcttaggtgatcacgaagttctgttcggagcgtattgcaaagtatgcttttgagtatgcctacctgaacaacaggaagaaagttacagcggtgcataaggctaacatcatgaaacttgcggatggtttgttcttggaatcttgtcgcgaggttgcgaaaaagtatcccagcatcacctacaatgaaatcattgttgataactgctgtatgcaacttgtagccaaaccagagcaattcgatgtcatggtatgtttcagagttatatacatatgaattttcatgacgttctttaagtcttcgatgttttactttgagaaaaagataccagtcatctctccctagtttggtatccctctagattgcctgttttagagtcatattatcttattggtatgagactgatgttgtgttgccatatactatagttaatcgccccatttgcatactatttaatctcgtcatttgcatatcatgctttcagggaatcttttaaattgtacttctgtgaccttgtctatgtatacttactactttgcatacactattgttcgttagagcagtaacttcactgttgctaagtattaacctttcattactgtatgtagtagcgtcttttggcttttccccccttttataacagcaatttatgaaatgttttgcaggtaacgccgaatctctatgggaatttagttgcaaacactgctgctggtattgctggaggcacaggagtcatgcctggaggtaaaaaaacatcctgtattgatattctctcgagctatacattagtggataaagaatagttctaaaatttatacatctgcgacattaaatacaaaaacaggaaatgttggggctgaccatgcggtattcgagcaaggtgcatcagcaggaaatgttgggaaagacaagatagtattggaaaacaaagcaaacccagtggcattgcttctctcatcagcgatgatgcttagacaccttcagtttccttcatttgctgaccggctcgaaacagcagtgaagaaagtcatcgctgaaggaaagtgccggacgaaagatcttggtggaacaagcacgactcaagaggtcgttgatgcggtcattgcaaaactagactgactttgacaaattacgtgttcccgctctgcataaatcatcaaattcctgatacagattttgtgttgccaaaatatggggtatgatccaagcacaacggttatctggttttgtacctcgagttttattatattctttagccgtggaatatttcgataagaaaaaaaaacatgttccaaataattcatgttgctacgtttgttggcgccttttgtcatgtcaaagtttcttaaacacttgttcgtggaatatgcaaacttttatggattcgtaatttcaagaatatgaatgaaaaattgatggtatctttgatcacctcgaatggtggtttcttaagagcatccacattggttaatttttgatggatgtttttaaatataaaactttattttaagaggtttttgagtagttaagaaactctaacgtgtcattgtgtgtgtggttgaacattgtgacaacatcatttatttatttttcttttcgcgtttttctctcttttttagtccatatgatttttaatatatatatcatatttgtttaaaattttaatatttgtattatttattaagttttataaaataaaatataaataatttttattttaataataatatatttttttaaaagacccacttaaacattagaccaaaaaaaattaatggtccaacaaaaacactttaattttttataatttaaaattttaaaaaacccttttaagggctcaaccattggggttgctcttactccaagtctttaatttaatttgtgaattaacattgactaattttaaaatcacttgaaattgtttcatcggatttgggatgtcacatttggtacccggcaagttcgaaaatgacttttaaactttgacacctcttgcctcttggtagagttttggatgaggcttgaaacttttgtattgcagcccataactgaaaatagtttattagtataatatatcttctcaacaaacattgcaaatattttgaaaatccagctaaaactatacccgatcagaattagaaaatttgagcccaagcccggcccgtaagtattattatagaaaccgatataaagtttcctttttcttaataatatttattccgtggcagcaaatgcaagccaatccaatgtcaaaacaccagctgacgtggccaaacgcacatcaactgtcgtctctctatctctctctccctcacttgtctctctctcttctcttcgacactgatg

SEQ ID NO: 29283 - DNA, 3000 bp, Unknown; identical to SEQ ID NO: 29282
  misc_feature (1)..( 3000): 2750-1469P.txt file - cDNA_ID_3014067; gDNA_ID_2926209; Annot_ID_202454

SEQ ID NO: 29284 - DNA, 999 bp, Unknown
  misc_feature (1)..( 999): 2750-1469P.txt file - cDNA_ID_3014129; gDNA_ID_2878; Annot_ID_146025
tgtaccttgcatgcaagtttcgttatcaattgctagatacttgcggtgagggtatctccattttggagatatgaaaattgctttgtgatatagcaatgtagagttgactcttgttaatcaaacaaccctagtgcctttatggcttagtatgcatcagtttcttttcttttcttctattagccacagactacagtgagtgtatttacacgtttacaacacacttaacatttcagtcaataaaatgaagaagaacaggtcagtgcctgcaggaatgttctcaggtatattggacattgaaaatagcaaaagagtttgatgcaggagaatcagattcttgtagaatgaggttcttttcttccccacacaggaaaagaaataacttttatggagttgactcttgagagaaatgttgtttattcatttttatctagaaaacaacaggagttagagcctcgtgggtgcattctgactcactcctgatatattttaaacatggatctgaattctgaaggtctgctcgagagttcttgacttctgacgaagtgaacaacgacaattcgccttcattccctcttatctctgcctctggtatgaatcttatgattctaacaacggattagtatagtgaataatcagctttggtaatcatgttgatgccatagttactctgctctcaaaaaagaaatgtttgatgtttttctggacgttctattttagtcataaagcactagcagcatctctctaaagtgactttgactttcgttaggactaggccctgtttaatatacactatttgcaaggataattccttactttaagttttaaagaaaatatctgattcctcaccaccatttcttggggtttctatttcttttattggcaactttctcctcttggccctcatgtctaattgtatatatatagacatcattacagaaacagtttcttataagatttccaacatccaatagtgtcatttttagtctgtagatatcaatg

SEQ ID NO: 29285 - DNA, 208 bp, Unknown; identical to SEQ ID NO: 117
  misc_feature (1)..( 208): 2750-1469P.txt file - cDNA_ID_3014187; gDNA_ID_2810; Annot_ID_145949
  misc_feature (16)..(16): n is a, c, g, or t
  misc_feature (57)..(57): n is a, c, g, or t

SEQ ID NO: 29286 - DNA, 188 bp, Unknown; identical to SEQ ID NO: 113
  misc_feature (1)..( 188): 2750-1469P.txt file - cDNA_ID_3014198; gDNA_ID_2756; Annot_ID_145927

SEQ ID NO: 29287 - DNA, 1919 bp, Unknown
  misc_feature (1)..( 1919): 2750-1469P.txt file - cDNA_ID_3014207; gDNA_ID_2745; Annot_ID_145915
tatggtaaagctgacgtggtatcctaagtggggtggatttgaattggagttgattccaacggtggagattcaaagattctttgattgatagtgagcgactctcgttttccaatcacgtgtaactcggctccactctaaagcacgaaatcaacacgtccacgtaacgatcatatattcatgcagtgatatagtcgtttaacagaaagatcactccgtcaatctttccaccactgtgactaaatctaaacaatttcatggcgagtctctgtctctcatcgtcccggatcgtttctcttcaccaccagaaaccattcctctctcttaaactccggtctcgtccttcagatctctccggtctaggtcgccacacgagtcctgtttgcttcaatccgcttaggtaccgtatagtgaaaacaatggatttgggattctttcgagtcatgcattttgtgtaactctttttgtttgtaatgtttctaggttatcgggtgatcgtcagcgaaccgctacggtatcaacgagggtggagaagcggcgaaagagaggatcgagtgtggtctgttatgctgctccgatttctgccaatagtctacaatggatctccaccatttcttgcctgtatgatctctctcatttactgtgattttcttaacacataatgctggtgaaattatgctaatgatgattgtgtaatttcctctgttttcatcataacgtcaataacataagttaattgctatactgaatggtgtttcatttctagtgcattgatgcttgcaaggggtactggtatacataagtcagttgttgttccactattcgctctccacgcaccatcgagcatcgtcgcctggattaagtaagcttttaacatggagatatattcattaacatggtgatatatatgggtctctcttcttctttttgcatgcttgagcagccatattgaagtcattaaacttaaacttgtgtatctttatttttgtaggggagagtatggtgtatgggcagcattcttggcgcttattgctcgacttttcttcacttttccaggttcgtaatcatcttcaatatgtaggttgattacaagttagttattaattaaagttatacattaataggtgaacttgagcttccattcatcgcattactcttggtgattgtggcgccatatcaagttatgaacataaggttagaatcttaaagaatgtaatgtttttatatatatcaaggttttcttttctttagtcgccgagactcattgacttcattataaacttgcagagggaagcaagaaggggcaatcatagcaatagcaatatctggttttctggctttccaacatttctcacgagcagggagcttggagaaagcatatgagaagggttcagttcttgccactgtagccattattggtgtcacagttgtatcgctccttttgttgctataactatatgctcctgaccaaaaatgttaatcagtgtaagaatgtgtgtgaaggaaaaaaaagaaagatgtgcttgcatttatccgctctttaagaaatgctggtacatttttggcaactattcgctggcaataaaaatgatctttcatgtacaaacgtaaaaacaatacacatttaaaatctttggtcgacatgggattgggatatttaaaagctgacgtggaatcctacgtggttagatttgcagtcgtattgatgccaacaacggtggagattcaagattctttgattgattgtgaactaaacgactgtcgttttccaaacacgtgtttatgggccccactttaaaagcattcccgctaaatctacaccgtccacgtagcgatcatgatattgatgcaaatgattcaattttaacggaaagatgacggagtgatctttccaccaccgtaactaatcttaacaattcatg

SEQ ID NO: 29288 - DNA, 2353 bp, Unknown; identical to SEQ ID NO: 167
  misc_feature (1)..( 2353): 2750-1469P.txt file - cDNA_ID_3014240; gDNA_ID_3572; Annot_ID_146354

SEQ ID NO: 29289 - DNA, 606 bp, Unknown; identical to SEQ ID NO: 166
  misc_feature (1)..( 606): 2750-1469P.txt file - cDNA_ID_3014242; gDNA_ID_3572; Annot_ID_146353

SEQ ID NO: 29290 - DNA, 1991 bp, Unknown; identical to SEQ ID NO: 157
  misc_feature (1)..( 1991): 2750-1469P.txt file - cDNA_ID_3014266; gDNA_ID_3413; Annot_ID_146281
  misc_feature (523)..(523): n is a, c, g, or t
  misc_feature (1597)..(1597): n is a, c, g, or t

SEQ ID NO: 29291 - DNA, 3003 bp, Unknown
  misc_feature (1)..( 3003): 2750-1469P.txt file - cDNA_ID_3014269; gDNA_ID_1972132; Annot_ID_179101
ttgatacacttgtctaagttatacactaattcttgttctttttatattttctgaaaattttggcagaaatcttcgaatgttgacgctaccaaaggtggtgctgaagaggaaactcttgatattagtgctatgggtgctgttatctttgtcatatcagcgtccacattcctcgttttgctcttcttcttcatgtcatcgtggtttatcttgatcctgaccatatttttcgtcattggtggtatgcaggtaatgttagctaatcttgagcatatccttagtttcatggttcaatagctagaactatgatcaatgtttggtaacaggttgatagtaaactttctttagcattgtttccttcccttgtaaaaatacataacatgatgaactctttatgtgaaatgaaacagaggcctgctaagctaagcattattatgtcaatatcacaattattaatttattttctatctcagggaatgcataatattaacgttacactcataacaaggtactctcagaaacccaattaagtttttgaaccgtgaaagagctctattccagctagttaaaagcatcatgtgatgttttctctttattcatgtttatatttctgcaggagatgcagtaaatgtggccagaagaatttaaaactacctctgcttgggaatacctcgattctctcactcgtggttctgttattctgctttgtggttgctatcctctggtttatgaatcgcaaaacttcgcacgcatgggccgggcaagatatttttgtaagtccattttagcctggtaattttacagttgtctaaagccaaattatccctatgcattttggttcttctttgatttttttccgtatgtctaaacacaacttctggcttgacgcactcaacatttactttcacttcttgctcaaatccaactcaaggttctgttttgttttcgacatttatcggttgacttctgtaggacttagcttaggatgcttttggttcaaaattgtccttagttggctttctaaggttgacgtgtcatgtgacagggtatttgcatgatgattaatgtcttgcaagtagctcggctacctaatatcagggtaaattttctgtatgtattttcctactaaaattcttttgtgatccctttgtatgtgttctaatgggtgtctcacacttaggttgctaccattcttctctgttgtgcatttttctatgacatcttttgggtattcatatcaccactaatcttcaagcaaagtgtaatgattgcggtgagttttcgttattttccttcatttaacaaattgtgtgtcttacaccttaatatttaattctgtttctgcaaggagaagaatatttagtgttgtttcttcaaaaatccatcaaatcatatgattcttataaacttaagcctcatcaaaccagagcatgtttaccattagtgtgttttacttttactccggagcatgatttgtgtcggataattgctcaaaaccccaaagattgagtttgagttcacttgttgtataaaatgtttgcacatagcgagaacgaagaaggtcgatgataggttaactaacctcaatcacgttctagttgattactatattcttctgtttgtgtaaatttatggcataggttgcacgtgggagcaaagacactggagaatctattcccatgcttttgagaattccacggctttctgatccatggggtggttacaacatgatcggttttggagacattcttttcccgggccttctcatatgctttattttcaggtaaccctcttatgcatgatgcattggctcaataacgattatggttcacgacaccaattgtgaacacatcatctgttacaaacgctgtccgtattcaatatgccccatctcaatatgttttttgaccgctttttaactcttttacgtctcagatttgacaaggaaaataacaagggggtctcgaatggatattttccgtggttgatgtttggctacggacttggcctcttcttaacatacttgggattgtatgttatgaatggacacggtcaacctgcattgctatatcttgtcccttgcacgctcggtatcttgttcatctcatgaaaaactctgaattttgatgattagtcccctatatatgcattccattgaaacccaaccaaatgcaagatttcttacatattgagcggcttgcaggaatcacggtcattctagggttggtgaggaaagaactcagagacttgtggaactacgggactcaacagccttcagctgcagacgtaaatccatctccagaagcataaattgcttcaacatacataactcaaaactctggagactgaagaacaagaagaagaaacatcaaaaaagaaacaatttttcttttgcacataaaaaattataagaaatatacacttttgtgcatacacatgtagtctcgagcccaccaaaacgtatataatgtaatgtatatgtatacatacacacaatcaacaacttctgattctgaaatgaacaagtttttgtatactgtacaaatacgaatttgaatttttttttcccctcaaaaaaatataaaaccagctttaataaggatttgaaaagtttccaagttcatatatagataaaccgaaagaatttggatcaaactataatttttaggaactggaactgacacttatcattaagacaacaagagacagattcgattaaaagagaatcttcaggcaaaacggcgtcgtgtcttgtttacacataaacagaggttattaaaaagtttgggaagagcagatctggaagaagaaagaagaagaagaactctctactggttaattttagccggcgggtaaacggatatttttggaggaagagcagctcttctctcaaaaccatccctctttctctaaaaccctaattctcgacatccttcaaaacctaacaatttcaatttcaattaacccaacaactttcttactctcttcctttgaatgatttcaatg

SEQ ID NO: 29292 - DNA, 1015 bp, Unknown; identical to SEQ ID NO: 158
  misc_feature (1)..( 1015): 2750-1469P.txt file - cDNA_ID_3014269; gDNA_ID_3416; Annot_ID_146286

SEQ ID NO: 29293 - DNA, 674 bp, Unknown
  misc_feature (1)..( 674): 2750-1469P.txt file - cDNA_ID_3014276; gDNA_ID_3380; Annot_ID_146266
aattctctctccctttgcaagtcttctagttttcaactatttttagccctctatgagtgatcatagcattagttgagcgtcttctgcggttctgccctggaaaagcggcaactgatctctcaatgggtctcaatccaataatggttgggtagtttgtagggaacgagaactgtgagtgtgagactctgtagctttggtatggtttctatgggtgattatagcattatttgggcatcttctgcggttctgccctggaaaagctgcaactgatctctcgatgggtctcaatccactaatgctttgggtagtttgtagggatcgagaactgtgagtgtgagcctctgtagcattggtatgaatgagtgaccattgcacaacaggatcttctttcgtcattaccttttattcagtttcaatttctttgcaattctagcagtgctgggtgggttttgggtggggtactgtgttgtcccaaggtttcattgtgattgtatgggccttaatgttccgagcaatatcgctgtatcatagcaaaactcacatctatgaagagaacctggtggacgaggatctcagatcaggggttttacatccatcttcacttttgtagtgtaaatcatttcctgagaaaagcttgctaattattacctgatatctattcctttcagccaatg

SEQ ID NO: 29294 - DNA, 559 bp, Unknown; identical to SEQ ID NO: 152
  misc_feature (1)..( 559): 2750-1469P.txt file - cDNA_ID_3014282; gDNA_ID_3334; Annot_ID_146253
  misc_feature (10)..(10): n is a, c, g, or t
  misc_feature (47)..(47): n is a, c, g, or t
  misc_feature (75)..(75): n is a, c, g, or t
  misc_feature (168)..(168): n is a, c, g, or t
  misc_feature (183)..(183): n is a, c, g, or t

SEQ ID NO: 29295 - DNA, 2302 bp, Unknown; identical to SEQ ID NO: 144
  misc_feature (1)..( 2302): 2750-1469P.txt file - cDNA_ID_3014290; gDNA_ID_3265; Annot_ID_146194
  misc_feature (1290)..(1290): n is a, c, g, or t

SEQ ID NO: 29296 - DNA, 2881 bp, Unknown; identical to SEQ ID NO: 129
  misc_feature (1)..( 2881): 2750-1469P.txt file - cDNA_ID_3014315; gDNA_ID_2921; Annot_ID_146041

SEQ ID NO: 29297 - DNA, 225 bp, Unknown
  misc_feature (1)..( 225): 2750-1469P.txt file - cDNA_ID_3014326; gDNA_ID_2973; Annot_ID_146069
tatctcaaatagagtcatgagaattgtatttggtatcagagtagtctaacttagatcaacttttgactagttgtttgtttccattgaacctactttcaacccaattttattcacaagatctgcatttctctgcacccacaatgttttacattgcttatataatttgtacattgatcaggtgaatctgatcttactttctggtccacctctaagcacttttaaatg

SEQ ID NO: 29298 - DNA, 463 bp, Unknown; identical to SEQ ID NO: 121
  misc_feature (1)..( 463): 2750-1469P.txt file - cDNA_ID_3014342; gDNA_ID_2850; Annot_ID_145983
  misc_feature (38)..(39): n is a, c, g, or t
  misc_feature (80)..(80): n is a, c, g, or t

SEQ ID NO: 29299 - DNA, 2086 bp, Unknown; identical to SEQ ID NO: 123
  misc_feature (1)..( 2086): 2750-1469P.txt file - cDNA_ID_3014360; gDNA_ID_2866; Annot_ID_146003
  misc_feature (127)..(127): n is a, c, g, or t

SEQ ID NO: 29300 - DNA, 3000 bp, Unknown; identical to SEQ ID NO: 115
  misc_feature (1)..( 3000): 2750-1469P.txt file - cDNA_ID_3014384; gDNA_ID_2804; Annot_ID_145941

SEQ ID NO: 29301 - DNA, 987 bp, Unknown; identical to SEQ ID NO: 97
  misc_feature (1)..( 987): 2750-1469P.txt file - cDNA_ID_3014460; gDNA_ID_2431; Annot_ID_145728

SEQ ID NO: 29302 - DNA, 447 bp, Unknown; identical to SEQ ID NO: 81
  misc_feature (1)..( 447): 2750-1469P.txt file - cDNA_ID_3014503; gDNA_ID_2330; Annot_ID_145648

SEQ ID NO: 29303 - DNA, 336 bp, Unknown
  misc_feature (1)..( 336): 2750-1469P.txt file - cDNA_ID_3014587; gDNA_ID_1915; Annot_ID_145419
ctcttctatacaaattatcaaaacagttgtaagaagtttcaagaaaaacatttgatatctcactaatttggctatccttgcaagttgcaacgctaaaatgacaaataatgaattctcggcccaatgggcttacccaagccttgttaaagatagcgtgaacaaaacgcggctcactagccctaacctgtctctctttcgcttaccttcttcttcgtcttcgttggctcagtcacttgacttcacggccccgctcaagctctgacacgaaactcatttcaaattaatttaataaaaccttaatcacaaaaggggcaaaagcaatcgccggcgattatg

SEQ ID NO: 29304 - DNA, 576 bp, Unknown
  misc_feature (1)..( 576): 2750-1469P.txt file - cDNA_ID_3014600; gDNA_ID_1974; Annot_ID_145464
agaactccaccatcaaactccgtctccggtggagctcgaactccatctccggtttcagctactcgtcgtggtggaacaggagcaatgtcgacttcgccttccattgctaaggcaatcacaacaagattaatcgaagaacaaacacgattttaccaatgagagaattagggattgagttttcgatttgggcattttgatttgtttcgttaggtttgaaacgacggcgttttggtcttaacagaattcattaacgttctcttaacggggttaatcagcgagttaacgtcttgggattttggcgggtcaacgttttgtttctgttaaaatggctggtcaacgtatttttcatgtttattttggccgacgtcagagttcacgtatagaatagctactttttgaaagttcgcgtataaaacaacatttttcccaaatataatttggtaatttttgtcttcaaggaaaagaaaaaggaaaacataagagtacttatgtgtgcgttaagccctgctcttttcaaatcaatttttaatttaccttcgtcaagaagaagacgacttgagatttgcgaaaaagatg

SEQ ID NO: 29305 - DNA, 113 bp, Unknown
  misc_feature (1)..( 113): 2750-1469P.txt file - cDNA_ID_3014612; gDNA_ID_1870; Annot_ID_145393
agaggtcgaaaattaatctataatcttatctttggttttgtaatcgcagatgctaaacttatgttgtttgtacttataatggcgtcttctttgttacttttcaggtacgcatg

SEQ ID NO: 29306 - DNA, 689 bp, Unknown; identical to SEQ ID NO: 12
  misc_feature (1)..( 689): 2750-1469P.txt file - cDNA_ID_3014674; gDNA_ID_649; Annot_ID_144481

SEQ ID NO: 29307 - DNA, 50 bp, Unknown; identical to SEQ ID NO: 13
  misc_feature (1)..( 50): 2750-1469P.txt file - cDNA_ID_3014688; gDNA_ID_654; Annot_ID_144488

SEQ ID NO: 29308 - DNA, 378 bp, Unknown; identical to SEQ ID NO: 14
  misc_feature (1)..( 378): 2750-1469P.txt file - cDNA_ID_3014701; gDNA_ID_655; Annot_ID_144493
  misc_feature (356)..(356): n is a, c, g, or t

SEQ ID NO: 29309 - DNA, 340 bp, Unknown; identical to SEQ ID NO: 61
  misc_feature (1)..( 340): 2750-1469P.txt file - cDNA_ID_3014774; gDNA_ID_1938; Annot_ID_145440

SEQ ID NO: 29310 - DNA, 34 bp, Unknown; identical to SEQ ID NO: 151
  misc_feature (1)..( 34): 2750-1469P.txt file - cDNA_ID_3014874; gDNA_ID_3328; Annot_ID_146249

SEQ ID NO: 29311 - DNA, 2891 bp, Unknown; identical to SEQ ID NO: 143
  misc_feature (1)..( 2891): 2750-1469P.txt file - cDNA_ID_3014900; gDNA_ID_3254; Annot_ID_146185
  misc_feature (1888)..(1888): n is a, c, g, or t

SEQ ID NO: 29312 - DNA, 117 bp, Unknown; identical to SEQ ID NO: 24
  misc_feature (1)..( 117): 2750-1469P.txt file - cDNA_ID_3015042; gDNA_ID_911; Annot_ID_144641
  misc_feature (66)..(66): n is a, c, g, or t

SEQ ID NO: 29313 - DNA, 692 bp, Unknown
  misc_feature (1)..( 692): 2750-1469P.txt file - cDNA_ID_3015073; gDNA_ID_178; Annot_ID_143977
  misc_feature (19)..(19): n is a, c, g, or t
  misc_feature (33)..(33): n is a, c, g, or t
  misc_feature (45)..(45): n is a, c, g, or t
  misc_feature (58)..(58): n is a, c, g, or t
  misc_feature (61)..(61): n is a, c, g, or t
  misc_feature (80)..(80): n is a, c, g, or t
  misc_feature (468)..(468): n is a, c, g, or t
  misc_feature (590)..(590): n is a, c, g, or t
aaacacacgctaacaattnctttttttttcctntcacattttatntttttaataattnaanaaataaatgttacggcatnggttatatcatatattttaatttcatggaggatattagattgttcccattttctattgatcatattagattaaataattagaaaatactatttttctgtctctattgtagtggtatgtatgattggagagttgatgaaaatgtaagcaagtaaaatcatcgtgcagatcgcgatgctatgtttattatcatatatgcttaaaggatcatttgagattaataccgcaatcagcgggtgagtaagaaacttaaaacacataactactctctttgtcaatggaagaccctcttaagcatctaacacatgattcgtctacacaaccatttaactctaattatatcccctaattgatattaattaaatcaagaggacaaaaaaaattaaatcncttataaatattaattttatagatgtatattttaaaaaagagaaaaaagaaaagaaatgggaggaagacactgggacgaaagacgacgtcatctattgttagtaagtttagcccaatcgtgnttctctctgcgcttgtctcccaaattctcagatctaatcagatcgacgattcctgatttcatcagcttcgagagagatccttcttttgttcttcgttgaatg

SEQ ID NO: 29314 - DNA, 233 bp, Unknown
  misc_feature (1)..( 233): 2750-1469P.txt file - cDNA_ID_3015217; gDNA_ID_1227; Annot_ID_144896
  misc_feature (57)..(57): n is a, c, g, or t
  misc_feature (63)..(64): n is a, c, g, or t
  misc_feature (104)..(104): n is a, c, g, or t
  misc_feature (145)..(145): n is a, c, g, or t
  misc_feature (179)..(179): n is a, c, g, or t
  misc_feature (223)..(223): n is a, c, g, or t
  misc_feature (226)..(226): n is a, c, g, or t
tagtgctactcgtcatcaagacaataatgttcccgtttataacagccacgatatccntcctcnnccgtcgtaacgtcttcgtcagactcttgggtctacctccnaaaagatcgttagtgcaagacaatgacgccggagggaaaancgggcggaagagcaaacgttagtgatgattaacnaagaaatccgacgtcgtatagagggagtgaggatgaggagtttnggnaaaaatg

SEQ ID NO: 29315 - DNA, 24 bp, Unknown
  misc_feature (1)..( 24): 2750-1469P.txt file - cDNA_ID_3015233; gDNA_ID_1329; Annot_ID_144986
cggagctcatcgccaggaaacatg

SEQ ID NO: 29316 - DNA, 3003 bp, Unknown
  misc_feature (1)..( 3003): 2750-1469P.txt file - cDNA_ID_3015313; gDNA_ID_2684256; Annot_ID_193150
caagaatcatgttcctaccaaaggagcttatttccctgctgtagagaaggctttagagatgattaaccagaaaagttcaccccttaacaaggtagtttagactttagagattgtgttcgtatctattcttaaaacaagtttataggtttcgttttaactgatgtttttggctcgtggaattaggttgttcttgctcgtaacagcaggataattacggataccgacattgatcccattgcttggctagcacagttacaggtgtgtttttatctctggatattatatagtagtcagttttcaatgtttagatttatatctcactaatttttttgtgtgacagcgtgaagggcatgatgcatatcagttctgtcttcaaccacctggtgcaccagcttttatcggaaacacggtaggtctttttatatgtagtctgtgataataagttctgttgataaagatatgtgcacatttgttatttatttctaagaaatatgtttgtgacatacatctttgtgaaacagcctgagagactattccaaaggactcaattaggtgtctgcagtgaagctttggctgcaactaggcctagagctgcttctagtgctcgtgatatggagatagagcgtgacttactaaccaggtcaatttttacttcaagtgctttgaacaattacagaatccagttctccattatcattttactgaatttttgctaaactgttgcagtccgaaagacgacctcgagttctctatcgtacgagagaatataagagaaaagttaaacgtaagttcaatcttgatgctctgcagcttcaatgcttcatttcttggataatagtttggtatattttttcttattatgctttcttctgctttgcagggtatatgtgacagagttgttgtcaagcctcaaaaaactgtgaggaagcttgcaagagtgcaacatctatattctcaattggcagggagacttacgaaggaagatgatgaggtgagataatagtattggaatagtttttacatttccaagctcttcatttcttcgaattagctttaaccctttttctttctatctgtctatagtataaaatattggctgctctgcatccaactccagctgtttgtgggcttccagcagaagaagcaaggcttttgattaaggagataggtaaaatatctaccttggttcaactatcttctagtaactatagatgtagagattaagaattatgctgactcaaacattttgcttcttctagaatcattcgatagaggaatgtatgcgggacctattggattttttggtggcgaggagagtgaatttgcagtcgggatcagatcagctctagtcgaaaaggtgagcttatttgatctctttctccctttaaaaaacacactttaacactaattgttatagcaaaatcgatcattacggtttttgctacaacttgtaaaaaaatgctgaactgtattttgatttacagggtcttggggcattgatctatgcggggacagggatagtagctggaagtgacccatcttcagagtggaatgagcttgatcttaagatatctcaggtacgagcttttgtccagaaaatgtttagtgacatcatggttctctgttaccaaaatcctaatttttattctctcttttgttgttgtttttgcagttcaccaagtcaattgaatatgaagcaacaacatctctacaggcgattaattgaagaaagagtaacatttgtatttgattgttttgtttgtatgggggataaggggttctcacaataagaaagcaatgttgtctctcttgtaaattaaaaaagaaatgctttaatttgttaatgggccgagccttttcgggttgtaactagggcaggcctatcatgaatgttcataggcctagctgttatgattgttaatgagcttctatagtgtttttcttcaaagacagatatattcaatatggatctaaaactgaactgaatttaactgacatgacaatcgaatcaaattgaatttattttttcaattttcatttagcaagaagtgacccatcttcagagtgaagtaatctatgcttattatctcgattaagcaaaaatccgtagaatgcttgggcctttcaacgatgatgtagccgtgtaggacaggtttacggaatctgcttttatgcaaatggtaaatattaatattcctttataagttagcgtttcagatcatcttctttcgttagattaagaaactactttgttattatataactataaataccatccaacaaccttactcgccatatcttttcatgtgtggtggtttataggaacattgaaaagtaccatattataaaatgaagaatcaacacgtcaacaaaaacacaaataaaatgagatagtacaattaaaaaaatggagcgcatgtaaaaagtgaagaatcaaacgaaggcttggcgatagagaatggaatcagatttcccattatccccactctaacaccatatattcctttccctttttaccctccacctcaattaggtttattaatcatatttaacactctaattaaccaacccatttcatctcttttattttactaatcacaatgctttggcctcattacgttttacctagatttactttgtcacaaactacacaaatatgaacctaattatctacactcgtgtcagaaacagttttagctaatatttagtaagttttaattaaaactaatgaaatgaataaatagtgtatagtacataggatttgtttttagtttattaatggaaattaagatttcattagtactaaaaacatgtaaataaaataaagctttaaagaggaatatattcaaataaaaaaagcaagacctcgaaaaaaaaactttctattatctctcttccgcgattaccgtaatctctgtcacaaacaacaaaaccttctctctctcactatcttaatgagagaagaagacattctcgagaaatgagaagactaccactacgatg

SEQ ID NO: 29317 - DNA, 3000 bp, Unknown
  misc_feature (1)..( 3000): 2750-1469P.txt file - cDNA_ID_3015321; gDNA_ID_2684256; Annot_ID_193147
gctttgttttcaaacttttcagcatgatttactatctgcagtttaaggatatatgaaatcttctatgaccatcaagagacagaaagtaacaagaggtgtcaaagaaaggaggatcctgacctcagatatatggatatgtccataatctctcgcatgctctaccgataccgaatcatcaagaaatgtgctctgcacaagaggaaatagagacagcttcccttttaatacaaagccatgaaacttggaccgggaagaactatatcattataaatcacgcacattgtccaaattcatatcagtagcagatattcacctccatgacgagaacctttgccttgagagcatcagcattagtttcatcaactacaaaatccgacgttgtatctcccgtaaaagcaacttcaggagttattatgctgtctgtaatctacaatccacaatccaaacttattaaacaggcttatatactttggaaagaccattgcaaaactattgactttgtgatagacaaacataagaaaaaattgacaagcaatattaagcaaatcaaagacaaacctcaacacctgaaaccttcaagttcttaatttcatttccagataggccaatatattccttcttgagtttatatttagttgaatacactacataaccctgcaaaatatcaaacgaaagcatgaattcaacgaagacacataacgctaagatatcgaaaatctcatgcgagtttactaaaataaacctggctttggatgacatggaatgtcttaaaggctttgactttgagatctttccttataataaactcctcccctgcatgaagaagtgtccaaggtttaacaaaaaagccaaatcttggctgcaatgaatgctagaggttgagttaccacctatgtccaagccaacaagattgtgctttagctctgaagaatctaactttctgtgaacttcgaataaactctcaacagtttctttaatggatgcgggtactataatcgttggaggcttcattttgtacaagcctctagtagcaacatacattggtaatccaccctaacataacaatacgaatagtttagctcacaatttgagaatgtaacacccaaacagtaacagagcaataggctaatataacataacaatttagctgacaattagagaatgtaacaccaacacagcaacagagcaatatgctaatgataataaacacatggtggctctcaacaagggtttatcaaaacagtaacagagcaataagctaatgataataaacacatggtggcagtctcaacaaaggcttatcaaaattgttcttaaaacaaaaagtcaaaagaaggatctttgcaaaatataatccgaaatttcaagtctttttatagaagattcaagatacttacgatatgatccatgtgagagtgagagatgaagaggaagtcttgagaaattgcgcgatgtgggcaacgaccaatgtcgaaagctatccgaagagatggaaatatgatgcacgtctcgtgcccaccaatcgacaatccctcgatcgggtaaccttcaatttgcattgctttcttcttctccatctcactgttccttagggtttatcgaattttggctgtgctcttcgttttcaaatattgatcaccaagtgttcgatgaaatgtctcacaatcacaagcttttttcttccatgatcattttttttttttttaataattttatggattgggcttaggcccataacggttaacgagactacttcactggagcgggaaccactaggcactggttaataaatttcccacgtgcctctggtgcaaaagttggtctttcgtattcaacgacagtgcaagggtatgattgtaaatttacttcgaatgcttcattagaacgtcgcggtattcttacacttgttttcgaagtaatctcgacgactataacaaaatctgagcaatttcaattaaatatctgttactgttgtattttaaaatctagactactgatgacataaccaaatttttagactaaattaccctttttcttctattttaattatcgcatttaatgattttcagctttttttctttatagattgctctcttaactcttctttaattttccctctttcgagttctgaatttttctgtaaaaattaattttagttaaactaaaaatgtttgacaaaaatactaaatttcagagaagatccaacggctagaaatcaactgcgtaagattggagttatggagatgctcgcttactttttggttaaaattagaaatattattttgcgcaaaatatttattttctctttccgtctggtcactgaaagtctctgaaaccaccaccaaagagaaaaacagttctttagagagcatcaaagctccgaggaagagagagagagacgctatggaagcattgaactaacacaactctaaatttctaatttacggtatattatctccttctttgttattgtttttgtttggtctgaatcggacttggatttagaacggagatccgacggttactccaactttaaaccgactttattttaagacattgttcgagtagtgttgggttttagaaggatctctctgtttgggatttgttgtttgactctgtcggtgttttttgtttgtttgttgttgtttttcattttggaaagtggattttgagtcatttagggttcttctttttcagtctgagttccagatctggtaatttcacttcataaatttatatggtaatcattgttttttttttttgttctttcttgattcttacatttagttatcattaggtttatctttataagcttattattagagttgattagaacaagataatgtgttactctccttttttgccataactaattaatgaattaaaagacttcttcattttgactattgtggtagactagtagttgccatattcacatactaatattggcttgtgttgtttcttgggcaatgcaggtttgttttagttctatacattatg

SEQ ID NO: 29318 - DNA, 3003 bp, Unknown; identical to SEQ ID NO: 21408
  misc_feature (1)..( 3003): 2750-1469P.txt file - cDNA_ID_3015321; gDNA_ID_1971889; Annot_ID_176838

SEQ ID NO: 29319 - DNA, 3003 bp, Unknown
  misc_feature (1)..( 3003): 2750-1469P.txt file - cDNA_ID_3015367; gDNA_ID_2684256; Annot_ID_193111
cgtggagattgtgcgactccataagccccgtgggattagggtttctatgtaacatcggcgcaacaaatctaaaactaggttccgtttcctaaacatcaagttaaaattccgattcctaattctaaaacctatgcgattatatcccgactaagccagtacaaagtttctacaatgaaacgggacgaatcaggtttttatcaatctctttgcttaaatcaacacagaaatggaaggaaacttacgttcagggatgcgaaaagcacgattggtctgagagatagaaatcgaagaagctcttgctttgcacagtgaattactcgagattgagaagaagaactcgtgacttgagaataggaaggaaggagggactatttatgaaataacataaactattgcttacttctataaattacattttgacacctttagttgtagaatatttatgttttaaacattttttttataacagacttacaggtaatttagtacgcaacaatgaggcagtttcatttaccatgaaagcgcaagaaaaaatatagacaaaaatatcattaaatgataaatgattaaattaataaattcgttaattcagtttgataattaagatagaaacatgagtgatcagctcttcctacgcggtggaccgacatcatctacttgttcaattgtttatcagtttcctatcaattgacactttcttatatgtaaaatgcgttgcttcatgctttgcttatattcattcccccacgaatacaataatatctaatattgagctacgttttaagtttacgtaccccctaaacctctaattgtttaaaaggtttcaaggttcaagaactcgggtttgggtcggattagagcgagtggatatattagtacctacaatatatactttctcttattggatccaaagctatttaatttggtgtcgtgcatgtgcaagttattttaggtgataatgttgaatttgaccaatggaaacatcaaaacaacaaatgggtacgcagagaaaaaccaaaacgcacaaacgacgtggctttcaagtggcatggacttttaaatttcatagcaaaattttcttttgtttggtcgccttagttgtttgccttagttgttttggcatgaacaatgttggctcaataccattcacacgtccttagtgttgttgaatggaccattgtttttttatcggaggtttcctttagttttttcttttcaactggtggaagttaataactttaaaattggtaccactttgatttttttagaattttgatcattatgcattctagtgtcagaagacacaacatggatgcttgaaacatatgtggcagaagagagtgattcaacttcctactatgattagttgaagcttgaagctactactgtatctttaaagtaataaaattgaagttatagaaatatgactgtagttgataaacatataagtagactatttttaagataaaaaatattagatgattatcctaaatcttgttgcatatcatctatcaacaactttgaaagtttgatttgtttctgagtaatactactttttgcagattttgtttctaatgacacaaaatatcattttagcaattaactataattccttttttatattgttctctttatggaagagaatagtagcctctgaattttctaattcaaaaaaatatcaatggtctatcacgaagtgttatactattcaattcaaaattaattgaatacttagactaatcaaggtaaaataatacacgcatttgactcttatcacgaagaaaaaaaaaaggtaagagaaaaatatttataacgggaaaataaataacaaacaaaagaaacgaataagatgagatttaatgattaacaatgatttaaaaaaaaaacattggtcaaagcacgaagtaagtcaactagtgccgtccatatgaatcacattggaccccaccatatacatgtatattttgttaacctctttttagtaaaatatctttaattttttgaacatttcaaaatgatgccaatttcttctctttagtcgtctaaaacttagttaaataacacttttaaatctctggagaagcaaatatatcttttaatgctacataagtcacattcaccatatattgtatgtaacgtaatttttagatttacattatgcaaaagttttatctattatcataaacttaccaactctgacacgaagtcaaactactctggaccggtcaacttagatgtcacaactgctcacctaattgttgccctcgcgagttaacttaaataaagtaatctaattttatggtttttttaaccaaatcacacgattaaaatttctaaactcacacatacttcaatatatataagttcaaactgtcaaaatttattaaatgttacccactaggataagttcttgagtgcgcaagtggtaccgtacaaattaaaagaaaagctaatggtgaatcaaaaacaatatttgtaattgtttactttttctaaggagaactaaaatgagttatggtttagttttagtcatatgagactcatctagtcgataaaacatcaattttgtttttgttctaaacgacttcaaagttcaatttttgaaatattcaacaaatgcggtatttttccttaagaaatttttgataaagactagtaacgtaatatatacgtttatacgggtcaaaattagcataatatgatgactcaatttcacctttttgtaattaatttttgtgtttgaggaaaagtctaataaataggaataaatctgtgtgatgttcaaagtttttcagttgcttggtctacgtgcgggctgctttgtgtttttttccaacttctctttttctcaaatctctttccacacatgaatttccatgaaattcatcttcttccccgataatttccacatcttctcgaggaacatcgcagaggacagtaaagaagcaaaccaagaagaccaagtggaggaggacgatgactatggtgacgcgtgtgatcatg

SEQ ID NO: 29320 - DNA, 3000 bp, Unknown; identical to SEQ ID NO: 15031
  misc_feature (1)..( 3000): 2750-1469P.txt file - cDNA_ID_3015371; gDNA_ID_2684256; Annot_ID_193108

SEQ ID NO: 29321 - DNA, 3000 bp, Unknown; identical to SEQ ID NO: 5343
  misc_feature (1)..( 3000): 2750-1469P.txt file - cDNA_ID_3015409; gDNA_ID_1620781; Annot_ID_50354

SEQ ID NO: 29322 - DNA, 3000 bp, Unknown; identical to SEQ ID NO: 5343
  misc_feature (1)..( 3000): 2750-1469P.txt file - cDNA_ID_3015409; gDNA_ID_2684095; Annot_ID_190084

SEQ ID NO: 29323 - DNA, 3000 bp, Unknown; identical to SEQ ID NO: 5343
  misc_feature (1)..( 3000): 2750-1469P.txt file - cDNA_ID_3015409; gDNA_ID_1620781; Annot_ID_167937

SEQ ID NO: 29324 - DNA, 3000 bp, Unknown; identical to SEQ ID NO: 14257
  misc_feature (1)..( 3000): 2750-1469P.txt file - cDNA_ID_3015413; gDNA_ID_2684095; Annot_ID_190083

SEQ ID NO: 29325 - DNA, 3000 bp, Unknown; identical to SEQ ID NO: 14258
  misc_feature (1)..( 3000): 2750-1469P.txt file - cDNA_ID_3015432; gDNA_ID_2684095; Annot_ID_190075

SEQ ID NO: 29326 - DNA, 3003 bp, Unknown
  misc_feature (1)..( 3003): 2750-1469P.txt file - cDNA_ID_3015454; gDNA_ID_2684095; Annot_ID_190068
ttggggagacttcaagcacaggcaaaatacttgcagatcaagcgatgtatacagtacattctacttcatcgttgctgtgataccttactggtcacgttttcttcagtgtgttcgaagattgatcgaagagaatgattcaagtcaaggctacaatgctctcaagtatttattaaccgttgtggctgtttgcttgagaacagcttacagctttaacagaggaaacatctggaaaatctctgcctgggttttctcggcattggcaactttttacggcacatattgggacattgtttttgattggggattacttcacagaccatctaaacatttgttgagagagaagcttcttgttcctcacaaagccgtctactacgttgcaatcgtgagaactatgaaaatcaaaagaacagtacaattcctgattgatggtttccttataagttttgtttctgcctcttcttctttgtaggtcttaaacattgtgttgaggatggcgtggttgcagactgtgcttgatttcaatttatcgttcttacatcgagaaacgatgattgctcttcttgctgctcttgagatcatacgtcgtggtatctggaatttcttcaggtaaatttttgaccacgacacgatcactaaattctctttaaaccattttttactcaagggttcttcctttgacgacttgcgaacacaggttggagaatgaacacttgaacaatgtgggaaagttcagagcattcaaatcagttccgttaccattcaactacaacgaggaggaagatcgagatagttaactcttagattagatctaatcaaggtttctccaaagagtggggtttcaattttgtttagaacttgcttgtctctgtttgtaatcattaaagagaaggaaatgagcacaatgaggcttcggatataactatcttacctagggttatcattgtgctcgctatcacaatgtgcccaaatcagatctcaaaccaaaattagtccataaaactaccaaacacgagctactttgactatgataaaccaaaaattacccttgaaatgacactcgagtaaactaagaggttattgagacagcgagcgtacatgacgagagcttcaaaagcttgtatagatggtttcacgtgaatatatttatccatttcgaatatatttagctgttgaatccaaatctaagagcacaaataaaagtgaatgagataatcctacactttgcaacaagcaatgacaataacataatttgtcaagagaagcatgagaatattgatcttgcagcatacaataatttgccaaaacagcatcaactaagtcttttatcattctagtgtactactaagaaagccaagattttatcctcttgatatccaacaaggagtaatcatattggaaaccatgaccagttgttcgaattgccttactcagtagggtttagccgctcaccgctgcaacagaagaaatgtggcagcttgactcgcccgcaactcctggaaacacaaaagagtgtgcacttaaactggcggcatatataaaattctgatacaagtgccctcacaatgagatcatgaaaacaaaagaagttttaaatcaaacatataccaaaaccgaacaactagactcatattttgtaccatgttgcacacaagtaggtctttcgtcaaacatgttaacgatacacagttctagttactcaagtgcagtttataccaagtgatagttaggagagacaatgaatcacaaagcatatgcatttattcttcagctgttgctgcagcaacaacaacctagataaacctaacagaatttttctatcacagcctcaaaactaaacacccataccaaactcaacctaatggatatattaagaagcatcaaacagataaaacaagaagagaagctaatctgcggacaaaaaaaaaaagaaaaagaagagaagctaatctcttacctgcaacggatgatcacaggaacaggcttaagagcctttggaccatttcttatccctctcttgtgtttagaaatctgcatgtttcatcaagaacagcttcaattaacactatcattctccaaggagccattaaaaattacacattttcattcacatgtgaacctaaaggaagtaaggaaccaaatcaacttaaacccaaagatacacaagcaaatggaaaaacaatggacactcaaaaacacacaaagagacaacatttcttagatagattctatagaagaagcaatctagcacttagtatctcaattgcataatcaactaataagtcctatagtgcaccttcctaaaaccctagataaaccctgactccgtcaaaaaagctaaccctagataccacaataaatcaaaaccctaagaaattttatcatttcagaagtggaaaacgaaaggagaaaactaattaagggactgagagttctttgaccttcttcttaggcacagccattagctccatggatccattaaaagcaaaactaggaagcccgaacccgaagctcttttcttcgatcaaacccggttgattctgatcgaactcaggtaaaaccagcggcggcatagaaatcgggcgatcaaaagctccgttcaagggggaaggcatcgcagcgacatgacttaagcttcgggtttccaaaatgcgacaggactcaaccgcggcgcgttttagcgatgtcaatctcaacgccattgatgcagtttctccaaagctatagctgacggaagtgaagactagtagaagaaacccaaaagaggtgaaaatttatcaaggcaaatgtatttacgaaacggctgcgttttgacatacgaaccatacaattgctctgttaaccgattttagaccgtaatttagagtgtgatgtacccggtttaattcatgaaccatgaggttttatcaaatcgagccatttctgaaacccttgtgtcttcgtcgtctctggtaaaacaataacagatcaagcgaagaagaaaagtgaagaagctcagcaacaatg

SEQ ID NO: 29327 - DNA, 3000 bp, Unknown
  misc_feature (1)..( 3000): 2750-1469P.txt file - cDNA_ID_3015478; gDNA_ID_2684095; Annot_ID_190062
tctttcattttctccaatgcagcaaacaaaggttttctcttagtcttttgcaaccactgtcccaaaaacaaaactcaaaagctaattaagactatcaattagtggaggaaacttcaatctattatttgacatttgattaccggaaagatcaaaattagaaaaataaaggaaattcctatttcaaaggaaagtccttacgttattttaatttgacatttttttatattgattataaatataaaagtacttacgttactaagccgatgaatggaacgttcaacgatcaaagaaacaaatacaaagatagtcaatactgtagcaactgaccaagttggtgttaaacccaacgttctctcgcttggttctgtttcttctctcatttcttcaaccgaattctttatgaacaaattttcagatgtttctttcttcgcgtgcaagaaaccaaattagctctgtggttcaaggtcgtatcgagaaacttttaaactcttctcatgccaaaatgttacaagctaatgacacaccgttgactttatctcagtgcctttcaccggatataagtcctttgcatcttccaagaaaaactccctctatcatctaaaacggccaaaacagaaatttaattgcagtaaccaatttaattggaaaaaaaatataattgtttttgtaaatatatatgaaatgaaaaaataagataattttaaaagagtggataattttctgttttgagatttcttaaacaatagtatatctacaaactttcattaatgaaatataattgaaaatatagaaaatataaaaatactatttccctccatttcacatgattcaaatcttaatataacgatataaccagataaacataaacaaatctagatttggatccccattcctaaacatgaacctccaaatcttcggattgtggtttctgatttaaaacttcaaaacccattcaaatttctcaaggttggatattgtgaaccaaatctttattaaactaagaaaaaaaatgtgaaccaaacgaaaaaatggatccgaaacgaactggctttacatattcaatctatatgaataactgatcctaaatattcaaggaaaaagaagaaaacaaatcaaacaaatgacaaaaaaatccaagaacttacgggaagagaggagcaagcgagctgagccgtcatgtttacatagagagaagggaagtctttttgaagcaaatgtttaaggtaggaataatgcctcaagtctctctctctctaatgcaattatcagaatatatcttagattaatattagatataagtatttattaattaagagtttacatcacctcctacgactctggttaattatataatgaagatttggttcagttaattaaaaacaagatgtggactgacagcacacttataggatcttgaggaatctaattggaaactactggataaatgcatgtgtaaagacagaccacttattaataaattaggaataataaatgattacaaaaaaatagtgatcgataaaattagcttttctactttctaagtattttgttgttggtgttgttgtatggtgtgtcattggaagaatggattaagtattttacgatagtcttgacggtaaagaaacacatccgaatatgcctacacatttggtggtacaacagcttattggcttccaaaagtgtagaaggttgtaacttgtaactttattaaatgtgaagttgtaatgttgttgcggcttcgtgtactatcgggtaacgtgacgaagcttttgatatttttaaaacgatttatttcatatgttgatgttatttatttcattctaagttacagttttgtacgatatgatatatgatatttgcttctgttaggacatcattggtccttcttcacatgttagattgtttttcataatttcatgtctatggcgaactggcacgtataataaatttattcgacaacccgatgatcaccacaatttgtattttttcttttatgaacttctttttaataaaataaaaaatgttataacgatgcatacgataatgtcatgagattatatgaaaagaatacgtgctactagtgaaaaaacaaagaatatatacgtgccactaggtgatcagtaggtgataatctagttgaattgacttatcacttgtaatttgataaaagttgcaaaccgaacattatggagtaaatttcgcattattattaaagtcaaccccgggaagtcaataagaattgcatggtgccgatgtgccattttatacttttgtactgcatgattagagatcacaaagaactagaggaagctaagcgatactattttactgtttcaatgtatgaagaaatcttttaccaaaataaaagttgtgtgaaataagtaacaataaacgttcgcgatacttataaggatccttccaaatttcaattgattttcaactttcatgttcttcaatttgacagcataattatgcacataaagcaaggacaggaaaaattcaagcacatactggcttagcttccgttgcctagttataattccattgaaaatatcctcaaattttatttttctattgaaaataaattgggtatacaaataaaagagaaatcaaaacaaaggccatgtgaaagataaaaatgatagacatttaaaccatccttttaggctgtttaataagtgccaactagacttaaaacaactgcttatactttggaatccaataattagacacacgtaaatagaatttagctttgcatgtgaaactaaaaaaaataacactatgttgtcccgacatactaaaagtcaaagtcagcgttacgaaaactctagatgagaaagagagtttcttcgacgtgtatttcacgagttaaaattaaacacgtgtcataagctctcttgttccattgtacgttgttgagttcttcttcttcgtcttccatctctctaccaactccacgatcaacgaaaccaaagatctctcttcaaagcttccaccatg

SEQ ID NO: 29328 - DNA, 3003 bp, Unknown
  misc_feature (1)..( 3003): 2750-1469P.txt file - cDNA_ID_3015486; gDNA_ID_2684095; Annot_ID_190060
tgaagattatatagcatcccaagttcgttcatagttctgctcttgtttctttttagccagtttgattgagtcttgaaaatcttgggcgtaaaatagtaaaattaaaaagtaggtgggcctttatgcaaggtaattatattacaaaggacttgaaattaaaaccaaaagtaagaacaaaccggttcgcatggtttaaataatctgtgctcgagcggtcaaattgtaaaaccaccaaataattcttcgtctccctcaccgtcgcggcgtcgccactcgccgtcacaaccaccgtcgttcaacatcactgtcaccaaaagaatcaccgtcgttcggtcgtgacgtgtctggacctatttcatctctttgctcgtgactcgtgagtcaaatactcttggacctttgctgttatctgtacctctaattttgtgattttcagattccttctcgtttatcgagttggattctctgtatttgaatgtatttttgatagggtttcgtttggaaaccaatttgattctcatatttaaagtgtagttacgtggtttgtgttctctcttggggatgttcaccacctgttcgatgaaatgcttctacgtattagtttgatgcaatttctgtatagtttcgacgctctccgagcttgtatttagatattgatggttaggtgactctagattctgaaacgaacatttcaaggctctagaaacttattctggactaagtttatcaaataaacaaggggatggttagagccttaagcttgatatgtttatgttcgcattgcagtaatggaggagggacgtcaaaaagacttgcaattgttggaggagattatcgacaaaggtttgaaacagaagcttgtacatgcaactgcttcacggtatttatatttacttccttttcagatcaaaattaaaattgtgagtatgatattaaagtgtatgtaggattagtttagtttgttttctttgcatgctattcactttttgtttgaggtttcgattcattgtggtctctgcatttgttggttttgcagggacaagatctttgaagaacaaaaaacactgtatccttttgtatagggaagactctagcttctcgtgatgtgcatcatcttgttaagctgatcctaagtgttttgttagtttctcccatgtcttaaccctatcaaagatgacgggttcatttaccagtcagtttttgacttagttttgtgtttctaaatcgagaggaactcttcttggtgtagttattgacaatactttgctgttctagtgaaatctaattcggttgaaatattcttgtttccttgacggttactcccactccagctctgacttgcggaaaaacctagaaactctggagaagaatggtgtaaatagtctcaaaacaagggtcaaccttggttcagaagtttacatgcaagctgaagtgtacgttacttatagctttggttctttcgtttaattttagtcaagtcatttagctatgaaaggtcatgcattgtctgcatacaatgaaatacactgtctccatacacagcttaatgcaattaagaagtgtgcttttactgtgttctgtatgttagaagctagttatgtattattgagcagaaaacgtttaataaatggggattaaaataggagatgctttctaccaggtttgcttctgatttcgtttcacttgacttgggtgtttgtttgagttcaggccagatactcggcacatattcatggatgtaggcctcggcttttatgtggagttcacacggcaagaagctcttgactatatagcacaaagggaggaaagaactcaaaagtaagagaaatctttgcttttctagttttcttgctccatgtacaaggaaaatatggttgtatcattgtatatgatgaatgagttctccggtggaatgcagtatagtgactgaatgttgatgcaatataaatgtggttttttttgtttttaacagacaactagaagagtatactggtgttattacgcagatcaaagggcgcatcaaactggtaagttcaagttcttatcttgctttgtgatagtagtcaatcatttgtcttatgaggttgaattggactagaaaatcactattgcgtaggaaccctgcatcagacggatatatgaaagtgtcatcggataagtattaatgttaaattaccattgcaggctcattaccagattcagcaaatactcaatcttcctgaagagaatccgtcatcccggcaacgtgcgttttagtacactacctagtggaaagttgaggattttctcttgcagtcttatcttctcgatttgttctgcttactgttttgagtttttaaagcagagaattaacttagtttgttcaatactaactctttctccggaatggaccaaactgttggtgttagataaacatatcgattaagcaatcaaaactttatagaatgactattgttgtgggggtgaatagtgaatcgcactctgttaaatctgccatttctattttaaatattaataatcacatgttagaacttagaagatcattaacagtttaacacagctgatgaagaatgaaataaaagtatgaacgaaacagatacaagataatgatattccacgtcagcaaagtgtccaaatatcttccgcttccctgtcttcgtcggtcccttttcggttttcacggtaaggctcggaggaaaacctaattcgtccggagaatctccacctcactctcgccaaacgcatctctgttgtaggtaagtcacggatcttcattctacgctaattgttattgttatcgttattcttgatctgggcgtttttgtggaatttgcatctaaaattagaaatttggataccaaaatccactccaattgaataaggtttctgaagaattttcgtttgattttgagatcgaaaattgcgttttctcgtttttgttttgttatcgctaacgcatcaggtcatatatctcaagtttatattttgtggcagcttgtgatg

SEQ ID NO: 29329 - DNA, 3003 bp, Unknown
  misc_feature (1)..( 3003): 2750-1469P.txt file - cDNA_ID_3015490; gDNA_ID_2684095; Annot_ID_190059
gaagcttgttttaagcaactctttacatgatattcattgctatttgcacgattcaagagtgacatatacattttatttaacaataacagtgtaagatatgtgattgaatacttgtggaaacatagagttacacaggctgcgatagtattcgacattttaactggttttgacattacacgattttgtattccttgcacaaagtctggtaaaacagtaatagcaagaaaaggtcaatgctttcctttgttgaggaactggaattagtgtatttgtcaggagattattctactttgagaatctgatgatagtaccaagccaatcttcaggaacactatctctcaaatcaccgtttagtgctctctgtgaatgagttgtcgcagcctgtttgaggagattgaaaaaaagagcatgatggcggttaaaagctccatctttatctaagatatttagttggttaaaggcaaaagttgtctataatctaccttcacaatgtagacatcgactccaagttttgcaatcatagcagcttctgatatcttcgtttccattccaccggttgtatcgtgcgccgcaacagagtagtcaactgtttgattccaaaaatcagagaggtttgaacttttaacaaatccctcagacttattgtattgcatagttttacaacattggttctttcgtttacctttcttgtctgtgtgctccaacagtggattcacaaccttccagcttccatcttctccaacagctgcatgaactgttagtatcaggccaagtctggaaaagatataaaaaaaacaaacagtaaagtttgaaactaaccgatctctttcaagagcacagcgtcgggctctgaaggtgaaggtggtcgatcgtagacacctagtacatctgtctttgtaaagagttactcagataacaaagaatatataggaaagagggagagagaacacaaattaaatttccggtttatactatgaataggatacgagaaagacaacatattctggcttcaaatgatctgcaagatgacggatgataacatcaccactcaatatggtgcagccctgttcaggacaagattttcaactgttcaaattctaaacggacaagaatctagatagctatttggtatctctggagagcatattaccagtatattgtccagcactgcatctccatggagaacctggccatgacaaaaattactgtccaaattacagtcaagagactttggtaaacatctacctaatttcactggtgggatcaaaacttacagggacaaatcctgagtctatggttttagctacggttgctagatctgcagaagccacctaatgcaaaaagcagtctcattgaaatctaaacccacatgcttcagatcaggaaatatgttaagaagttcagttagctcttacatctcttttggaggttgaccaaccacatgaaaatggagacatgcctatcgtaggaatgccctctgcaagagatcataatgtttagcttcaaaattcatcttttcctcttagccagagtaggaaaagagaataagcttaagagatacctcgggctagtgctcgtacaatttcaagattaagatttgtcacctgcaaaaagaagttgtagactatcagaacagctcaagactatcttacgtaagagcatcagatttagctaacagtctcacagatatacgagtagcaacgaaaccagctttgacaataggtttctcaagtcctcctttgtgaaccccagatctactggcctgaaagtgcccaaaggaacctaatgacaaaaatcagaacaacacataagaaacccaaaaactaaataacagctcaactaacacaagcaggtcaatgatctgtaagagctaaatcaaaaatgtattttgatccttcattataagatttaagcagataagaatcaatctccaactaaccagcgccatgaaccacaacaaatttactaaactcagaagacttttgatcccctatgtcatccacatcacaagaaatctcagagcttccaggtctcttgctccaatccatgccaataaccttgcttggagctgaaccctccaacatagcttgacgtaactgacacgccacgacctccagattttcatcgtgaatcttctccagctcgtttttgcaagtaattgccgcacctcctatcaaatcatttagacattctgctgttacaaagtctagacaggtaaaattgatgggaaatgaataaaagacagatctttaaagtctttcctcatcttcggtattcaatagtcaaatcagaatcaaacccataagacagaacaactaaaatgcgatctaagaatcgatccagcaagtattttaatagggatcaaaagacaaaccaagtttcacaatgcaacgaattgatctgcttcgactctcggaaatattcagctccattgttgcgtctctctctaaagctctcgtctttagtggtcaacggtatgtctctctctcccgctctaactcaacttcatcgtactcgtatccttcttcttgccatttcccattcaccggaaagattctctctttttttttttttttttttccatagaaatattcttctttttattcctctaaagaagcccattaagctattattgggcctaaccaaattgatcaattttttcaaaccgggtttatggtttagtgttttaaggtttcagttaaattagcggtttagcttcaagttcgcgatggagtagaagaagattacctccgacaaaagcacgttcacttgtgccaccgacaaaattggaaatcttacattttttgttttctctaatcaaaattattgttggaacgtagacaagatccgttccaagattcgtctttttttttcaatttgattcctgggttatctgaaagatcttctctttgcttcgatttctatctccgctgcttgtgaaatcaacctttatggtatgtaatctcgaactcagctaaaacacacttcactctcggaaacatg

SEQ ID NO: 29330 - DNA, 3000 bp, Unknown; identical to SEQ ID NO: 14252
  misc_feature (1)..( 3000): 2750-1469P.txt file - cDNA_ID_3015494; gDNA_ID_2684095; Annot_ID_190058

SEQ ID NO: 29331 - DNA, 3000 bp, Unknown; identical to SEQ ID NO: 14265
  misc_feature (1)..( 3000): 2750-1469P.txt file - cDNA_ID_3015578; gDNA_ID_2684096; Annot_ID_190127

SEQ ID NO: 29332 - DNA, 3003 bp, Unknown
  misc_feature (1)..( 3003): 2750-1469P.txt file - cDNA_ID_3015582; gDNA_ID_2684096; Annot_ID_190125
tgatggctgaaaaccatgtgccaggtctctccaggagcatcatcagctgtgattttggtgttgagaaggcattttccagtgtaaggctcttttggtctgtacctgttaacaatcacaccttcctcgttcttctttgacactttctctactttctttgcaggagtaggagtatctgtttctgttgtgatttgtgcttttatggaaaacactcttttacctgtcactacattgttgcttttgtagtaaaaagcacccttttaaacacacccaacaacaaaaccagagagacctaatcaagatcccatcaacagtacattgatcttccaaaagtttttggtcatatttgagaaaacccagaagcacatttatccaaattccaaaactttacttaacatgttacttacaagacccagaagattattagcaaaaccataaaagcagagcatctctagactctcgactacacaactttttttgtgggatcttgactttatcattatccagttgagaaaagcttataaagtaccttagtaaacctgatcctttcaggagcaatggcacaacttgtagcgggaaaagaagaagagtttgaagatgtgagagaaacagcagcattcatggtagtcgccattgcagagcaaatgagatcaaactgagagaaaatatcagaggaatataaaaaggaatcacaaggagaaagataagagaaggattacaagacatttgtgtttgggtggatgaggttttaagaagagagtatctcgttcatcaaagttgtggttatcgttatttgacttgaggaagctatatatctcttttgttttttttcctctaaatatcttgtgtgtataaaatacgaaaatcaactcaaaacataagttttaacacatgttttttttatattaaaaccccataattatattgttttttcattgctttgcacttttttattttccagaactattttaccctcaattaagtttcaaatctcattagacacaatccaattgtatttaaaattttaattataaagcacaccaaaaatatgatgtggtcaagctttatacaagggccctttcctttaaatatactttacaatgttttatttttggacaagatattatcacccataactttcctacctgatcaaaattatatcatattttaccatttcacttttcaatcaatgcctatatatccacatttgcaaaatgatgaatgtatatacaaaattgaagttgtggattgttttgttttagggaatctagtttacatatggagatgatgtcacttccaagagagttggtactatccaacgctctctcttgtttccaagatgtttcgtctatcggttgcatcacctgaactatacgcgagacggtcccttttagactgtcccgaatgctatatctatgttttcatgttgaacctcccagctaaactcagctggtatgttctcgaccggaaaacatcaggtcctagtacagctaagagctaacaatctcttggtggctgttcccttgctccacttacatagttatatgtctctacgttcaagcttagccgtcgttggttcaacaatctttgtcatgagtgcttgtctgtattgctcatggactgcccatctaacatgtgtgccacgcagatgactgtgtctagtagcatagaaaaaacttgtgtgtaccccttgattgtgtcgaataaaacagaaagctcaaagtttacatgaattactaaattgtttctctttaaaatccttaaactatgtaccatatatgcatatgggattaagataattactacgcaataatcgaagtctaattcagggagactaatccaagtaattcacaatcttgattaagagatcattggtagttagaagtttcagtgcataacagtttctcaattggtcaatgtatttactttattgtttcggtcatctccacaaggtcgtcaaaccatatacagatatactataaagtagtataacacaaccaattccataaatctcttttctcaatatgaaaaacgaactagattaactacaaatcaacaagagtttggattaaaacaaaaacaaaggagatttgggaaagaagaaagtttatcatcagagaggagtgatcggtacatcaatcggccacaaaaggcctcagacgaccgtcgtgagaattttagatcaaatctcatcacttgaatttaacttcttcacatcaaaaaatcgattactttagcaaagtaaaacaatatcaaagatgaaagctacaaaaacacgaagaaaaaagagacgaatatagccggcgattatgggtactgaagactagtttgcctttttatataggatgatggagcaaatctagggtttagtttgacaattaaagcatacgacaccgtttatttttaaatgggctcgtctatttatctacatgtctggcccatgtatgactttactagatctagttctgaaattgaaagttataaatttttgtatagattactttcttcttccttatttttaacacacaatttattatatgaaaacaatttaactacattaatgaaaaaaatacaattttttcaataatacaattttgcataacgtgctcccatatctctactctacaactgggaaaaaatatattataaagcttgtttttgtatagacatattcatgtgtatacaacatgtcaacaacatacattggcaatatatgcacatgcatgctccaagttgctaattaaacactgaatctgaaatctgaaattatgccaatctaaaaacctttcggcggtaaattttgagtgaataagacaatgtaaaatgactaagataaaaaagtgttaggtggggtgaaaaaaaacagagaataaaaacctcgcaagcgagggaagtgatgaataacagagacaattggttatattagctgtcactcccatctttcatattccttcaccatctctctctctctcgatcttgtgaaccactacacacactaacacaatg

SEQ ID NO: 29333 - DNA, 3000 bp, Unknown; identical to SEQ ID NO: 14269
  misc_feature (1)..( 3000): 2750-1469P.txt file - cDNA_ID_3015586; gDNA_ID_2684096; Annot_ID_190123

SEQ ID NO: 29334 - DNA, 3000 bp, Unknown; identical to SEQ ID NO: 14270
  misc_feature (1)..( 3000): 2750-1469P.txt file - cDNA_ID_3015592; gDNA_ID_2684096; Annot_ID_190121

SEQ ID NO: 29335 - DNA, 3000 bp, Unknown
  misc_feature (1)..( 3000): 2750-1469P.txt file - cDNA_ID_3015609; gDNA_ID_2684096; Annot_ID_190116
gaaccaaaagagccagttagcgagaaatcgcgtggacagctcgtggttgaagtcgaatataaaccttttaaggatgatgatattccagagaacattgatgatccaaatgcagtagagaaagcaccagaaggcacaccttctactggtggcttgcttgtggtgatagttcacgaagctgaagatctagaaggcaaatatcacactaatccttctgttcgtttgctattcagaggagaagagcgtaagacaaaggtatatataaaacttctcttaaaactcaaaatggaaacatatgagaggacatcaaattttacacattttggtttgattttgtagcgtgtgaagaaaaacagagaaccgagatgggatgaagattttcagttcccattagatgagcctcccataaacgataagctacacgttgaagtcataagttcttcttcaagactaattcatcccaaggtagaaacaaaatcagatctctctttaaagattgcatcaaaatcgtatctctgagaaagcaaaaactaacattttgatatatgatttgatcaggaaactcttggttacgtggtgataaatcttggggatgttgtgagtaatcggagaatcaacgataagtatcatctgattgattccaagaatggtcgtattcagattgagcttcagtggagaaattcttcttgacttcaaaggttcgtgttttcttctcttagggttcacgaaacaacactttttgtttgccttccttcctatgtacgtaaaacttctatatttgttgcatgttggttgctatggctcgattcgaagaataatgggttacacagtataatgggccacgtataagccttatagttcatatggattttattgtttggaccttttggtttatttcttgtgacattttctgatagttttttttgtcgtttctgaattattttgcagcttattggattatggcaatagtgattatggattgtctttttcatctatttcttagagaattctggtcagtaattgaattattctatcaaaaaggaaaaaagatttttgaacagaaaagaagtgaagttagttaataaagagagattggtcactggttggtgaatactgaatagttggtaagctactaagcttaacttctttgatatcatgatttggttaattcatacttttcgtgtacaatttagtggtttgtgctactatcattgaatgtgattatttaaatccaaatccacatgataaatgtttattaaaaaaattatgagtggttaaattaacacataattttgtacgatttatcacggtcatttgataaatatttgtggataactttattacatttctaattttcattattaaactcagtaagcatataatcaatataagcaatttcttttttggtcagcaatatatatatatatatatagtcttatggaatgaaaaagttgaaaataacacatgatggcaattagctactaattcatcaagtttgacaaataattataagaagctaccgtctggtgtgattatgattaggtgatgggacaatcagtgacgtggtggatcgttagtggattgatttagttagagttgggcacgtcccattggactctagtcgcctatgtttcgtaatccgaggggaatcgaaaagagaaaataagtaaaaacatcataaataagacatttatgaatcgtgccggcacgttcttgatgagtgagagttgccaaatccaatgattaaagatttcattcatgcctcttcgtattttgcttaagtctctctcgtatgccattttttttttttttttgctatactataaagtctatcttagatcatttgaatttacctcccttgatacattacatacgagagaactggcagttgtagaagatgttgtgaatgggagtcttataactggatatgcggattcaaattcgctagctaaagaaagtttttatttgaagaaaatctatagttttgagacggtataatattttaccaattactatttgtaaaataatcgatacatggttaaactaagtaagataacaacttttagttgttgttttggtgaaatgataaacttctatggaattcttatcttgttttggtaggtaccaagaggattagacagataagcgacttcgtttactgctaatattgataatcaaaacttcgttagctatgttttaataaagttgtgaacaaaaagaatgttatggaaaactgctcaaaactggataagtctcatgccagtaagaatcaaagtggcagtgcaagtccaaagacacaacacactaggattttgaaacttgcattgttcagacaatatatgatagttcaaaatattaccttactaagatttctctaggcttcatgtcaatgatttagtccaaatttaagagacaattttaactcaaaacaacaatgaaaatatgtatcacaataaaaaagtgttaaacgaaatatattattaaaaacatttaaaaactgttgagaaaccaaagagataatacaaaaacattcatgacaattgtatttttcttgttgtttaaaaaaaactgacagatcttctccatttcaaaattcaaaatccgtgacataaaagaaaagagactttcaaaattttgaaaaaagaaaaatagaggtgaaaataaaaagtataatataaataaaaggggagtgagtgtatatgataaggaggtgtttggtgctgttctcttagctgtctcagagttgttgtttttctactagtcccctcctcctataggctcctctcaaagtcatctatcaaccgccaaatcaaccttcttcttcttcttttccttctctcttcgattctttttcgaatttgggtgattctcagattcacaagcttttagagctcgaatttgattggcgagctagaaatgtcgaggttttgaggaagaagcaaccacaaaagaggattgattttaagggcttttttgtttgtttccgatcttgcggcagagatg

SEQ ID NO: 29336 - DNA, 3003 bp, Unknown
  misc_feature (1)..( 3003): 2750-1469P.txt file - cDNA_ID_3015612; gDNA_ID_2684096; Annot_ID_190115
aatcttaatagaaaatcacatcgaccatatgtaactgtttaatactagaggtctcacgtaagacataaacatttctctagctattctatttcgtcaatgtagtttgcaagatgatcatacacactgacacaagtgattatgaggacctccctgttttccttattctagaaaaaattgggtcccaaaatcatacaacgaaagacatgctatcaaaggatctaacctgtaagtgcacagtgcatgttggacaagctacttctttcatccgcctcccagatccttccctcaaacctgttagaatcatagctatcattgtcagcaaccataaaataccagaaacaatatatcataaacataagtatattagatatgaaaaattaccagacgaagacttgcggtttctctccatttcctcctgtatcaaacatatccgccatcagaaaacaattatatactttgcccaagatattaactcaacttgtaaatcattaaacttaataaagaaccaaggacgattagctcacctgtaactttctagcaaggtcttcatggctctgcaggctcacattcctgccagtggtttccttggcattactcaacctttgtgacacttctgcctgcacatccagaaacagattgaacttagaggcatacgcataaaagacaagataccagttcaaattaacttaaagctacattctcaggaatcaacggaacatgatttctcaacttaaggaaaaataaacagacagataagcataccatgcaccggtcacaaacacggacttgaggagcattatcctcagcagtgagagcaatcctgccttgagtacacttgtcacagaagacgtcaccacaattcctgcagtggtgctagaaaataaaaaatccataaggtttgatagtcccaacatggccaaaaatttaattcagattgttagatcggggaaaataatacccttcgtataaatgcaccgaaatctgaaccacatgatgtgcacttagaaacagcttcatcaggtacctaaagccaaaaataacatggaatgagaacaacataccacagctaagcaagaaaataagaatcaagtgatgtaactaatcaccaaaactaccctagcccttttactttgactacaagagaaatgtgtttttcttccaaaaaaaaaaaaacctacccaatgatctttctcctcattaacaggctttataatgttcatccaatcacccaatccttttttcttctcagcagtttgttcaatcagttttccagaggtgggaggcctgctacttcccccgatctccttggcctaaaacccaccaacataagaacattggattagtcaaaagaaatcatgatggaattgacatatagacttttaatgaaacaaaatttgtaaattttatgaacctgaaacattgcagccgtcacagtgtccagaagggtgttggtggtgtaactatttgattgcaatctgatacgtttagcttcaatgtctaccggagtcttagaccagaaagccagaatagacgaatctagtttctgatagaaagacatttacaacaatagataagacctccagtcacaaaaatggaacaaattcagtcataagaagaaggtagataatctcttacttcgcatcttgtgatgttctcaagaggatatattctcaaagttcggctagtacttggatcaagcatacgaagaccatccaaaccaatctgctagcacaaaaccaattcactaaaactagtttaggtaacacaaagttcaaattgaattggggacattacctgacaaagaacatctgttgtggtttgtccataagtctcagccaacaatttgacacgaaatttctgcacaccaccagtggaatcttcctgcacatcagccttaggaacagctctcacgatcttagcagaattcgagctaacagaagaatctctccctgaagaagaaaagctaatggatcgtccataatcatcgaacaatgttgaattcgatgatttcggcgcagttccacgagaaccgtatggctcaactttgcctccttgataagcataaacgccatcgccataggaatcttcaaaagcaggatattctccgctatcagatcgttttccgtatagatcagatcctaaatccgatctgctccggttataaccgtcataaccagattgatcaaatttcactgacggtttctcatacgaaggaggtatggatgatcctccgctactataaggaggtgcagagtacaaggatgatgaataaggcgcgggattaggattcggcgcaggcgcagatgaaggaggaggcgcagatgaatagccagaggtttgatgctgatcatacggtgagtaatacatatgttgcgaggtaggttgctgatacggagcagtagaatcaaatgatccataagaggatagaggttgtggatgaatcgtgggtggaggtggtggttggttgaaggttgaataagaattagggtttagtgatgtcgccggcggagaaggaggaggttgtgatggtgaagtgaaggaaggagctgaaggagggacatgctcagagttttgcccgtaaggagtgtaattctgtgaatagttagagtaatcggcggaaccgtaaccgccggtgaacggtggcgctgatgcgtacgtgtttcgagtaagatcggtcggaccagctacggttgccggcgccggcggagaaggattgggattaggattaggattcggagtaggattttgaaattgagagtattggtggtgatagtacgaattgtaatctccctgttgcatcgctgaatcggtgatcgtcggcgatgatttgatcagattatatcggaaattggaaacgatgacgaagatgaagatgaaagatagatcgagagagtcaagggaatatttggtgagggaaggattgtctgtgccgcgaacttttttgtatatttaataataatacacgtggcggtataatgaaccgttgattagaagtaagagatg

SEQ ID NO: 29337 - DNA, 3000 bp, Unknown
  misc_feature (1)..( 3000): 2750-1469P.txt file - cDNA_ID_3015615; gDNA_ID_2684096; Annot_ID_190114
caagcatcatgcttaaagagatctttctccagctgcctaagcaagaagttaaactggggaacggctaaaccagtcaacttcttgcaagaaattgcttatttaaaagtagccagcttttgcaatcgcattgatcaattcaaccaaaaacttccagttgacaaaaatcatgtagacgatagtttagtaagtggaaaccatgatttttgattagtgtcaaaaatacagagatcgttcaagtatcatagatcactgtgattgttacaatgataactgtacaaagctaaggcctaaggctaagctgagaaagaacaaaacaatatgggacctaaaacgggacagtatatggtaatgaaaaaattccaacttcagacaataacatagctctaggcaaagaggaacaatctcttgacgtctgcaagctcatgatcgtgtcttcatcagtcttataagaagacttggcagaagaaacattttctttccgacttgttccaaaaagccagtcatcgctgctgctatcatcttcctccaaggaaatacagggaggaactaattcatcaaacaatgaattgtaccgggattctttgctaggcttatgtttctttctcttctttgattcggaaataattgctaccttgccactctcaagagaagttgagggtacagccacatcatgatcacagatacttggaagagagacagaacttggtaattcgctaggtctctgagtccctgaagtggaacaaacaggatcctcttgaggtacagcttcagcttctttcggtttcttgaaaacaatacgaatccgtagtggtttaccagctacaggtgtagctgcaaatgattaaacgtctctgtttcagtatatgtattcaaacacaataaagatattcatctaatccgggaagaaacaaagcacaaacctttgatttgactctcaacaacagcaggagaagtttcccttcttctcttcttactgttctggctaccatcagacaaatatccaacctgaggttgctcaaattcttctgttaaacaagatttctcaagctgttcggattcatatgagactgtcttggttgtggaatacttctgttcaagggatttcttctctttctttaatttcttttctttctttttctccttcttctctttccgatgcagctttttagaatcaactattggtctttcgatctttataatccaatcagaataaaggatttagactagaggaaggatttatcaggcaaacaaccagatacccatatacgtgggtaacatcattcaaccacaaacacacataatgttaattactcaaaacatatatctacaacgcgtctttatggttgactttataattggagaccaaaccaaactaacatacatgtctacacgacatcgttaagaacgaaattcattatgctaaaacatgtatagtgtagattcaattcatagatctatgctgaagatattttcctacaatttaaccaatcaataacttatatgcaacctagagatctggctacaaagaggatattataaggaaatttaactctgaccgaacacagaaacccatgttcagacaagaggacaccgtagcgaatcaatcacaagaattgagtgctcgacgaaccttagtccattcgaccaagttttgaccgttcgcccagttcctcgcatacacaggcggtggggatgtgaaatatcgtgacatcgttttttcttcttctctttctttctttctcagatcgaatcgactaacggacaagacaacggacagtaattcggacagaactaaatcgaacctaggtttcagattcgcgcctaatgaaacttcttctttgtggcgcgaaatcaaaacgaaatcgataacgagagacggaagagagaagaaccctaattttttttttcgattcgattttgttaatcgatgagagagagagaaagaagaaaaaaaccaattgcggttgagaaaataatggtgaagggtaaggttctatttaaagacgcgtgaaacactcagatccgccgactcgggctatacttacgtttttggaaagaataatgtgaaaaccctaatttgtaagggctattccgtcaattagtcgttatcatctccgtgaagctcggtccgagtttgctacgtcatctgaaataccctttttatcctttgcgtctttcttactccaaactttattattgggcttaacaaaaactacaaaagcccaaaacccaatgttaatacgaggagaataattaattttaattgactttgtgattaatgggtctcttgtccgacttggttccttacgcttgcatagaaaaacagctacaattatctgtgggcatcacgcgttaaaaaaccatctcttacttctaatcaacggttcattataccgccacgtgtattattattaaatatacaaaaaagttcgcggcacagacaatccttccctcaccaaatattcccttgactctctcgatctatctttcatcttcatcttcgtcatcgtttccaatttccgatataatctgatcaaatcatcgccgacgatcaccgattcagcgatgcaacagggagattacaattcgtactatcaccaccaatactctcaatttcaaaatcctactccgaatcctaatcctaatcccaatccttctccgccggcgccggcaaccgtagctggtccgaccgatcttactcgaaacacgtacgcatcagcgccaccgttcaccggcggttacggttccgccgattactctaactattcacagaattacactccttacgggcaaaactctgagcatgtccctccttcagctccttccttcacttcaccatcacaacctcctccttctccgccggcgacatcactaaaccctaattcttattcaaccttcaaccaaccaccacctccacccacgattcatccacaacctctatcctcttatggatcatttgattctactgctccgtatcagcaacctacctcgcaacatatg

SEQ ID NO: 29338 - DNA, 3003 bp, Unknown
  misc_feature (1)..( 3003): 2750-1469P.txt file - cDNA_ID_3015630; gDNA_ID_2684096; Annot_ID_190110
aagctaagatctgaagatgaagaaggagaaggagaagaagaagagagtttgctacatgatgttatgcctaattgatcttctgcttttgtccgagtctctaagtaggagtttgttctaaatgcttccttgtactcttcattaacacttagcttcgacgtcaagctacgacaacattccttgtcggactttcctgctccattgacaaaacaacaatttagcagatatttttacaatctttttctgtttttctaacaatgaagaaaaactatctctggttaattagagaacaaatgtataaatttcagaagttaaaacatttaaacgttctttgtagaaaaatattcaagattgaacaagttaagagaagaagagaaacaaatcattcaaattttttttttgatattttcttgagtaaaagtagagcacagaagaagaaaacgaaccttttcttgtagggaaagactttaatctagaaccaagaaaattcttcactttcaacatcttcgatggaactcaaagagagaggcgatttaggtgaataatagacaggcttcttgtttctttatatacataagtctttttgttgattggttagacaaagatagagagagagagaagaaacaaaagaagaaggaagagaagattgagaagcgacagctagagagatggtggacgttagcaccgctcgatagattttgcttagtgaatgatggcttttggcgcaagttagagggaacgacacgttgtgtgttgacacgtgttgtactcttggggtcgagatgacttgttagtttggagaagaagtttccttttacggttttaccttcgtttgttgtgttctctttactttttttttcaattgattaatcatgaaaattaaaattgattgatattaaaagaaacaatttcgttgtgggaaattagcatggagttcctcgtacgtttccccaaaacgagtaattgccacgtagacctttctcgtttcaatattatctggtttgggaatcttaaattgtttttttttttcacttttttttgtttatctttttgcaatatgaatgggtcaatgtatcaaaaagaaaaacacaagtcgccctcttctttaaactgcatgcatgtaattgaaatatatctaacgttttggtatgacaataactaatctcatgcccttgtttcactttgactacaacggtgctgaatgttaacgtttatttttaagttcgtgtattcaaactaatgactaactaatggagtttgaataaaatgactacctagtgaagttcaatatgtaccatattatacatatacttggttttaagtatatagaatttacttcacattgataccaaaaaaaaaggtatacaagtgtgtaattcttgttcattacacgtttgcctcactgtattactaaaacattatctcacatctttctatttctatgattgatgaaactcgaatgaaatttggaatatataattgaaagtttatatcaataacaaaatccgatgtcgtccagcggttaggatatctggctttcacccaggagacccgggttcgattcccggcatcggagcttttttattatttttgaattgaatttatttgggctttaagaagggcttagcatatttctatctggggctttgtttttaaaaggctagtttatgactagcccaaattcattgttcttaacatttaaacccaagtcattgatcaagtcatacgtaaactatcatctatagtttggtttctctatagaagaattttgcaagattagtctctttcggttttcttaagtgtttgtcttctttaagctcaaagacattttcattagaaaaataactgctcaaatcgaaaggtgagtatgcaaagttccttaaaaccatttttttttttttaaatggtttctacactcactaagatacaaagcacacccaaacaagaacggaacggaacttttttacttttgatagacttatttgggattatagagactatcggtgggcctttcttcactcggccgaacttcagtttctctgtgttttttttgtcttatattagacaatagaaatcaagatcatgcgatggcaatggcatatatgactcatattgataatacatactttcccaaagtagcacgagcacgaccacgagcacgaccaccagcacgagtgcactccactaaagtggtcggctacaatattccattcttaaaatcatattttttgttggttttgcgatatactatataaaaaatgatatgatatcgactatacatttgtttacctacaagcctacaagcatgctttggattactaggattcgataagagtggaatgtgaatgtcatttctggcttatcaactctgcaggcccgcaccaccctctccttttattggctactcaatccaaaatcctttgatctaattttgtcttcgaataaacattttaaggtaacctattgtttattattttttacttaaaagttaagagtcatattgctaaatgatactaacatcaggtccatcaccatgacattatatgaacacacatataacttcatactttggaaactttaatgaagaactttcagacttatttagtctcaatcaagaatcctctaattagtggacactccttccccatcaaataaatggctttatcttgatttgaattttgctaaaatatgggatgaagtaatcattttgttcattgtctttggaacctcggaaagaagaagaaaaaaacatgtggagtacttgtgatgtaatgactcaaacagaagatagtggtccgatcactaccctattctatctccactttttgcccaattcagaaacccaccaatacttcaaagtgggataagcaattcaaccattaacgactcataattcttttgatctatctatagcttccagtgtctctcaacctgtataaatacccttttcttgagttgaggtatgtgaataagtctttccagtgattaggaaactacaaagccatg

SEQ ID NO: 29339 - DNA, 3000 bp, Unknown
  misc_feature (1)..( 3000): 2750-1469P.txt file - cDNA_ID_3015634; gDNA_ID_2684096; Annot_ID_190109
atatgatccatctgaggctgatgaaggtggaccggaatcgacctttactgatgtttggtacttgagaaagtcccatgaatgagttgtatgaagctggaagtgtgggtcaggaaaaactgaaaccactcccggtttcttggctatgaccttggcctcttctgctgtcaaacgagctgcaaaacctgagaagccatgcttatatgtgtggagaagatcgtttgctctcctacaaaaccaaaccataaaaaggtctcaaaaatccacaaaacactaacaaatgtatattttgcacttcatgtaaacagtgtataaccttttaaacatggtgtttatgagtatttgagctctattagcgtttgcagcagaggaagctgatcccatgtagacaatgtagaccccatcaccatttctcgacccagcttcagtttctgtcataaacaagatgcataagagatatagaaatgataaaaagggtgtgaagaatgtaatgcctttcatggctttgtagtttcctaatcactggaaagacttattcacatacctcaactcaagaaaagggtatttatacaggttgagagacactggaagctatagatagatcaaaagaattatgagtcgttaatggttgaattgcttatcccactttgaagtattggtgggtttctgaattgggcaaaaagtggagatagaatagggtagtgatcggaccactatcttctgtttgagtcattacatcacaagtactccacatgtttttttcttcttctttccgaggttccaaagacaatgaacaaaatgattacttcatcccatattttagcaaaattcaaatcaagataaagccatttatttgatggggaaggagtgtccactaattagaggattcttgattgagactaaataagtctgaaagttcttcattaaagtttccaaagtatgaagttatatgtgtgttcatataatgtcatggtgatggacctgatgttagtatcatttagcaatatgactcttaacttttaagtaaaaaataataaacaataggttaccttaaaatgtttattcgaagacaaaattagatcaaaggattttggattgagtagccaataaaaggagagggtggtgcgggcctgcagagttgataagccagaaatgacattcacattccactcttatcgaatcctagtaatccaaagcatgcttgtaggcttgtaggtaaacaaatgtatagtcgatatcatatcattttttatatagtatatcgcaaaaccaacaaaaaatatgattttaagaatggaatattgtagccgaccactttagtggagtgcactcgtgctggtggtcgtgctcgtggtcgtgctcgtgctactttgggaaagtatgtattatcaatatgagtcatatatgccattgccatcgcatgatcttgatttctattgtctaatataagacaaaaaaaacacagagaaactgaagttcggccgagtgaagaaaggcccaccgatagtctctataatcccaaataagtctatcaaaagtaaaaaagttccgttccgttcttgtttgggtgtgctttgtatcttagtgagtgtagaaaccatttaaaaaaaaaaaaatggttttaaggaactttgcatactcacctttcgatttgagcagttatttttctaatgaaaatgtctttgagcttaaagaagacaaacacttaagaaaaccgaaagagactaatcttgcaaaattcttctatagagaaaccaaactatagatgatagtttacgtatgacttgatcaatgacttgggtttaaatgttaagaacaatgaatttgggctagtcataaactagccttttaaaaacaaagccccagatagaaatatgctaagcccttcttaaagcccaaataaattcaattcaaaaataataaaaaagctccgatgccgggaatcgaacccgggtctcctgggtgaaagccagatatcctaaccgctggacgacatcggattttgttattgatataaactttcaattatatattccaaatttcattcgagtttcatcaatcatagaaatagaaagatgtgagataatgttttagtaatacagtgaggcaaacgtgtaatgaacaagaattacacacttgtatacctttttttttggtatcaatgtgaagtaaattctatatacttaaaaccaagtatatgtataatatggtacatattgaacttcactaggtagtcattttattcaaactccattagttagtcattagtttgaatacacgaacttaaaaataaacgttaacattcagcaccgttgtagtcaaagtgaaacaagggcatgagattagttattgtcataccaaaacgttagatatatttcaattacatgcatgcagtttaaagaagagggcgacttgtgtttttctttttgatacattgacccattcatattgcaaaaagataaacaaaaaaaagtgaaaaaaaaaaacaatttaagattcccaaaccagataatattgaaacgagaaaggtctacgtggcaattactcgttttggggaaacgtacgaggaactccatgctaatttcccacaacgaaattgtttcttttaatatcaatcaattttaattttcatgattaatcaattgaaaaaaaaagtaaagagaacacaacaaacgaaggtaaaaccgtaaaaggaaacttcttctccaaactaacaagtcatctcgaccccaagagtacaacacgtgtcaacacacaacgtgtcgttccctctaacttgcgccaaaagccatcattcactaagcaaaatctatcgagcggtgctaacgtccaccatctctctagctgtcgcttctcaatcttctcttccttcttcttttgtttcttctctctctctctatctttgtctaaccaatcaacaaaaagacttatgtatataaagaaacaagaagcctgtctattattcacctaaatcgcctctctctttgagttccatcgaagatg

SEQ ID NO: 29340 - DNA, 3003 bp, Unknown
  misc_feature (1)..( 3003): 2750-1469P.txt file - cDNA_ID_3015638; gDNA_ID_2684096; Annot_ID_190108
ttatttgccgaacttacttgaagtgtccattttgcctgtccttttcatacttctgacaccacctcttaccattaccatcgatctaccttgtgtttttctttgctacatatgaattttgttctttttttaacccttcaattgttactgtttcaaaagaataaacagcaagatgacttgtctaaaacattatactttgcagttttgtaggtaccttttctatctcgggaagattcgtactattcagctcgaatatacggacgcaaaagagagccttcttcaggcggccaggaaagcccctatagcagctttgggcttcaggatccaatgcaataaatgggcaattctggttcgtctactgctgggtgagataccagagcgttctatcttcactcaaaagggtatggagaaggccctcagaccctacttcgagctaacaaatgtgagtccactttcataatcttgctgctgtgacatgtattcattaatttatgagcggataactaaactggtattagtatgtggtcacttgtgatcttgctacttcacttctgattttaaaccggttcctacttttcacttactggcctatacacctcttctgttaaaatctctctgtggtcacttgaaacacaattttgttgctgctgttgttttctgctccttcgaattatattgaacatgaatttctggctgtttactgttgctttttagagatatatgatgcaactggatagttgatactgattttgatctgaggcttactattaaagctctgttttgattttacaggcggttaggattggggacttggagttgtttaggacagtccaggagaagttcttggacacatttgctcaagacagaacgcacaatctcatcgtgcgactccgccacaatgtcatcaggactggactgcggaacataagtatctcctactcaagaatctctttacccgatgttgccaaaaagctgaggctcaactctgaaaaccctgtggctgatgcggaaagcatcgtggcaaaggccatacgcgacggagctattgatgctacaatcgatcacaaaaacggatgcatggtctccaaagaaactggggacatctactcgacgaatgagccacaaactgcgttcaactcaagaattgctttctgcctcaacatgcataacgaagctgtcagagcattgaggtttcctcctaacactcacaaggagaaagaaagcgatgagaagaggagagagaggaagcaacaggaagaagagcttgctaagcatatggctgaggaagacgatgatgatttttagacaaaggtcatctatttcttataagagttgactctccatctgtctcactttttttatgttcacaagtttacttggtactcttctcatcgtctctaagtgtttctttattgaggatttttatcctcaggaacctttttattactctggtttcactttaggaaaagatatttatcttgttggtttcagaagatcaaattcaacttcgtttaattgtgtttgggagattttcgcattttaagaattgaacacttgtagttatagctagctgtattaggtgggtcattattagaaattgaccatgtgaaatgctatcatctccaggcgatgcataccattaaaatccacattcataatttacattaaatgatagataagcagtcataaatatctaaagaatgaaaacaggacatgtgtattgaccattatgtgtattgatacattagtctatctctgccaaactaggtctcattttcttgaataaaacaatctcatgttatgcttttaattataggtgtttctggttcgattcattaacttcttaataatgacaaaaatctgtagaataatacccgggctctttgatagctacaactgccaactatttaatccatacaatcaaaatgtaattttcataattgtagatttgtaatgggtcaatatattcttacactctaatcatatccaaacaagctcctcaattccttaatcttgttgtatccagtatccatattttgttttcttactgcggaagttacttggtagtgtagtctggatttcggattgcagactttgcagtccacgatttttcatatgttggtgacaacgaacaagtgttaagttgacggaagtgttcgtaacaaacgacgtcgtgacggtgatcttcatcaactttgattggaaatcaagttttgagggacaattaacccaaaaaaataatcataatgataatgaaagagatttggcgtgttgctaataatgtaggacaagtgagcatgtgagagtctgtgaccgatgaacctgctcagaccaacctgcacatgattgtatcacaaacaaaaaactctcatttgtctttctttcgtcttactttattcattttaagcaaaaattaaatatccaccgcgttgcacaagaaatcatttacccatatgattattctcttagttttgaatttttgatgaccatgctgatttaaaatttgcaatcttacaataactttaacttatgtataaaaaaaaatgctgcatcaaccaataaaacaaaactttaggattacaaatgtttggctatgagtaaatcaagatattatctgcttcaagtctctttttcttatataatttcagaggaaaatgtttatatatagttcaaagcaatattagtgtaaccaaaggtaaattttgtatgaactttttggaggaatagaaatccatctgcagcattattacaaacagagtttgcagatctactgtctttttttggacttatactgttactaacaaaaatacacatgtaagagatttgcccaaataaataaattaaagatacacacaggctagataaagataagaccacatgtaaggtttttgttgctatactacattagtttacactcgcttcccacctttatttaaacaactctcacctccttcactcgatcatcatcatcatcatctctttcttcttccaaaagtcataatcatg

SEQ ID NO: 29341 - DNA, 3003 bp, Unknown
  misc_feature (1)..( 3003): 2750-1469P.txt file - cDNA_ID_3015642; gDNA_ID_2684096; Annot_ID_190107
aaaagatgatctggtattcatggttctatgaattggtgtagtgatgagatttggtacagtgtagattatctatatgatataattgtaagttcaaaaaatgcggtttcataatccagttgcatttatgttatttggatgcatcttggtgatttatatcaatttcttacgtttcgtgtcggatttagtagaaaacttgtacatgaatttgctttctcaaaagtgcaagttattgattaactgttttctttaattactttctcgctgcttgctattcaaacttttttagtacttagtcatgtgattagttgattttttgacatagaaattttgcttttgcttcttcttgaaacttttgtttttgtaacggaagttgttttgttatcttataggaaaacaaatcgaatgaagttatcttcaaggctatgggaagagctatcaacaagagtgtgaccatagttgagctgattaaggtattttctggttttagtctgtttcctgatctcagagttgtagttcttttgtgtatctgaagattatattgttatccttgatgcagagaaggattcctggtcttcatcagatcacatctattggatcaacggacattacagatacctgggaacctacagaggaaggccttcaaacgtatgtggtcactagactttagtatcaagtttattgttttaagtgtaccggaacacatgtaaccatgttgtattcttaattttgttactttgacctgttatttattaaaactcatctttttctcctgaagaattgagaccacgaggcatgtgtcgatgataaccataacactttccaaggagcagttgaacacatcctcagttgggtgagtttctaggactggttgttttgctatttctcgtctattctcttattggggattttgttgttttgtgtctagagaggtacattgtctccaatgctaatatatcttattaaataatgctataggtaccagtgtccgattcctattgagatggtgaagccattggctgagattgactacgaagggcaaggtattttagagtctcactcttaatgacgtttttaagctccctgccctgctgtcttttttaagtttttaaattatctctttcttgtagacggatctcctagaggcagaggaggaagaagaggtagaggaggaagaggaaggggaaggggaagaggtggtagaggtaggattactttagaaattgtttatacagtgtcgtagtttcgttgtaagcttttgcatgtgatttgtggataagcgtttgagtggactgtgctaattccttttttcgacttatcaggaaatggacctgcgaatgttgagtatgatgatggaggaaggggaagaggtggcagaggtaggatatctttagccaaatcgtatttgagtatagatttttgcatatgatttgtggataagggtttgaatgtgttgtgctatttctttttttgtttgatttaccaggaaacggatatgtgaacaatgagtatgatgatggaggaaggggaagaggcggcagaggtagaattgctttagaatatttctttccaaatcttagttttaccttttaacatatttgcatgtgatcggcggacaagtgtttgattggcttgtgctatttcttctttcggatttgccaggaagtggatatgtgaacaatgagtataatgatggaggtatggagcaggaccggtcatatggcagaggacgcgggcgtgggagaggaggtggacgtggtggtcgaggaagaggaggttacaatggccccccaccaccttactatgaagctcaacaagatggaggagactatggatacaacaatgttgctcctccagcagaccatggatatgatggtcctccgcctcagggacgtggtacgttgatgattttgttacactaatgttttctcattaaataatgatgagttgtaaatgtttaaaaattgttggaacaggacgtggccgtggaaggggaggtcgtggaagaggaggaggccgtggtggattcaacagatcaaatggagcacctatccaggctgctgcatgagcgaccagggtcattgaatgaagttggatctttcttacattctcatgtttttgtctctgttcttcaaagcaacttgttgccgtagaataatctttcgttcatgtcgctttaggttatatatatcctcatttattttatcatggatcttggattttcaagtttttattccttcaagagttttctagttttgtctcttttttgagttttggatatttgtttgactccaattacattcgtcggcgtattgacactaacaagtaaacaaccccctttggcattgcctttttccattggttcgtatatcagttgattatatattctaacaacataaaaagataacaagaaaaaataatgaataataaaattgtaattccaagttccaacgtgttttgagacaaaaagaaattaacccaacttgcgctggttgtgttttgggctattcgaagaaagcgtacgaaaataagtgagagaggtccaaacaaaactagtaaccaaaaagttaatcgccgttgccggggatcgaacccgggtcacccgcgtgacaggcgggaatacttaccactatactacaacgacatttgttgctcaatcgtaatgtagaagatataaatactaatatggaaaaaagctgtcttgaacaaaaagaaatatactttttttgttgtgtccaaaaaaaggaaaatacttaggaaagaaaagagtctcagcagcatcagctcgtccttaaatctgatccatcatcgtcactttctcccggcgaattccgttttatcgatttagtaagctctctgtctttatctctccgtctttctcagtcaacaaattggttgaaacttcaatcggttccttgaaatctcaccggcttagttgcatacttctgcaaaaaccctaaccttgtttttgtctttgtgaagagtaacgagatttgtgcaaagatg

SEQ ID NO: 29342 - DNA, 2620 bp, Unknown; identical to SEQ ID NO: 14261
  misc_feature (1)..( 2620): 2750-1469P.txt file - cDNA_ID_3015646; gDNA_ID_2684096; Annot_ID_190105

SEQ ID NO: 29343 - DNA, 3003 bp, Unknown
  misc_feature (1)..( 3003): 2750-1469P.txt file - cDNA_ID_3015679; gDNA_ID_2684097; Annot_ID_190165
attgaaatagtttagatattcaaaaagaaaaaaagatactcagctacaccaattaggacgaaacatatggtcacaaatgcaaagtttagaaatgtacaacgaactaaatgtattgcatgcccacatatactaaatatatgatgacatgtggtcaacatcacaaacatttttccgatatactaatcgtcaaaatccagtgttgaccataattgaccggcattgacaaacaaaaatattttgtatttttttaaaaattattttattgaattgtttatagtgttgtataatttaaaagaaaacatattatatatttcccataaatatattttgtatatctattgaatacattgattattataattagatagtcttttcaatttcaaaagtaaattaaaagtgaaataaaaaatattaagcgaatttattgtttttacattgtcaataaaaaattagcgtcttattgtacaaatgtttttactaaattcgttatcgttaattttctatatattaaaaataaaactttgcgacctttttttatttagactaaagaatatgtaaatttttctctatttttttaactatgtattatgattttaattttggcaaaaaactttttttttaccatgtaaaatttagacgaaagaatcttctacttaatttattcctaatgaaattaataaaatttattttcatttcccttttaatttagcttgtaaaaaaataaaataataataagaatcatacaaaatatattttagttaaatatagaatgtgtttatctattatacaataccataaactattcaatagaatgttttaagtaatattaaaaataataaaaattcatatatttgaatatttttgttggtctatgccggtcaacgacggttaacatcggaatttgacaattcgtataccgaaaaaagatgtttgtggtgttgaccacatgtcgtcatatagttggtatatgtgggcatgcaatacatctaatttatgtagttggttgtacatttctaaacttggcatgtatggccatgtatttcattatacttggtatagctgaatatctttttccattcaaaaataccaaaaatattaaaataaacttggaaaaatatcaaaaatattaaaatatccgaaatgcccatatatatccaatatacatgaaaatatccgaacagatccataaatttaagaaccaaacaggattcgaaccggaaattttgtggttcctatatagatcctacactctaaaacagaaaaagtcggaaccaaaccgaatacataatagatgtatacctaaaatcgtataaaatactatcctcatacttcatgagacaacatgtatggctgcaagtccaaaatggacgggacactgatgggctacacagtttttctgtaatcgataggagttaattaaaatcattttatttgctgtcacaaaaaactagcaacattttattgttgatactaattttgtatattttatttaattgatgttttaatgtaaataacaaattagtatattatttattgatgtaaatatatagatttgtatcaaaaacattttataaaaacattagttattataattgatgctaatcagctatatttgtcatatttatacataagtgatttaatatagtatcacttagttttgtagtacaatttaagtgatttaattcaacttttttgtagtacaattgtagttgcaccaacgaagttggaaaaaagattagagcacatcttattaaatcaaatttaaaccacactcaaaaccaaagatgtatatagttcaaatttacttcttatcgtactgataaatctacgtttatttcttacatctatatacaccaaatctttttaaaaaccccacacattttaaaccttttaatgtgatgtgaagctatgactccatgtgactggagttaggtctaggaaacaaaagtaaataaaatggcataattcaacgttttctgcccaaaaatatcactttttcaaaaaaaaatctaaactgaagtatttattctaatagatgtgtgattacatagttgagagattgcctaaaataccaaaaaaaaaagatatttgatttcgtattccaataggttccggtcaaatgaaaattttcttaaacgtccaaaagaatttttcggaggctcccagtaaattaaatagagactggaccacgaaaatttgcttcaaaaattaatgttctaatgttttggctgagatgatgcactagttataccacaattttcggtatctccatatatgtatatgtacactctatgagtctgttcgctcaaccttctgaaaatctcaacaatattttctgacaacgcacggttccagatgatgaaaaaatattatattttatctacaataataatttaaaaagttacaaataataataatttaaaagatttttttttattctatcttatcaaataatatcataacaaattttttaaatattttattattatatatatatatatatattaatgaactaaaatatgagaataactataaaatatttttgtatataaaaatatatcaaaattaacctcttaaaataaatattaaatagaattaattttattctataatcatgatgagagagaggcgatttttcttgcgatcgtatctcttcatcttcgcctcttctttgtatcgtttcttgacaagcggttgtcgccggttatcggcggttccttcagagttgatcaacggtattacagttatcaatcgcataactgacgctacccaatacctatttaaactatgtgaatgtctctggagccaatgggttgatcagagtgaaataagccaatttcctttgttcatattaatcatggcagactgcaagaaattgcactaggaattgaagatgaagcgatcaatctcccttttgatttgtgtgaagaggcgattagctaaacccgctatagtctaattgtgaaaccggtgaatccaaggaagcagaacttacgagcaatg

SEQ ID NO: 29344 - DNA, 3000 bp, Unknown; identical to SEQ ID NO: 14286
  misc_feature (1)..( 3000): 2750-1469P.txt file - cDNA_ID_3015748; gDNA_ID_2684098; Annot_ID_190199

SEQ ID NO: 29345 - DNA, 3000 bp, Unknown; identical to SEQ ID NO: 14287
  misc_feature (1)..( 3000): 2750-1469P.txt file - cDNA_ID_3015752; gDNA_ID_2684098; Annot_ID_190198

SEQ ID NO: 29346 - DNA, 3003 bp, Unknown; identical to SEQ ID NO: 27045
  misc_feature (1)..( 3003): 2750-1469P.txt file - cDNA_ID_3015757; gDNA_ID_2684098; Annot_ID_190193

SEQ ID NO: 29347 - DNA, 3003 bp, Unknown; identical to SEQ ID NO: 27046
  misc_feature (1)..( 3003): 2750-1469P.txt file - cDNA_ID_3015763; gDNA_ID_2684098; Annot_ID_190191

SEQ ID NO: 29348 - DNA, 3003 bp, Unknown; identical to SEQ ID NO: 27047
  misc_feature (1)..( 3003): 2750-1469P.txt file - cDNA_ID_3015767; gDNA_ID_2684098; Annot_ID_190190

SEQ ID NO: 29349 - DNA, 3000 bp, Unknown
  misc_feature (1)..( 3000): 2750-1469P.txt file - cDNA_ID_3015835; gDNA_ID_2684103; Annot_ID_190295
ttcatggatcgatgaaggaaaataagtacatcaaaagccgttttttttggcgtaacatatgttttttactacttactattagcaaacatattgggtagtatctgattggaaatctacgaaatttcgaagtgatgaaatgattatgtgatttcgcatgtttctatatgacatcgtttttgtgtaattatgtttcacatcttctatcctattgactttgtaagataaatgacaacattgacaagtaacaaaatataaatagttacgacatagtttgtagttgaattacaactttttgttttccttaatcactatgtcatttaataccacaaatttctcattcgtgatgattccatcattttccttgatcactagtcggaaccaatttccattggttaatggataactttttgcatgaaatataggttctacaagaaaacataaattgatataacctttggagcaaagataaagttcagttgttcagctacctggacggctcattaagattcctcccgagaagtattcttaaattatattatttatttttaataaagagatattcgtaaaatttcggctctgttttgcaaagttaacaatatctcaattcatattacaaacttcattaaataaggtttaacctaaccaaaaaaattgctatagtgacaatattttttctatgaaacaaacccacttggataacacttctatttgtggttttgtttggacaaacgtttatttttatggttcatatatgcatatccacatatacattatctccgaagtcccaaaactgtggaagcagctggaatgaaaatgttggtgacaaatgtttgtagccgcaaatgttaggctacaatacgtataagacatgcaaggtgcatgccccatttaattacgagtaaagaaatctaactcctacttcgatattcaatttgttcatggtctatcacgttatatacaatattgatcgacaaggcaatgaaacaagaaaaaaaaaaaaaaaaactcacgttcgatcaagatatcggttaacattcaatgcaagggtcgaaaaccaaaccaaccaattttcagtctggtttgggtatgggattggtttggttaaattcacactgatcctcctagaaaatatattcattgtagtaacagaggaaatgtaaattctgcgttttcattcatttcaattggctaatggacatggcaaagtgctcaccatcaatagttcacaagaaaaaatccttcacagcacgaaaccaatcaacttttttggccaacatggggctgaagacacttgccggaatttcatgagagttcatcatgccactatcttgaatcttcttatcagctgaagcaatcatgcattaccttggatggatttttcaaattgctggagctgcgaaatgaaaccgggattaggatatgcctgatgtcgtcggctccttacaagttccatagctttagagaatcccattccatgctttttcatcaggtaagccaccactatagtcacacttcaaagaaaaactcaaaccaatcaaattgtgtaagtatatatataacagaacgacacaataagcaaattacaggttcaagaaaaactcttaatttgtccacaacaaaatgtaatctgttcactaccataactcctactaataccagaatcagcaagctataaaagaatcaaagcaaactacaagattcatatacacttttgccaatctgagtctctgtagtttcctatggttactcagttggcaatttatatacacttttttgatatggttacataatttgcaattggttcacattgatgattcttaaacactaaatctaataactgaatgtatgagatttaagggcaaaagaatcaaaacctcctagacattcccatgaagcaatgaaccaaaacaccaccaccagattgaatagcttggtcgatgaagctataacactcatcgaaatatactgtcaaatcggtctcggatctatcaaccactacacgatgaagaacaagtttataaaatctctaaacgaaaaatttcaaaaacaggctaaggattgaagaaaaaaaacccaaccttcaatgactttgtagacaaaatcatcaggataaggaggagccaaggccacagcaacggttaagacatgagtgatattagagcttttgagaaaatccttgttattcgcttcagctactgatcctatgaacaatccctgagaataaactcatccaacaaacgatttttcggaattaaagactccaaaacctgagaaattccaagtgtgaaattagacggatagatagagaagagaaacgaagaaaacctgttggatctcgctgagatctttgcctccttcgagtagcttctgggaattagcttctccgactccgaagagatcaaccactttctccatcgctctctgcttcttttttcaaaattccacttgtacagacgaaaactcttaatcagaaagataaataaccctagattcgtaattaatatttaatagtttagttcggatagatgaatcaataagcaccagtggtctagtggtagaatagtaccctgccacggtacagacccgggttcgattcccggctggtgcaacaatttgtttgtttttttaagtgaaaagatttaagagagtcaacctttttacacatgaaatgaagatgattaaaataaatagatgacttagaaatcaccaaattaacattaagaaatattggtaggtaggaagtgaaaattgaacacaagaaaagtgttgagcaccctcttctcctttcagactgcttaaccaaaggaatatagcagcactctactaattcttctttttgttgaaataaaataattactctttaatttccatcttctttgcgtttttctctctatctctctttttttgttccattagatcattcataaagcggatcaagccaccttgattgtgactttcctcagttcttgatcactatatcttgaaggaattaagaagatg

SEQ ID NO: 29350 - DNA, 3003 bp, Unknown
  misc_feature (1)..( 3003): 2750-1469P.txt file - cDNA_ID_3015854; gDNA_ID_2684103; Annot_ID_190323
agtcttcttctccactgagagaactaaaagcgatgatgaagaacaacaacaaaagcaaattggctctcgacaattaaacgctgcgttttgatgatgtcgctttgctgggctgatattgggctcaacttaatagcccatttggtttgattcaaaacccgatttctcattgtagggtttatcacccgtcatcttcgtcggcgaaatcaattttcggactccgtcgaattcgaattttcaggtacgctaatcattctagcttcttggattttgactcatttcttgctaatttttcatttctttgcttgtatcgtgttcgtcttgttgtagtttgttctcgaactgagatttctttgctggattctaggttttagatctgttttccgcttgattttcgaatctctaggttcatagatttcaaagaaaagtcattgtcccatatgatttagaaacaaatccatttctaaagtttgtgcattttcgaattatagctataaaaaaatggaaactttatacgttttgtgacctctgtttcatcagttcggaggattttagttatctgtaatgaaaagaatggtaatgtaatgtgatgtcattcttgataaagaaatgggagacaagaggaagaagacgttcatgttcatccgtctagtttcagcagctggaactggattcttctatgtcaagaggaagagtaccaagggacttcttgagaagctcgagttccgtaagtacgatcctcgagttaatcgccatgtcctctttacagagcagaaaatgaagtgataagacaaaagaagcttgcttttgcctgttatggctatcatagatcaaataaacgtttcaatttagagttctatcgaaactctttgtaggattctctaaaacttaagtgcagattgattgtattgtgatcaatttcgacacccttgttgatttccaaatgaatgtactgtgagtgttaaatcgaattactcatgcgttcatctaatctaggtacttgaaaactgatcacaagttagattgatcagcaagcgatatgtagcgagcacgatagatactataagtttcttacccgacgagctaaccactcttatggtttgcctaaaagaagaaccaaacaaaagcctaacaattggagatctttgtctttttctacaaaacttaaccatctctcaattgtttggtcttcccaaggaaagctaaaaattggctttaattagatagcctagatcgacccaccatatttatgtaaagcatgactttgagtagagatgagtaagccaaatctttgatatcaaatcgaatttttattccatttaagaagattcaatgaacacacacttctcttgggttggtagttatatgatgatgtttttgacatatgatactttgaccagtgtctactttcccattgtgtttggtaattgatagtgataggagtgggacacgatgctccatcctacgaggttcgaccatactaatcgttgaactaatttacttgtcaaacacattaatttcagtgtagaatgactaaacacaaatggaaagttataaatttccattatcttttgctttaacgatggagacaaacttgtcttgttacagcttacatgttgcagaagaaacatagaatccaacatgagctataagttctccggagcaccgtgtggattctattacgatgacgatgattgtcgagtgttcgagacaagctcttttgggagatgtgcatcgcatttcactgcattcaaacttgtttattactatatataggtacatacaaatataaaatatattgcgataacaacaaactgttagaatacgcgctgcataaacaaacggctactaaattttcatataagaaaacatagatagatgttatatgcgatgttgatttataaatcatgtcctatgaattggttcgtgtagaactacaaatttgattaagcaaaagttgtaattttgtttaagagattctacagggtttgccaaatgttgtattaacaaatgttttagtgctctttaaataaatgcgtttaaaaaaggtttgtacaaaacatcatatatgtatgtttgaatatttgagataaatgtacacaacaactatataaacaaaacccacttaattaacatatcattaactctcttttttttcataaaacatatcattaacttaataccatatataaatctacacaacccaccaaagtgcattatgggtttctttggaatggtataatcatagcaccctggtggtctattacgtgggagataagacgagtagttagtttatacaagaaattctggtcatgaattaaaaactcgattatttgtttagtagatagataaagccgcttataaagttcatcaacctaaatttaaagttttttttttcaaaagtagctttttctttctttctcactttcaagtattttggaaaggtgagcttcctttaaatttcttctttttttgttgttggtaaaactatacatagaaaatcacataatatagttagaaagaaaaaacagtagttaatttaaatgcgtaagaagtaagggataatgatatgtttcctggaaagtgacggcaatcgacaagaacatgagggtctgaaactcgtaacgttgaattttcatcgtcatcaaatcatcatcgaaaatcaacgacaagaatatgattcgtatttttcctttgtcgattttttttgttaattagtagataatggaaaattaaagaatcttattaataaatgaagacagaagtaaagaccagtaataaaagagtagagtgacaacaacatacgtatatttaattattgatataagtggataaaaaaaagtaacaatgtcattgtcagtcgtggattcagcttaaatttaatgaatataaaccacaactatttcttcattactagatttatagatttgattctttctctctcagaatttttgtcgaccgaatttcatattcatatatagttttattaaataatctggttagatg

SEQ ID NO: 29351 - DNA, 3000 bp, Unknown; identical to SEQ ID NO: 14299
  misc_feature (1)..( 3000): 2750-1469P.txt file - cDNA_ID_3015858; gDNA_ID_2684103; Annot_ID_190321

SEQ ID NO: 29352 - DNA, 3003 bp, Unknown
  misc_feature (1)..( 3003): 2750-1469P.txt file - cDNA_ID_3015862; gDNA_ID_2684103; Annot_ID_190319
ggtttgttcttgatgaatcaactgattgggattgctcctcgacctcaccggattattctccgcagaagacggagagcgcctacacaaacatgagaaaaggttccaggaaataagtttcaaaagttagtgagaggatagaacaataaattagtataaagatcaaggagcaaagacacaggtatggttcaaatcattatccacaaagagtaaagacaccacaaaatgaaatattttatgacctttttaaaaccaatcaaaaccaacagcgaaaagagaatgagaaacgaaaacattatgacactgacaagaggataaaaagctcacatccaagttcggctagaaagtggctgaaaaccatctaccaagtttccattctcaaaacctgatactggcgattgatttcttcgagaaaaccccatattctggtcaggaagaatatctgaccgactgcaacaaaaattgagaattttatagaccgatattagttacatcaaaaaaaccaggatatcagtaaacaccatggccatgtctatgacatctcattcataccacctaggccacacaacaaactgataaaatctgaaagagtaagatacatgatgcagaacaaggaaggtgtaaactcccacaaggacagatgttaaaaggttaaggataagatagggatacaaaacagacagaatgtttatttcagaaagatcctgctggcataaatgaccttgatctaaaggaaatggcataaacgacctttttctttttgaatcttgtgatcgaccaatctcaacagcatcagttcccattctggaaagaatgtgagatgtagcaggtggagacgtggctcgactatgttcaccatgatctttcaagaaattccttgatccatcgtgcccatattgaggatttaaattaggcctgtgaggaaaaatgaagcaggtaaattcagctaagtcgttaagaaaaatccagcagcttgcttattaaaggctataagccaaatccagcgataatgatctctttagagcttcaaagccgctgccatagtaagcccttatgtattaggcagagaaacttatagcactccgccacactctactttcttcctactgctataatttcaattgcagaaactgaaagcatttgagatgtgtgattaacacagccgcatatgagtaatgacactcttcttagtcaaaatatgtcacgtacacttttacctctgaactccaggaaattggtaaggtctcacagaggggcttgtacgtgaagcttctggaccccatgctattccattgaaaggttctgggatcctgaaaaacatagcatcaaagtgttcttataactttctcggcgtaaaaattagtgcaacatatagaagattcaagcagaagttttacaaaaagaatcaaagccaaagaaaacagaaaatttggtttatcccatcttcactgttttgggttcccgaagatcctttacaggtataaggagtgaaaaaaaaaaaagagagccataatagtaagttatctgacctttgaattccaccaggttggtaaggttgtcctgaggagggtgatggattttgaaaagccgacggagatggtattctattaattggaggaacactgcaagcaaaaaccataataacttaggctagaatctaaagaagaagaaaacccgagagtagactgaaaaattaataattgaataagtaaccaacctaacatcatcattagacacatagaactgaaagagaaaaggaataaaagcaagccatacgattaagaatgtctaacctttgaaccccacctggtcggtaaggtttccctatagagagctgagggttttgagaagccgacagaggtggtgctcgctgaattgaaggaccactacaagccaaagttacgaaagaaaactgagcgaatttacgaaagaaaactacaacaagtagcacaataggctcttcctatggaggctcagaaacaacctaacatactcgcatagaaagaaatcaaagctgtagagctaaggttaatctaaccttcgaattccaccaggtccaaaagattgtcctgcaaaggctgaatggttttgagacgccggtggttgaattgatgaatcactacaagcaaatccaacattcgcagtgtgtaagaataaaaaagaaaggtacaatctaagaacaaaaagcaaagtaaagcaactcgcagcttctcctaaggaagatgaagaagcaaaacccgactgcctaagtgatatagaacacaatatcatagaaaattcaagatacttctctcattctcatgatcctaaacactttaatacaacgatagcatatatgtaaatttgacagttcaaaaaaatctctgagtataatagatccatagcgtgaaatgaatcctaaaaatctcaaaactcgaagaaaagtccgattgaagcatagatacatctatagagaatgaagagcacacctagtggttgaagaagcaccgaacggtgtaaacggcgctggcttagagctcatcggacctaagtccttcccgaaaggcctaaacgccattctctgagaaaattccttgacttgattatcgctgcctctcttctaattctccttcaaccttcgtttaattacgtcgccggctaaagtcgaaaccggagcaaattgaattttctgttctggtgacgcctcttccgtccggcgaggattattttacgtttaaaaccaacgacgtcgtttttatttccgaattttatgttgggccttttaagtaacaataggcttattatgggctttggtcaaggaacaagaataattgttcaaccaagaagaacgtgcgcatgttgtcaccatctcccttgagcctccttgttttaggtagaacatcaacttttcatgaccgttgacattttttttccctctttattttccgagaaaaaataaataaaattatcctctagttttcgatctcgatcatctggatccaagaaattactacgattgctataatg

SEQ ID NO: 29353 - DNA, 1470 bp, Unknown; identical to SEQ ID NO: 9796
  misc_feature (1)..( 1470): 2750-1469P.txt file - cDNA_ID_3015862; gDNA_ID_1972192; Annot_ID_180234

SEQ ID NO: 29354 - DNA, 3003 bp, Unknown
  misc_feature (1)..( 3003): 2750-1469P.txt file - cDNA_ID_3015865; gDNA_ID_2684103; Annot_ID_190317
cctatatgtgccatgtttaatggtttttttcttttgcctctctactcttctaatgaatgtcttgatgaacggtacagatcatacggtgcccatagatgatcaacgatacaaggcttccttgaatctagtcttaaccatggcttcccttttccactccagtgaagaagacttatcggtcccggatgcaacgttctacatcttccttcgaaattatcacctcctagaccatgctggttccacctatgattaaccgcttttatatcaccggcgaatatcagcagaaacggaggtaatgatcccaaatggtatatcctcttctgcttctgaattgtcatccactcttctaccttctgtgtatacattcctttcctccatttgtttacatccacaaccatcacccctgtgttgaaataacacggacgttttccttcaagaactttgaccaataccgggtctgaccagaaagttcttgtgaaataatgggtgaagtttgcgtggcagtactcgggagcagccaccactttaccttccatctccacatgccacagcttctctatgtcgtctaccacaacgaggtctgagtctaagtagatgatcctgtcaacgctgctagggatgatatccgcgaggtagattcttgcgtagttaagaggctgatcaagggcttgcctgatggatttcgatatcttgctgcggacgaggtttggatcaaactgataaatcttgaagtttaggtaaggaaaggttgatttgatgctggtgaaaaggtcgttttcgaaatgaggaagggacaggaaatgaaaagagaggttttcagggcaagtggaatgttgaaggagagacaaaacggcagccattgtgccacggaggtagtttgtgtcgagagtcatggcgatatgaatctgatcagcctcacgagtcccgcattgatcaccgtttcgaaaagccggggcttctctgaaaacaggaagagttggagcagaaggcttatgaagaatgactccaacacgaaccgccatagtggtggttgtgaccaagaggagtataaaggacaggaggcctaggagttgtgtataggagaggctccttgaggccatcctgaacctaattctcaggtaaactcttttattattattttcacttttttttttaatttttttttaaaaaaggtttaaacattacaaattaaaaagattgattagttaatagagccattgttagggaaaggctagaataaaggatttggggagaggcttgttttattagcagtctaaatgtggggaagagattgaacttcggactgtttctcacacaaaattttgtctccaaaaaaaatccatttcctatgaaataggaacaagacaagtctgttgtccaatgaaatcggagtgaatttttagattttgtttcttcttctttagattcttagaaactggtttatgtttttttttggaaacaaaaattattgtttatttttaggacaaaattggtctgatcaatttgctttgctgtcatttctttttacacttgattgcgtcggcgggtttttttttttcctttttggaagtaccaaaattagaatactgtaacaaactcccctaaaatgtattaatgcatgcttttcatgcaagaaaataatgatttttatgtgatcaaatccctgataacatcatacgatctcatcatatatatagtggtactggtaaaatctgtaattccaaaagttaagtaaaatagtaagaaactaacttaagaaagtgtgtgttactccacgtttcaagaaaagaaaaatgtcttatatactccaatcttcatgcatggctactaagacagtcgcgtgtcaatcggtcattctcatgcctaatactaatccatatatataaataatatatgaaccagagagaagatctcttgaaactctttcgattacaaatatttgagttcaaacttattctttcaccaatactagccatttgcagataagacaaatagaaatcgagtcgaatctttcttgcttgagtggtagaagatttctttctctagttccatgtaattggtctaaatcagtgaactcataatttcatgtacacaaaaaaaaaagactgtttcataaacagtggatatatggattggactcaccatgtcatacatggtctcgaggtaaattacacttactaagtaatcctttatattttacattttttaccatgttgtatggtaatgtgatagctacctaattcacagggccttaggcccattaggttttcaatattttcatggattatcgggtcgagaaaatgttatgatacccgacccgaaacggggagaaaataaacgagaaaagtaaggaattatctcgaggaaaagaaagcatcgataatctcaaaaagtttttggtttgatttgggaactcgtgcgcggctgtggcagaggccaaacccacccgtgtactccatccgtcggatccaccaaaccaatattctttcatctctctctctctctctctctctcttcttcttcgtcttcttctctttttattctttcttcaggaacaaattcctctgctttgggcattttagggtttctcaaatttttgacgctttctcttaaaagggttgacgaaataaccctttaagggaaaaaacaaaggttgaggaagaccaccaaggtgaaaaaagaaagaagaattcgaacaacagcagcaacaagataaagttacgaatttttcctcttttgtaacctttgtttctcttcttcctcttcctccatttttttccattaaagattctgcctttgggttccaatttcgtctttcctttttcgattttgccgcgtttaacatgacattcgcaaaaccctacacttttctggacgccattgttgaatcccacgaatttcgtttccctagagattgcttgttctagccccagcttgaagctaaagatttttcaaggaaagcacgtttttttgtttgtgcaatcgaatctgtttttctgcgttatg

SEQ ID NO: 29355 - DNA, 3000 bp, Unknown; identical to SEQ ID NO: 14301
  misc_feature (1)..( 3000): 2750-1469P.txt file - cDNA_ID_3015870; gDNA_ID_2684103; Annot_ID_190314

SEQ ID NO: 29356 - DNA, 3003 bp, Unknown
  misc_feature (1)..( 3003): 2750-1469P.txt file - cDNA_ID_3015890; gDNA_ID_2684103; Annot_ID_190303
ctcaataaataagacgattgtcactttaaaaagaaaatagtaattatccaaatatcaatttcagagatttttttggctaaaaagataaaagagctagctcagatgttataattatcagtaaatggaaaaccgttggagatttagtacaactaacaatttttgataagacaatataagaattttcttcttcttagattagtagttgtctattttcaataccactttagcttaatcaaagtgtccattcacattattcacaaaaatagttcatctattttattaatcttcttactttgattcaagaattccttttttttttgttgttgctcaagatagaatttagcttatacataaaaatgatactttttcgcagttttaaaattctctaagaaaccaaactgataaaatttaaagcgcaagagaatattaaagtaagaaaaagagtaaattattacagaatctcctcactaaacgagcttatacgttaatggctctaatcttgaatatgttgttgttggccgttgaggctgtgtttaatcatgtgacttttaactccaaagctaccaaaagtcttcggcccaagagaaaagagctacatgagtacattctacattcttcagccaataatgagactccctactatcttaattattgggccgaatatgggcctacattaactatttaatgggcttgatagtattgttagcatctagctttttatgattttgtttcagtgaggagaaaaacgctttctcaattatgaactctgcatctttgtcactgattcttctcacctgatctgttgcagatatttggtcaaagagtttattaaaagataacataatataaagtgaaaaagcaatgctgctttctctcattggttgtgcatagagcaaggacagagaaaaacaggttcgtacgtaagaaacacacattaactgtgttctgcttcctttgtattctctcacttttctcttttttcagaattcaatctctggaaattttcttcctaaagattaaagagaaccgtttggaccagatcagcttgcctcttggtaatggtctctcttctctttgttcccaatttctgtagctttcttctttctccctaactcgtctgctctctttgtctcttcctctcacagttcatacgtcttccatggcttccggtgatgttcttcctagattcttcactgtcttcctctcccattgcagctccgaatccatggtgagatttttctctggaatatttcatggaaaaagctgcttgggttgatatgtttcttggatacagtaacgatgtgaatgagatctgcaacattatcttaattcttaactctatatgtttaaatctcttgacactgacaaaagttttaactttcttcactaatgagctcaggattatctctgtttgtgttacttatgtttgaatatgatagagtatgtcaaactaaacactgaatttcctcaaagagttttctcctttgttgaaaaaattgaacaagaggtcttggtcttgttgtttgtctgtttacctccgcttgcagacagagtctttagcttatattttgctcacttttaacagtttagtttatgctacatctttgtgttgagcaggtgataccaaggtcttactacaatcttttaccacgtccgttgcccaagactgcgattctcatcggaactggtggaagattttggaaagtagcaatgacgagcaagcaagagcaagtgtattttgaacaaggctggggaaatttcgttgctgataaccagttaaaagagggagaattcttaacttttgtgtttgatgggcacaaaagttatgaagtaagtatctatggtcgtggagattgcaaagagactcgagcagtcattcaagttgaagagatctctgatgatacagaagatgacaacgtttctcttcatagccctagcaatgtttcacttgatagccttagcaacgattctcatcatagcactagcaacgtttctcttcgaagccttagcaacgattctcttcatggtgatgctgagatagagagcgacagtgagtattctcccgagaacctaccctcagcctctatatctgttgaatccgttgaggtggtgaatccaacaacaagcaggcagagaagttgtaagtaaacattgttcttttaactgatgcttataaccgaagctgtttagaatttgatctcaaatgggaattttgcagacaagaggaagaccattgagaatccacatctgtatttggatgatccaaacaatgtctgttttgagacgtgtcttaagcttagaaagtttgagctggtaagacttcattagatattattatctcgtctcattaaaaatcctttcacgagttgatgattatttttctaactaaagctctatatacattatgcacagttagttcatgcacagttggtgaaagactacggcttgatattcagcgacaatgttgactatattgacggatatggaaaactaaccgcgaaaacgaccaagtgggcagatcaacgggtttgcataaacaaatggcagaaaatatgcgagagaaaccagttcacagagaatgactccatcctatgtgaaattctccgcaacgaggacaaagtggtttatgcaatcaagattcacatcttccgcgatgcagcagcaagcacttgattctctgatgcagttctgcaattgtgtttcttctctttcgagtctagtcttttgtagtaaactattagaatgtctaatttcaaaacatgtttaagacttttgagttctcttgtagactttgaagtaaacacaatgaggagcaggcttaagcttacccgttaatcactctgtttctcttacaagttacaatcatgtaaaatgggttagaatgatcgttttaatatgttaggtacagatttcgtaatttctcgaaaatgtgatatctcttcttcacaacagaagaacagattattgtgaaagtcaaaacaaaaaaaaatctctgaaacaatg

SEQ ID NO: 29357 - DNA, 3000 bp, Unknown; identical to SEQ ID NO: 14305
  misc_feature (1)..( 3000): 2750-1469P.txt file - cDNA_ID_3015894; gDNA_ID_2684103; Annot_ID_190301

SEQ ID NO: 29358 - DNA, 3000 bp, Unknown
  misc_feature (1)..( 3000): 2750-1469P.txt file - cDNA_ID_3015902; gDNA_ID_2684103; Annot_ID_190298
caacaaaagtctaaaaccacatattaaaccgaactcaataccgaaaccaaaccggaaaagagaagttttgttactcggtttaaaaagtaaaaaagagaaaagtcaaaaaagcattaacgaatcttgaacaagacatcttctagttcttcttctaccaaatcttgtttttcttcagtctctctgcttctcactgttgtgctttctgtcttgtctctgtctttcccattgtcattctctcaccaatgggaatctcctttagcaacaacaacagaagacgagacaacaataatcgtcgccacctccaccactatcctccgccgccgccttactattacctcgaccctcctcctcctcctccgccatttccaccgcattatgactataactactccaattaccatctctctccgcctctaccgccacagccacagatcaactcttgttcttacggccattaccattatcaccctcagcctcctcagtatttcaccaccgctcagcccaattggtggggcccaatgatgagaccggcgtactactgtccgcctcagccgcaaacgcaaccgcctaagccatacctggagcaacagaacgcgaagaaggtgaggaatgatgtcaatgtgcatagagatacagtgaggcttgaagtggacgatctcgttcctggtcaccatctagtttccttcgtcttcgatgctcttttcgacggcaggtaatattcagcgatctgatttcgactttgatctgtgaagaatgaagattgcgtgaaatgtgattgaatttctagggttttgagattgatgatgcttagaaccataattgggacgaaataggtaaattaaggcttagggaactattaaaggaaagatctttactcatgagaacaatctggaatcactcttccctatagaaaaggtttaaactttacatgatttgcttgatgggtttgtgaataatgatttcaaggcttgatctacaatgtgttgtgtaagctttaaactcaactttagatcagaaacgtagagaggtgtccttgtaaactgatcccatctttcttcagaattggattaacctcacttatatgatttgtattgatcaatgttacttaagaatagactctcattgtgttgtcctttcgttttcagtttcactatcaccttctttgcaaaggaggaaccaaattgcaccattatcccacagtttccagaggtttattcacccacaagattccattttcagaaaggtcctggacagaagtttctgcagccttcagggacaggaactgacctgagcttctttgttcttgatgatctgtctaaacccttagaagaagatgtgtatccgcttgtaatatcagctgagacgataatctctccaaattcaatctcagagcaatcatcagttcataagcaagtcacacaagcggttctcgagaaagataatgatggatctttcaaagtgaaagttgtgaagcagattctttggattgaaggagttcgatatgaactccgtgagttgtatggctcgaccactcaaggtgcagcctcgggcttagatgagagtggttcgggtacagaatgtgttatctgcatgactgaggctaaggacacggccgtgctgccttgcagacatttggtaacactttctcaatcttttgcttgtggtttcacaattatcatttcattttccaaaccttatcgagatctctgcctgatagctgataataccaacatgaactgtcatataaacttccaaagttatgcattttctttgatagacagttgttgttttcgatcagatccaaccatcaaggtctatagatcactttagaattagtttcaagaaaagaactttgtagttgctttattcaaacgtcttataataatgctgtatgtccttctttgcagtgcatgtgtagcgactgtgctaaagaattgaggcttcagtccaacaaatgtccgatttgtcgacaacccatcgaagagctcttagagatcaaaatgaacagtagtgatgaacaacactagtacaaaaaaggttctttctttacataaaacaccattcttgattctttcttcatttttctctgaaaccctccatatctgaatctgtatttccgctatcattgttgtgcaacttccttcattccgcatatagatttgtttgatctaatgctttgtatttgcaagatataagcatcatcagtacatgtatagataacttcctaacactctcaccaaactacttaatgtttgtaattgaatgcttttgttggtttgcttaagcacaaggatcctatgttgtggtccaagtctctcatagtatccaaacaatttattcacaagatctagatattaacatttgcagagttgctacggccatattatttaccatttatctctcaccagaaagttagaaattattagagaacttgaagaatttggtatttgcagagatataagtaaaagaaaagagagaaaaagaggagaagttgaagaagaagaagaatcatttttctgcctttttgcctattaggctatataagtttaaaacatcaattgaagaaaaagctgcccgaggaaaaagaatgtttcccactgaggtttagcttaaaagaaaccacaaaaggtccttttaaaattaaaaattcgattttttttcttttgacagaatggtcaaacttttgagttaagaaaagtcttaatatgatctgttattatgaaaaacagttttcatggtggatttttttttttttttttcctggttgattgcttgaggacaaaattatgtctatttagcttagttttatagctgaaaattcaatttagttaaagatcatttaattgactaaaagtgaaatgatatcaacggtgacgtcgaagagaataattaccttttaaaggccaaaacgtacaataatgcactttccgaaaatatgaagatgaaaacgaatccaaagggaaaagatggtaacacgacaaaaagcttgaggaattaatg

SEQ ID NO: 29359 - DNA, 3003 bp, Unknown; identical to SEQ ID NO: 27059
  misc_feature (1)..( 3003): 2750-1469P.txt file - cDNA_ID_3015906; gDNA_ID_2684103; Annot_ID_190296

SEQ ID NO: 29360 - DNA, 3003 bp, Unknown
  misc_feature (1)..( 3003): 2750-1469P.txt file - cDNA_ID_3015972; gDNA_ID_2684104; Annot_ID_190347
ttgcttacacactctataaaactaactaaacccactttacacacattacaacttccaccgtgaaaaaaacaaagacatggacaaaacatcttcgccggaatctgccaccatctccaccaaatctccgtcaacctccaccggaaaaatggagtgttcttggttcgacgatggttgcattcttggcattgattatttcgtcaaaaccatcgccggaatcaaatccaaaggtgttcgtcctgatctcattggatccatcatcgttcattacgcttcccaatggctccctgacctctccgacatcgtcctaaactccgatgaccagcaaccgcagccgcagcagcagtcagagagcttctctgttactgcgtttgtgatgaagaaacgttccttcgtcgaaactctaatcggaatcatcccacctgagagagattccgttccttgtgatttcctcctccgtctactcagaaccgcgaacatggtcggagcagatgcaaattacaaggcggagctcgaggcgaggatttcatggcagcttgatcaagcttcactcaaggagctaatgataccttcctttagtcacacgtgtgggacattgctcgatgtcgagctcatgactcggttggttaagaaatttgctggcttagacaacgaaggagttaaatccggtgcttccctaattaaagtagcgaagctcgtggactcttacttagcagaagccgccttagacggcgatttaaccctctcggagtttatatctctcgtcgaagctctccctaaccatgctcgtgtaaccgaagatgggttataccgtgcaattgacacttatctcaaggtaaatgttaagttcaatgagcttcacgacttaaaattaattggtaatgaatggactggcccgtctcacatttatatttattttacatagtagaagtaaaaaaatcgaaaatttgaagcatatataatttgtgatgggttttattcaaattgaattttggttatgttacttaggcacatcctaacgtgaccaagcaagaaaggaagagactttgtggactaatagacagcaataagctatcaatggaggcatctcttcacgctgcacagaacgatcgtttaccggttagaactattattcaagttttgttctctgaacaggcaaagctgagtcatcgcagccacaacaatattgaatggagtggttcatcgttcagtggcgttaggagcagccctaatccttctggttcacactactcagattctggtcctgcgcggtgtacgtccaaacgcgagattaatgttcagcaagcagagataagaagattgagagaagatatggcgaagcttaagtgcgagtgtgaagcgatgcaaacacagttacataagctggttgagaagaaaggaacttgtactagtgggaataaaggtttttttaggtggaagaagttgggatttaggagcggtttaagcgttagcgttgtggaaaacacgaatggtgaagagtttggtaataatggagaaggtgaaaattttgagtatgtgactcaaacgcctggtaatatgatgacaaagcttgttaaaggaagaacaccttctaggtggagaaaatctatgtcttgaaaaaccgtctttagtttctgttcttgttgttgccttcttgtgcatttgttcttcagtctttgtgtctgaatctaatattttgtacattttgtaagctcatatagtcatatcgatggcttgtgggtcaagtttcacaatggtttttatcttatccaagactctcttagaatcttagattcttgtacatcttgtttctctgttttatcatcagttagtttcttatcttcgaaacactacaagtctacaataggttttaagacattttctttggtttctcactgtcttggtttgttcctcttcaatttcctaatgctttttgtctttcactttcagcctcagctgctatctataaacctgcattagctatagcggctctttgggccaaatatttcggcccaaacaatatcaagcccaaaatatttgtcgttgaaaaaggctacttctaaattatcttctatatatgtacgaatgaaattgacgtatcttatggttcgaagaaaacaacaaagacttgagaagaaaactaaagtaagtcgaggtcaatgactaatgggatctcacttaaaacatatcccgtcgaacacgcctcttccatctttaaagtcaagtcaaccactcacgcataaatttattgaaccaaccactaaaaattgtgataacaatcatttatatttagataaatcattttatttattcaaaactttgttatgcgctaattactattaatatctaaccaattagtcaggatttttcgtattttttaacatgacctaaatatagatataaatttagaaatataatgttaatgattaattttttttcattcttattaactatatagttagacaacggaaaacatctgagatgattagttgagggtctatgaaaaatatcaaatatatatatatatataattattttcagcattaatatttatttactggaaaaaaacaatgcaaatgttggagtaaattaaaagaaaaataattaaggggaactaattgttcaaataaattaaaagaaaattccaaagacttttctctgttcactgttctgcttaacttcgagtgtaattgtctctctctcgatctgtgtcatcgtcactagtgatgtaacttcttcaccaaatcgaatattacagagaaacccatacatcaatcctcattgttcccaacttcctcttcttctcttccgaaccctttaatcaaagtttccatctttgtcccgaaatcaattgtcgcgactcgcaagttcctgtcttttttctccacaacaagagcttcttctgttcttgtcagtatgaaaacggtaataaatctccttcctttgctctttctctcatttgggttcctcttctcttctctagtaattgcttccttctcggaaatg

SEQ ID NO: 29361 - DNA, 3003 bp, Unknown
  misc_feature (1)..( 3003): 2750-1469P.txt file - cDNA_ID_3016015; gDNA_ID_2684105; Annot_ID_190500
cgttacatatttaaaagaaatcggtttgtggggattcatattcccacaaataaccaagtaaagatattgagtatcatgcattatcaaggaagtgcacacgtgctgaaacagattagccatttcttactggaaatggagtgtcttgaagttgtgaaagttgtcatctccaatggatgacccccaaaaggtgcaactcacaaaggatctattggaacttgccaccgcttcacccaagctcaagatattgaagaatctgttgaagcttgccaccgcttcacccaagctcaagatattgaagaacctgttgaagcttgccaccacctcacccaaggtcaagatattgatacgagatacggtatcacatacacccgtagaggtttccaaaacccgagtccagtcttaaagagtttctagttaggtttttggtgcttttcccttttggattaggttgtttttggttcttcttctttttacattaggatgtgtttgatcgttgagccgaataatttgctttgaatctctgagatcttaggaacagctaatggatcgtagtatgatgatattaagacatctttcttatggttatgaaagaatgcaaaataaatacatgcatctttgtactagtgtatgtatgtaaattacccactaatggtggatgtacgagagaaaaaaatacaagatcaaccattactaggacaattcaagtagccatacatattacttacaacattgtagaaaacctaacaaagttttgtaacagcaaataaataattttcttaactaagacataaaatataactttgaagtttgaacaataatcacaaactatagattcataaaaacactttaaccttcgaaatctgttttaacccactgaacatgtttcacattcatcttctcgtccaactccattttctttaaatccgaactagtcccatcttcagcggtcgagactcttcggttacattttcttctaaaagaatcttcactctcaacatctaacccttcgaactctctaacccaataacaatgtaacaaacaagccagcactagaaccattatctgtaacggaatcatcgccacgaaaacaccacattctactctaaccaaagctttagcctctctagggtctcgagtcgatatcagcaaagaaagactctgtttctctctactaaacaacattaaaactgcaataaactgacccgtcagtgaggaaacatgaagcgttatccgcgcgatgaaacatgatcgagattggtgcgaagaggcactaccgaaagaggagatcagagagacgagtgagactgcgaggaaggctaaaccgagtgaagttggagggtttctaagaagaatgattggtacgaaagaacagagggagaggaggaggagagtgaaattcagacacgatacgagaatgttttggaacaaacataactttctgtgaaaagaagccattgatgttttgtgaaattatgttttttttgtttgtttcaagttttatataggtaaagtaagaaactaagcgcccgttggggagaagatgtaacggctatgatgaggtttaacggttatattgacataatgggcttcacaaaagtattgtaatagatttttgacctttagcctcacgaaaatgacggtcgtatatatttgaattagtaatactattttatcattattgtttacataaatgcctgaaactaaattgcttttttttttcttttcttctcaaagacctaaaactaaattgctactcgaatagaaatttgaaaaggattattatttttgatatatttcatgttgtccataaaatactcttttatgtcaattgtattttttaagcatctaaaatatttaaatttttcttctttctcaattgcaatattttaatattttatttacatatacatagactataccaaaaatcccaaaaaagattataaaaatattgaggtacaatatgagcttataagattactgtttaactgcaaaagaaattgtgtcttgactccatccaaacccacgtgtcaacaactgcgtgcaaaacaacatgtgttcgatgagtaatcgtacgatttccaagatcaaccttggtcgttgggtatatatttcggtaaaaaaatcatcgtcgaaacacaatcgatcattaattcttttatttgtcactgtagttaagccaattgaaactctaataaaaaattaagagcttaaaaacaatagaatatgcatctaaagatttttctttccttcaaaccaagacacaatctttaataatataattaaaacaaaaaaggtaaacataaaacaaagatgtttgaagacaccaaaaataggacggtgaaatttgacacaagtaataaaaaataaggtttgtattaatcaacggaaaaccatagattagaccattagagcattctcattgcataattatttttttagtgtctcaaaaccaatatatttaatattttaatattaaaagcaaactaaccattaaaaaaaaatttacagaagtggacgaaaaaagatttgctctcaccgtttgtcaaagtgagaactggtttttacggtttgtcttttcattcaatttcggaccaaattaccttgggaaaacttaataatggcacaaaccaaaccgtgcagcagttcgtatcggttcagttgatggcataaaccaaaccctacagcagttggtttcggtttagttgatgcggttcagttttgaaaaagacaaaacaaaaaaactgaaacgaagaaaccgaagaaaaagaaaaagagaagagagtaacggagagatttgagagagaattagaaagcgaaacgaaattcagtatccattgtttcaaaattcgacataacttcgaattgttgggtagttgaattgagtcactgaactcccacatccggggaagagaaagttactgtttttcccggcgaagccaagaaaaagttactgtttattccgacgaaatttgaacctccggcgagatagcaactttagctatg

SEQ ID NO: 29362 - DNA, 3000 bp, Unknown; identical to SEQ ID NO: 14336
  misc_feature (1)..( 3000): 2750-1469P.txt file - cDNA_ID_3016205; gDNA_ID_2684108; Annot_ID_190559

SEQ ID NO: 29363 - DNA, 3003 bp, Unknown
  misc_feature (1)..( 3003): 2750-1469P.txt file - cDNA_ID_3016209; gDNA_ID_2684108; Annot_ID_190558
atttaatgtttatctctaaccgccatgcaagcatatacacaggattgagtaaggttagacacaaccatccatctcacgttgcttcatatagtatacatatatcgatttacttaatctgccaataagctggttctattttgattggataatgaatgatttccctaatattgttgcaggtctatacgcaagccaaccttgctgcttgcacggttcacctttggcgcaatatcagacatctatataagccaaaaagcctctgccgcctaatgtctcaagctgcacaagctttccatgtcacggatttcaatcggatattcctgaagatacaaaaattgaaccccggatgtgctgcatatttagttgatttgggtaagtgtttttctcagcttacatatattgttattaacgtggctgagatgaagtttactccataacctctgtactttgtaattcgtatagggttttcagagtggagaagagtgcattccaaaggccggcgtttcaatatcatggatagtaacatatgtgagtcttggaacaacgttatcagagaggcccgcgagtacccgctaaactgcatgctggagtacataagaacgacgttgatggattggtttgcaactagaagggctcaagccgaagactgccctacaacattagcttcgagagtgcaggaaagagttgaggaaaactatcaatcagctatgtcaatgtctgttaagcctatctgcaactttgaattccaagtacaagaacggacaggggaatgttttattgtcaaattggacgagtccacttgttcctgtttggaatttcaggggttagggatcccttgtgctcacgcaatagccgctgctgcaaggtttggcgttccaacagactcgttagcagcaaatggatattttaatgagttagtgaagcttagttatgaggagaaaatctatcctattcactttgttggtggagaggtcgcaccagaaattgctgcaggaactacaggagagctgcaaccaccattggttcgctggccaccagggagacaaaggaagatcagaatcttgtctcgtggtgaattcaaggcaagtacctattagtaaacattacaatgtacttcttatctattaacaagctaatagcctatctacttttaatatgcagcggaacaggacaaggtcccagaggaggtgttcacgttgttgtggtgttggacacaacaaggcctcgtgtcgtaatgctatataagtcgtcaactactgctatggggtgctaataggtgttatgaagaaactttgtggagtgggcttaaataatggttgttcccacatatcttgcggaagcgggtttgtttacttctactaatgcaggattaagtacatttattgaaatagtttggtatacccaactttgatgtataccttattattttgatttttatgtactacctgttcatcgttatatttgtattggtatctctaatcccgatgtaattaagtaatgccctgtaacaccgcttttgaaatgtatatatatgaaaccccgctgtttgtgtaatcacccttctctgcttctttcaagtgcaaaatcatccatatcttacttacatactatacagtataacgaattacgaaaactaaaccttaataatgaagtgggaacccaagcaatgatgcatcagtaattgtatacacagatttttcctgtaacataatcaatggggtaaaccataacaaaccaaaaccatcactctgcctttggagcccaagcaatgagtttgtttacacgtttgatgaaactgttggccgaataacatatgttttacttagtttcattatgctgtatgttggagatgcaatttcagtcaatcgcgagcttctacctgcaagcatcacgtttataaatgttatgattatatagccaaacgggcatcgtggatggcagcttcggcataaatagttttgcatggtatcctattctatttactacttactgtactattccgaaccatatgcaagattcaaataaaaaaagctcgtgtcgatatccaaagtattcaactaaaattgttttcttttgatgtcatgttttcagtatatatgttgatattactcgttaagttataaggatatgcaagaacttgacatttcatttattagttgaatactttggagttataggagtttgtagttgtaggagttcagcatatctgttattgcatcactgtaatataacccaacacactaggctaatagactgaaacatttcacttcaaacataaatattcaaacatcacagttattagttgaatttcaatacaattggtctctgattacaaaagaaactccatgtttgttcaacataaattacacatctacaaatcaaacaccacgttctgttggagacaatgcattgaaagtttcgatagcgtactgtttagctgcatctcgcatcttcccatcatctaatttcccacaatactctagagcgtgtgctcacgcacgggttaagtttgtcaatattacataaagttcaatacatattggttgaagtgttagttttgcaattataattcttttgttggtcatatttgcaaatttcccatatttttagtctaatttcagtttttagtttatttcggttcggtttcatagatttcaaacggtttataaatacatttcggttcgattacagttcaaataattctatttttccggttcaggttattcttttttccggaatgcgaaaaaaagaatatcattgtttgctctctcaatctcaacaacaacacttctctcactcaatcgctttctctttgagacgtttgtttagtttcaacaaacaaatcaaaacacacaaagtttgtgtcttcccttaagattcactcaaatctcgcaacacacacattcaacaaatcctgattcataacatctcaccaaatctctcaaaagatctccaaatctaaaatgttcttcttcttcttcttcatctgaatccaaaacaacaatg

SEQ ID NO: 29364 - DNA, 2909 bp, Unknown; identical to SEQ ID NO: 14494
  misc_feature (1)..( 2909): 2750-1469P.txt file - cDNA_ID_3016263; gDNA_ID_2684124; Annot_ID_191050

SEQ ID NO: 29365 - DNA, 3000 bp, Unknown; identical to SEQ ID NO: 14333
  misc_feature (1)..( 3000): 2750-1469P.txt file - cDNA_ID_3016263; gDNA_ID_2684108; Annot_ID_190542

SEQ ID NO: 29366 - DNA, 1192 bp, Unknown
  misc_feature (1)..( 1192): 2750-1469P.txt file - cDNA_ID_3016274; gDNA_ID_334; Annot_ID_144272
  misc_feature (9)..(10): n is a, c, g, or t
  misc_feature (23)..(24): n is a, c, g, or t
  misc_feature (45)..(45): n is a, c, g, or t
  misc_feature (77)..(78): n is a, c, g, or t
  misc_feature (83)..(83): n is a, c, g, or t
  misc_feature (85)..(85): n is a, c, g, or t
  misc_feature (88)..(88): n is a, c, g, or t
  misc_feature (91)..(92): n is a, c, g, or t
  misc_feature (98)..(98): n is a, c, g, or t
  misc_feature (134)..(134): n is a, c, g, or t
  misc_feature (137)..(137): n is a, c, g, or t
  misc_feature (142)..(142): n is a, c, g, or t
  misc_feature (145)..(145): n is a, c, g, or t
  misc_feature (154)..(154): n is a, c, g, or t
  misc_feature (163)..(163): n is a, c, g, or t
  misc_feature (180)..(180): n is a, c, g, or t
  misc_feature (186)..(186): n is a, c, g, or t
  misc_feature (201)..(201): n is a, c, g, or t
  misc_feature (212)..(212): n is a, c, g, or t
  misc_feature (222)..(222): n is a, c, g, or t
  misc_feature (235)..(235): n is a, c, g, or t
  misc_feature (283)..(283): n is a, c, g, or t
  misc_feature (288)..(288): n is a, c, g, or t
  misc_feature (308)..(308): n is a, c, g, or t
  misc_feature (316)..(317): n is a, c, g, or t
  misc_feature (329)..(329): n is a, c, g, or t
  misc_feature (335)..(335): n is a, c, g, or t
  misc_feature (337)..(337): n is a, c, g, or t
  misc_feature (346)..(348): n is a, c, g, or t
  misc_feature (352)..(352): n is a, c, g, or t
  misc_feature (357)..(357): n is a, c, g, or t
  misc_feature (361)..(361): n is a, c, g, or t
  misc_feature (372)..(373): n is a, c, g, or t
  misc_feature (382)..(382): n is a, c, g, or t
  misc_feature (384)..(384): n is a, c, g, or t
  misc_feature (393)..(393): n is a, c, g, or t
  misc_feature (400)..(402): n is a, c, g, or t
  misc_feature (412)..(412): n is a, c, g, or t
  misc_feature (463)..(463): n is a, c, g, or t
  misc_feature (470)..(470): n is a, c, g, or t
  misc_feature (483)..(483): n is a, c, g, or t
  misc_feature (488)..(488): n is a, c, g, or t
  misc_feature (516)..(516): n is a, c, g, or t
  misc_feature (539)..(539): n is a, c, g, or t
  misc_feature (671)..(671): n is a, c, g, or t
  misc_feature (680)..(680): n is a, c, g, or t
  misc_feature (682)..(683): n is a, c, g, or t
  misc_feature (696)..(697): n is a, c, g, or t
  misc_feature (716)..(716): n is a, c, g, or t
  misc_feature (725)..(725): n is a, c, g, or t
  misc_feature (745)..(745): n is a, c, g, or t
  misc_feature (751)..(751): n is a, c, g, or t
agtctcaannttcctagaattcnnatgtggggtttgccttatgcncatatgtatatctcataaatccgatacaggtnngcagnancgnagnnactgtncttgtggaacaacgagcacattgtgggtctaatcgncgncaaanccngaagcgtgnatccttccnaatcatatatcccacanctggangaagaacatccagtntcactggaacncaagcagttncatggtctaaccncaaatatcaagaaaatgttcatggaaatggatcctgaactgtttgaangaatntcagagacagtatgaagagnaaacaagnngaaatccaaagnaagtangnagaacaacnnncaantatancatnggaagagattnngcagaagcnangcggcggangcgagannnggaggagganggagaagaagatcatatgatcacttcctagatcgatcaaaaagggtataanttctttncactttttttttngtttngtactcattttatcaaatgagttactantattaattttcttatcaaacttnggatttgtttgttgttttgagaatcatgggttcaaaatctgattgctcagagaagtagagagagagaagtgagccattactatcagagaatatgtctttagtactaagaaatgtgtttgtgatcttctgtcnaattttgtncnnggaaaggcacttnnaaaattttgtaaaattttnaattatatntactgtggatggatgtttgnagctgngttattagccatctcaaaatccaatttggttttcttgttttgatccattcttaccctactttttgtgttatttgtatcaaaactttgaatttgtatataggaggaaactagtcttccaactgatccaggacaatgtatttgattcctcaatttccaaaagataagaagagttttcattttaactcttaaggtaaactaaacacaatatcgtcttctttattattaaccaaattggttcagagccattggaccgaaaacatagaccgagagaatataccaagttatatacagttaactgcgccaattcaccacgagaaaacctaaattttattgaggtagcttattgcacggcggcgattagttgttttacttgttacaagaaaatcattcacggcggtggagaaaaaacaaaagagagcgagacaaagagagactacaatg

SEQ ID NO: 29367 - DNA, 3003 bp, Unknown
  misc_feature (1)..( 3003): 2750-1469P.txt file - cDNA_ID_3016285; gDNA_ID_2684110; Annot_ID_190581
tgcaatgataagtagtgtactgttgataaccataaccttatagtagaagataggaccatgttggtatttttccacaacttttccttctctttttacaattcataacaaatgaatactgtcgattagttcaatatataaatataagtaatacaaatattcctatattcttgtaaaatgacgtggtgactatgactaaacaggtgattaagtatattatcaaatatatcaatggaatataacagtgattaagaagaataaacaaaattaaaagattttgtggaatggattccactaaaccactacgcaatttaaaaataaaaatacttaactaatgtatagttatttattcccatccatgcgttcatattcactttgaatgatcatattcgtaatcctatttatttattttactatttgaaccttttgtgtgtataaataatttcaactagagagaatatccgcagcagctcgttaaattagtcattgaattaaaaaaagatattcaaattttcacccaagaaaaacgaacgcaactaaaatgacgttcaaatttggcatcatctttaggtgtatattattgtgagagatatgcaagcatgaaatctcatgcaggataagaatcattgttaaatttattttaattccgttatatttatggtaatatcatcctattaccttttctaaaattatgtttcactctttagttcaacctttggtgatgaaattcgattctttcatatctcgtctccgctttgcaaggatttgtccgtacaataatcatatgcactattttaattatttttttgttgggtgggattcaaaaaagttttttttacccctctatcagctagttagagaagtgagactatatatgattccaatcaataatacatcacatctatatttcgtcttgtaacgcggccacataatcttcatcaacgaagcttgaatgttgtaatagtgtttcactatcaacaacacacatttgtaggccttatgtaattagcgagagaactctacagtctacactataactttgagtggaaataaatactcgtatatggtaacataaaaatactatgaacttatgattatacaaacttgtaagtaaaaaagagtggtaaggctatgtaatatcgtcgacgttttctaggtaaatcttaagctataaaaaagattttgaaacccaaatagtatcgagtgatagcattagtctcatcgggtggttacaagccaacattgattcgtgttgcaaattttattaaatacaagggtgtacacaaatcaaaacgcaataatatttttggatcatagtctttcttcactatcattgggaaaaataaaataaaataagaaaaatagcgatagaatttcctctgtaaatgagcaaaattggtaggacaagtcagcatttgacacgtgtcggtcatgaatacgactaaacagcgtggcaatttctcttactctgacgtgtccatgtggggaccactttctcctccgacacttcggcatggctttctcaactttttatcactcttcttcaccattctcatttactaagcgcgtgtctcccacctctatccgatttaattttttaaatttgacgtttcaaaagttccttctataaaagcaattaacgataattatatgaaatccgtaaacatgaatttttcaaataatttcgatttttgatttgctaagattaaaagcgcgtgaaagaaaaaaaagaatacagcatgaacaccagcgactcagaactgactcggcacgtggtaacataaaactcacacgcttcccaagacgctcgtcccataaagagtcatggctgtgaccttgtgcgagtgtgggtgtagccatagcctttgtgggtcctaaataaaaaaaacgatcaatggcataatgtgtaattaactcacattccacagtgttaaataaaaattaaatctgtaacggaaaaaacaatctatctgatgttacacaaaaaaaaaaaataacggaaaaaagaaaatgtggccggggtttaatagagaagccgacacgtttgcctgccacgatccagacacaagacgatgtgggtaacggcaccgtcaagtgctaacggcaacggggtcatcagtaaaaagggcaatttagggatatagagtaaagtcataagcttatttattactatcgtcttgatcggacggctgagatttgccctctcctttaaatgcaccgtacgttttttttttacataataaaatgtaattagttcataagcaattcccaaaacgccgcgtgacccttcgtttgcctttgaatacaatttgttttattttagcgcatttaatatatttgagtttcctttttagcgatgacatgataaaacaaaaaacaacaattttagaaaacatttaattaaatgaatagaaaaatagggagattcaactgaagttactgtgggtggaaatgacaggtctccaggatctgaactaagagaaagtctctctatattttgatatatagagagagataaagaaggagagagtgtgaatatatgtatgtgcatgatactgtgagacttcttcagtaaaggaagcagctttggtttgctgcggatcgggataaaaacggcgagaagtttgtgattgttgaagcaaaacaacacggaatctgaaaggaaaggagaagacaaaaaaaaaaaaagattttaagaggaagagagagagagatcggtttcgtggctgacggaaaaaaaaaggggagagatttagttttatccaacagtgcctgaattacgttctgcaatcaatacggacataaccgtccgttgtgtcctgtttataaagttttgctttttttattttctccattgatgggtcttttctttcttctctctctcgtgtttctttcatggggttaagactagtgtttaccgcgtgaaggtttttttttctttctattttctttcatttcctctccttctacttcttcttctccagttctcatctgggttcttcaatg

SEQ ID NO: 29368 - DNA, 3003 bp, Unknown; identical to SEQ ID NO: 29367
  misc_feature (1)..( 3003): 2750-1469P.txt file - cDNA_ID_3016285; gDNA_ID_1972158; Annot_ID_179524

SEQ ID NO: 29369 - DNA, 3000 bp, Unknown; identical to SEQ ID NO: 9582
  misc_feature (1)..( 3000): 2750-1469P.txt file - cDNA_ID_3016291; gDNA_ID_2684110; Annot_ID_190575

SEQ ID NO: 29370 - DNA, 3000 bp, Unknown; identical to SEQ ID NO: 9582
  misc_feature (1)..( 3000): 2750-1469P.txt file - cDNA_ID_3016291; gDNA_ID_1972158; Annot_ID_179517

SEQ ID NO: 29371 - DNA, 108 bp, Unknown; identical to SEQ ID NO: 339
  misc_feature (1)..( 108): 2750-1469P.txt file - cDNA_ID_3016291; gDNA_ID_1564055; Annot_ID_148763

SEQ ID NO: 29372 - DNA, 3003 bp, Unknown; identical to SEQ ID NO: 27074
  misc_feature (1)..( 3003): 2750-1469P.txt file - cDNA_ID_3016329; gDNA_ID_2684110; Annot_ID_190602

SEQ ID NO: 29373 - DNA, 3000 bp, Unknown; identical to SEQ ID NO: 14339
  misc_feature (1)..( 3000): 2750-1469P.txt file - cDNA_ID_3016333; gDNA_ID_2684110; Annot_ID_190597

SEQ ID NO: 29374 - DNA, 3000 bp, Unknown; identical to SEQ ID NO: 14362
  misc_feature (1)..( 3000): 2750-1469P.txt file - cDNA_ID_3016361; gDNA_ID_2684111; Annot_ID_190636

SEQ ID NO: 29375 - DNA, 3003 bp, Unknown
  misc_feature (1)..( 3003): 2750-1469P.txt file - cDNA_ID_3016374; gDNA_ID_2684111; Annot_ID_190632
gtggcttaaaataattttgctagtgtagaattatcaaaatggtagtttggtagcaagtaaaggagataggagatctcagttgaaatatttgagaaattgttggttgtagttattatagagagatttatggaaatgttttgagttgttaatattatcaacaataaatttgtttttttgtaaaattgaattattaagagatttctagagtattaaatattaatagagagttttgtggaaagttttgttaaatgctaaatctttttttttctatttttaaacaaaatatgtaatgtcaatggcattgggttgtataagttcaaactttaggatttatttcataagagtgtttgaaaaatgtatatgtagatatttgctcaatgtattattattgttgtataaatttgtttttaaatgttatatttttttatatttgaatgtatttgaatttatatgaataaatttgtaataattaaatgtaatggaattatttgtaagatatattaagtttaaggaataaaatgaaatttagaaaagttttttagggtgtgaatagtgtactctcaaatttggatgtgcactaattaggatttgaaggtttgttggaattcaaaaaatcttcaaatttaaaaatctgaggccttgttggagatgttctaacacatgtttttttcaaacacacaaataaatttatacgtgttttttaaatgtcatgtgattttgtccacatttttaaatgtcatgtgatttctattataatatcaaatatgtaatgtatcatacaaaaaaacacatagcttaactataattttactaacactatttttttttgttatttgcctgtttggagtttacaatttgttaactactatcaattatactctcaaaaatattttaatgccccaatatacacggtgcattaacttatactttggataactctcacatgcgttctggacaagactaaataaaataataataatattaagataatttatacacggacaattttgttttttaaaagttagtttatattaaaatttgcaaattttctctattgaaaaaaaaattcttttaataattgacaattgttattaagtaacagtatacaatatgtctcgtaataattattaataaactgaagatttaagctgtattaaaacgaaatgttaataatatttcaaagttttataaacattgatccaaacccactgaccacatagtcccgtaccgaaatataacatgtcccataatttcttaatctatcccatgatttattttctaaaagtagtgatttttaaaatttaataattatttattatatataaaaatttacaaattttattattatatgagaaagttgtattttatagtttacaattggtattaagtaacatttcttttctaatctgattaatttgatatgtctaatattggtggtgttaaaaaaaaaaaaattaaagatttaatatgtattgaagcaacaaattaataatattttattaatgttgattcaaaaacccgacccgtcaaatccgtcccgccaaaaaaacatttattttattaatgttgatttatgatatgattctaaatcattgtctaaacattttagcccatatgggacattgaaccaacacattttggcaattgggtaatatatgtttgtttttaaaatttttaatcacaagatatgcaggaaataaaattgagatttgttttaactttatatattatacaatgatttaacagaaaaagtcaaataaagatgataggagattcatagtcttaaatcattaatcaaatcttctatatatctatattgttaatatgaaaacatccggtgtaagagatttaaaaacggatttagaatcaacttttattaaaaccgatccaactaaaaattaatgtacaaaattgctaaatagactggtaccaaattgactcacgaatgtatttttcccactcaaataaatccttacgttctcttttcctaatcaacagactcgactaatactccttaatgtatttttgtaagaatcaattatcgggttgaattttttccaaccagaaattacaaaagtctgaactgttatcctaccttattcttttaggcatttcccaaagaaacaaaatgttatttagcctcaattttcttttcctatgtttgtgagagatggtagtatagattaagatccagtgatgtcgatcaagagatgaatattgagatataaaccggttatctttggttacattggttaagtagaatccggtttaatgtacagactatatataagcttatgtgtatgattaagtttaattaagtttttgtaaactacagtttaagctgttaataaagagtttgttatcttttctgttctccgactatctgcgatcatcggacttcaacaatgaagatcacgaaacgaagatgaaggcactggaaacgagatggtggtgacgatgatgagatcgagtgataggatgaggggataatgagatccgatgacaaattttgtttagaatcatatatatgaaaggcagtgccgacttttgaagaagatgagtcggatccaacaggagaggagccatcaagtgaagagcctactacaccaccaacttcaccaacaagttctcaaatagaagaaagttcgagtgaaaggactccacattttagaagtatacaagagctctatgaggtaaccaaaaatcaagaaaaccttaccttattttgtttattaacggagtgcgaacccatggatttccaagaagccattgaaaagaagacttggaagaaatgccatggatgaagagatcagatcaatataaaagaatgacacatgtgagttaacttcacttccaaatgggcacaaggcaattggcgtgaagtgggtgtataaagcaaagaaaaactctaaaggagaagtggaaagatacaaagcaagattagttgcaaaaggttatagtcaaagaaccgaatcaactatgacaacgttagactaatcaatg

SEQ ID NO: 29376 - DNA, 3000 bp, Unknown; identical to SEQ ID NO: 14367
  misc_feature (1)..( 3000): 2750-1469P.txt file - cDNA_ID_3016469; gDNA_ID_2684112; Annot_ID_190669

SEQ ID NO: 29377 - DNA, 3003 bp, Unknown
  misc_feature (1)..( 3003): 2750-1469P.txt file - cDNA_ID_3016479; gDNA_ID_2684112; Annot_ID_190666
cggaattgttttgtctatgacatttagtaacatcagcgcccacaaatactagcagtgtcatttgattatcctgacaaccaattacatacagatataaccaaacactataaccagtaaggaaaaatttgtgcagctacaaatatacctaaggttcccgtgagtgaagcaaaataaaaagaaacagggaaaaatagaaacagccaaccagtctaagcaccccaaatctgctttagaattatacttaaagagaaattaaaagattgcatgattacctttgagccataacagttactgtatcagaaagactcattgtccggctctggcaagcagagacacaagaagcgagaaacgaagtcctaagagtagctctagtaaagtcatgagcaccatgacatatgatcttcttaatcaatccggtgatcccctgaaactcaggctttgtactcaagaaccaaactgaatctagaccaacacacaacaaatcatttaaagtctgaggatcagccaactgaatcaatctctcagcaagttcccaatccagtgaggtaacagcgccttggaagagccgtcccaactcaattctttcttgcctattaagctttttctgctgctcaatattttccttctcaacgagatcatcatcccctttaaaatttagtttcttagcactacaaccacagcattctcccgaattagttccagctgaatcctttcctattaaaggtgcctctctcgaaaaaaccactttactcccctcgcctccttcaaatttctgagatgaagcaatggtttcagttttcatctcggaacagaaaggctcatcagggtacatctgatcacttaaattaatggtatcacacacaccttctttctccatccttgtcaagtctgtgactttccaaatcaaactaaaaaaagaagcacacaaagcttattcatccaaaagctatccgcacaacagaccacacactaaacaaagtatatagcaaatccaatccttgcatcatcgaaatctacaaaaccaaaggccaaaactcaaaacccggaactgatccctatcaaaatccaccaacacagttcattctaatcagcgtaaatcctcgatgccttctcttaaacgcactatctcttgaccatgggcataggaaatcaacaacaaaccctaaaaatgaaacaataaatcatcatcatcagcaaacggaaatctatcaattcgattaacagtgaacacgaaatcggacacccgatcagaaaaaaacgaatcgagcatcagaaaagagcgaagaacaacgaaattagcgttatacaaaagaagcagcacatgaaccatagaagagaaaaagagagagagaaaatggtgaaacctggacaagagttccattgagacagagagagagaaagagaaagagaggctgagaaaaaccctgtgcatcgggttctgtttttttatttttatttgacaaaagtactgctttttaatacaaaaatattctcttgatttattaacatttgtcgaatctttagttgattaaattctaattatagattctctcttctttctgtcgctgttaatctcccattgtaattcagaatctatgggaggggaactcaaactaatgactacaaatcatatggaggagacaaaaagacttggaattatttttaggaatcattcaacttataagtgttctcatttttttgttgtccctttagaaattagattttaaataagttgcgtcaactatacaaaaacatttcttatttttattctatctatattgcatcactaacatttttttcctttctatttctgtagtttaaaagactcgggtctttttacttctttgtttagtggttattattacattaagaaggaaaaagtaaaacaaatcatcatataaataagaggacgataaggatcggtcttcagctataaacaagtaaagaaagttgagattcgaagactctttataagtcattggatttgtagtaaataacaaattaacaacacaacaaattaacaacacatatactacaaattcgagttaaaaaccccaatataatatatgcatcgactactaaacgcgtttcaatgactggtaaacatatgtaactatctctgttacatattgaatgaatgatgatgtaatagtagatgctaacataagctcacaattatttgaataattaaagtcataaataaaaatcatctataatgcgtgtaagcttgcataaaaatacagtatataacttttatttaaaactattaagtatcaacatcaatcggaaaatgatttgcttttgaagttattacaactagtttattaaaaaaattgttatcatcatctcgattttaataatgctatatatacttagtcttttatttattgttattgtaatatgcgaaaatgacttgcaactgagttgcttacgggcaaacctgaccaagatgtgggaagttcgaaactgcaaatatgtataattcttaataaaaaaaaaatatatcctacatttcttcattttttttttaaaatactaatatttgcatactttgttgattgagtttctgaaaaatcataattgagtttttaaattagttggtttgtatgcatttgacaacttccaatttcttttaaatatatcacttttcatatattcttgtagagctataattttacaacaataattgaaatgtcgacccaaaaatatacatttaaaggcatttcgctgataaaaatccagtttagatgtatttgtattataggggaaaacaattatattattggttaatatttattagtcgatattgggtacatatgtatgttcttttacgattatgccatcaaaaaatttattagccattcgagaaacaaggcatctctatttttttgcttcttctaatagacttcttcgtcactgatctcccacgacgatctcccaaactcatttctctacgttcatcgatctctctctttctcgtttgctctacgaaaatcagccatg

SEQ ID NO: 29378 - DNA, 3000 bp, Unknown
  misc_feature (1)..( 3000): 2750-1469P.txt file - cDNA_ID_3016489; gDNA_ID_2684112; Annot_ID_190661
tcttctcccctggtcttcttttctcttactttttctaccatttcttttacttatataacatatgacgtaagctacaatctcctctgatctgaatatgtaagtagtatttaaataaatgagttttaaaaccatctttttaccattctataaatttttaagaaaataattttctagtttattttgaatcatccagttattaatatacaggttgatttttaaaattttataatcaaatatttgatgcgatgaggaaattatttttattaacgtacctaccaataattttgtcgatgtttatggataaataaggacccatagtgttgttcttctcgaagcacttcatatggtgaatgcgcttgttctaccaggaaatgttgggccaatatatgtatatgctctcatatttctatatataaagccaagttaaatagctaggaatgtttttcaaattaattcacgatgctatttttatatatttacgtgtatatggagatcggacatagtaacgtgacaacacgctttgcatgtgaagtcttgatgagaggatggtttttaataaagccaagatgtttatatcgccagaggatgaattctcacagaatgatgaattaaagcaaatagacttcgctagtaactcagtcggaaatcacttgttacttttaatatataaatatagttaatcccataaatataattcatggttcaatgaattgagaaacatataggccatttcctttagaaacaacgtcaagtggttttattagtttttttcctggcctttagatacaaaaaagccgatgagtagtttgggagaattgatagattaccaatactacaacactagttatccacattaattgtgcagcattactttaattaggccaaattaacaatatacgaagactgcagcttcagatattaaactatttgacgtgtaccaacaaagttttttgcatggatgacaaaccctaaattaataatttagaatgtttatatcgaaagatccgctagtttctactcctactctacagatacgaaaatcgtatatttagggatgagaaaatggatctccttgaatcgttgaccaaaaaaaggaaagaaaattgtcaaatggatcttctcagcataagctcaactaaaaaaatcaatttatttgtgtttagtgtttgtctctacaatcaagagaatacttttactaaaatatgggttcataaaaatgttcactgaatgtatacactagtaaccaaaacttatttggtgcggtttaagatttattttttatttaaataaaagtacttccttttaagttctttggaaacaaaagaattaatcagtttaaaattcagttcacttgtgtgtttgttcttggatagatatacagtattacgattaaacatctctatttgtacgtttttaattagtaatggaatttgtttattgaagactagatgagtaaataatggtggaaagttaagatgtaggtgtgtatatatggcaacccatgcatgattattgccttgaacaccgcacacatttagattggtgtccagtggacctgtatcaaaaagttcaagaaaaaaaagtattatcataatattattccctctgtcttactaataagtcagtcatgtttaaatattgcttcttcttgttttatataccctacttctaatttaattgattttcgacagtcaatatgcatagacatatgttttggtctaattcttagacacttgatgcattacaataatctcaataacaaggtccatatgctcagtttcataacgttcgcgaattttaaagatttttgttttggtcagcttttttagatttgataatattattcgattattatcttgtgaaatattattccattattatactaagtataatttgagaaaaagattactacagtataatttgagaaaaagattactacagtataatttggttgatttgtaaggagaaaggcgatcgatgagacactgaggatcgaaccacatgtaaacgtcacgtggctctttgcctttgattcaatgcatgatctctcgagtctcgaccaaaccaacttgcctaattaatattcctcgtacgactctttaatccccttttttgtttgcttaaaaaaaaagattacaaattattttgtttgttgtttttttttttgttttttttaatcccctttgatacaaattattttgttattgtggaaatttaacccaaattatttgaaattctttccccgacaagcatctcttattgtggttggtctaataggattaatggtcgttttcgtgagtgatgttatcatgaaacaagttaattgaaaagtgttcataatttggtttccaaaatttaggagtatgattaggttcagagtatcataagtttgtatgtcttagtgacaaagacaagaataggtatacttacttttatgggttaaaccttttcattttatcaagctttaattaattaaaaatcacagattgaaagggaaattaaacgaatgacgagaaaaaaacaatgtatctgctgcttacctgaggtcggtcattgggttcattgcattgatcctaatataccaaatttatggttcatattcaattttatatttttagctagctccaacaaaaacaatgtttccgtacattttcgttgtcaaaaaaacaaaagatgattcatgacctcttaattaaagtgaaatccggactctgaccattaattaaggaaaaagtagagaaactccggtttgataaattaattaaatagaaattccggtttgaccattaaaatgaagagaaattccggttttcaattttagtaacctttccggttttggttgaaacaccccaaccttaaccagaagctttggatctgacgtaaagggaaaatgtctaaaaccctaccgttcgccggttcgaatttttcagacaaggtttgaacataaattctaatttcgttgctcgacagcaatctcggaccaagtggaaaccgaaaatg

SEQ ID NO: 29379 - DNA, 3000 bp, Unknown
  misc_feature (1)..( 3000): 2750-1469P.txt file - cDNA_ID_3016497; gDNA_ID_2684112; Annot_ID_190659
tttggttgctcctttttttctgtggttatgttttatgtgtgttatcgttgaagaaagaagaaaaatagtaaaaccaaaaacaagagaagaagaagaagaagaaaggttattaacttattatgtgttgtgtggggaagttgggaggtttatggttttggtagtggtttggtgatttactcaatacataccttctatttatttcatttgtctatctttctttagaaagaaagggttgttgacttgttgacaaaaaaaaaaggttttcattttctcttctttttcaatataactgattcataaatattctttttgtttggctaatatcactaatggttgaatttacgtctaggcgtatgtgttagtactttcttgtattttataatttaactgaaactagattttaacccgcggtatatcgcgggacgatttatttttaaaagtaatatatattaaaatttgcaaattttacttttacaaaatatttatattttacagtttataattgttattaagtaacgctataccacgaattcatgagacaattgttaaaaaaactaaagttttgacccctattaaaacaacatattaataatattttaaaattttataaatattgattcaaatacatccaccatataacccaattccaaaataaaacacgttctgtaatttcattatccgtcccatgatttttttctaaagtagtaatttttataattttataattattttttatatataaaagttttgcaaattgtatcattctctaatacatttatattttatagtttaattatatatatattaacattatacataccacataacatttttggttctatataattttttctaaattaggatgatttgatatgtttaatattagtggtcttaaaaaataataaattaaagatttaacccatattgaaacggtggattaatatatttttttattaatgttgattcaaaaatccgtccctccaaatccgtcttgccaaaaagtcatttattttattaatattagttttattaatgatatgactctgaattataatctaaacattttagctaataacataggagtgcaccatatttatttaatagaggaatgtaccatatgactcgaatgcatttttatccaaatccactaaaaaagtcttgcaaaaatactatagagataagaaacgatagtcggttttggtagatataagattagcaaatatattagttagcttaaattagttaaagaatacaaattaaaaaggtatattacattttattcaaatatagtatcaaaacttatataacacagagatttgataaatttttaattgttgaatactttttttttgtgctaattttttgtgattaatatttaattgatttcatatataaaatattaaattgacttatttgtttataatttggtaacaaatatatatttgaatattcagtatattttgcttcagtttaggaaatctttgatgacccgtctttagatctaataagtcttataatctacagattaatctgcagtataccgcagttaggcttatattttagttaaactaaaaacttttattgtaaagataatttaaaaatatatgatattattttatttgattttaaatgtatagtagactgtgagttgtaaatgttttgttgatattatctatattgtttagtgtttaagattatacacttgtagtttgattgttaatttaagagtttcacatgtagtataccatcttgtattaatatcgatctaaacccgtcaattctaggattttccagcttgtattaaaaattgaatcacatctaatatgttattaactattgtagtatataagattataaaatttcaatataatatgtatgaaattgagtataaatatttcaaatttatgtcccgttattcagtagaaagttttcttaaatatatttttcacccgttataatattatttcatgtattgaacagtttatgttcgtttttaaaaattcaaattatggcatatgcgaaaaaactctatttttttttataatgatgatattatttttccgtaaaaatagaatgagaagtgaactataataattaataaaaaattaatatgataatttagataccaaatatagtttattgattttaattggttacttttttggaaattaataatgtattttgtttttctaattaaattaaattaattaaaatttagatatcaaatcttatatgttgattttgattggctattatttttggaaattaataatgtattttgttttttaattaatttaattaattaaattagtatttgactttttaatctttaaagatataaattaatttactctttaaatttttatttctaatatataattacttacaaaaattaagattatatttaaaatgtacttcccaaataatatagtagaattaatttttaggtattttattgcctttgtgttgttctatttaaaagccaccgaaaatataaataacaacttgtagtgatttaatactcctagtttgcaagatttcataattgatattatattaactataattaatgaattgattaaaagggccattgtgggaataagaacggaccgatgtgggcctagttcgattgatacttaaatgaatccgtgttttgtgggctttcgatttaaaaatttgccacatattcataaatgggctgactaatcaatgtgcgggttaataagctgaaccaaacctctcaaagctaaaccggaaaatttgattttcttttgttgttaattctctggttattggtaaaataataatatccatcatctcagctcacctttagcttcttcttcttcctcttccgatttcaacgttgtgtttatcttcttcttcataattccgacgaatttcaccagagagaatcaaacccccgaagaatcttaattttctctctgtattatcatcttccaattcaagtgaagaaactcgtacgtggtcgtagtggagatg

SEQ ID NO: 29380 - DNA, 3000 bp, Unknown
  misc_feature (1)..( 3000): 2750-1469P.txt file - cDNA_ID_3016507; gDNA_ID_2684112; Annot_ID_190656
gtcgttgacttctcacgttaattaacgtagaatcctcattcacatgtaccaatcatagagtcattgatttagtgataatctttattatatacttcctattgttttcggataaatgaaattgacacgtgagcaacaaattgcaaacagagcatagggtttcagagctcacgcaacgtggtgatctccgggctgacgtcacttaacagtcagatgtttcacgtcgcgattaacggctgcagtaacgtaaagctcgacggagtcaaagtttctgcagacggaaacagtccaaacactgatgggatccacgtgcagtcatcatctaccgtctccatcctcaactccaaaatctccaccggcgatgattgtgtctccatcggtcccggcactaacggcctctggatcgagaatgtcgcttgtggccctggccatgggatcaggtattgaattattaatttaattacttgtaacttcatttttatctttccattatttttagtttttataaggttttttttctttcacttttggtttatatgaattatagtaaacaagttaaagccgacactagtttatatagggttgacacggtttatccgtttatgaattagtaatcaacacaactacaaagagagaacaatgttttgttaatttgttccaattcattcattttcagtttcatgtatttctaatagttagaaaaatatatttgtcaatgtcacacagtggcactagattagttcagtttatcaatttatttgttgtgttctttttttttggttataaaatgtcaattattttaattttattatactgtaacagtaactggtttttggttcactttctagtgatcattttcttttatttatccacatcaatcatttttatattttggtacagcattggaagcttgggaaaagaaagtgtggaggtaggtgtacaaaacataacagtgaaaacggcgacgtttacaggaacagagaatggggtgagaataaagtcatgggccaggcccagtaatggatttgctaagaatatccgtttccagcattgtgttatgaacaacgtacaaaacccaatcgtcattgaccaaaactactgccctggcaacgaaaattgccctaatcaggtccacatttttctcaaaacatattaaacgtcacataaaaagctattcttaatttagatattaattggtttatatatgattgatatgaatgataggtttctgggataaaaatcagcgatgtaatgttcttcgatatacacgggacatcggcgacggaagttggagtgaaattagactgtagctctaagaagccgtgcacgggaattcgaattcaagatgtgaagttgacgtaccggaataaaccagcaacaacagattgtagtcacgctggaggtagtgaggcaggatttcaacggcccaacagttgtctatgaccagaaaagaaaaatatttgtcttctttttgttagtagtgtaattgtaagtaacgtcgtattttcatatatattacggctttattcctggagggttggaatacgtgaaattatggtctagtattttcgcaaaatcaatttctaatgatgctatttgttatgcattagtcaatgcggactaaccaatgattatgaacgtaggtggatatttaaaatgaatgggaattgtgtttaataaaacgaatcaaatcgataaattgtacatcataatgcctatagcctaagcctaatatagtattatcagctatataaatgaattacgtgtaaacaatgttgtctaagtaaatcgaaatgttacaaatccaatatataaaagcaaaatttaaggatataattggacggagacggtgagagatatttcatctagctaatactaagaacatttacattggttattagtcgtgcaatctaagaacatgagtatataaaaaataaagtaacatatgttcaatcgaatttatttcaactaatttattatttttgaaaaaaataagtgacatgtgtaagatgaatttcttattaagtaccacaatgaatcgtggcagcacattgttgaatattagagagtttagggtctaaacaaaagcaaaagtgagtcttggtggccctctatcgaaaactccgttaatctgtaatgcccgatttgagttggtcttggcttggaaatgatacatgtgacgccatataatgctgcgtatggcaactcgtcgtaggtactccagggttttgggacgcacatcacggtcagtcatccacatgaaagacttctaaagacgcatcttggagtttcagattcatcgaagcgcaagatccaagttgaatatttcatgtagcttagagaataattctgtgtaacatgaaactcatgaattgcaatacaggtcgcattgctcttactgttgcaggagcctcttttattgcagggagctatctttctttaacaattggcagtctctccctcagctgttaaaccagtaaccttaacatacctcgtcaaactctactagactaataataaattatgtatcaatgataaatcatgggaaaactattagaatataatttcttatttccaaaattcctacaaaatgcgtggatattaggtcacactcaagagaattttagacaaatttggtgaggttctctgatacctcagatctagagtttcagacaaagtatagtgttgtcgcatcacataatggagctggtacagtatctactaatacgtggtttgaattacattttatagtaattttgttggtcactagtcattatcacagtactatgattatgaattagaccatacactattttaaattttatcttaccaaacatactttatgcatgcaattcataatcatagtactgtgataatgactatgatgagcccattctatgtatgatgggagatgcaccaatttaaactttgttcagttttgaagatatatagatctgaccaaagcaagaagggcttttactaagagtaaaacagaggaatatg

SEQ ID NO: 29381 - DNA, 3000 bp, Unknown; identical to SEQ ID NO: 14370
  misc_feature (1)..( 3000): 2750-1469P.txt file - cDNA_ID_3016519; gDNA_ID_2684112; Annot_ID_190653

SEQ ID NO: 29382 - DNA, 3000 bp, Unknown; identical to SEQ ID NO: 14372
  misc_feature (1)..( 3000): 2750-1469P.txt file - cDNA_ID_3016525; gDNA_ID_2684112; Annot_ID_190651

SEQ ID NO: 29383 - DNA, 3003 bp, Unknown
  misc_feature (1)..( 3003): 2750-1469P.txt file - cDNA_ID_3016533; gDNA_ID_2684112; Annot_ID_190649
cattgctctacaaacacttgaagaccaccaaagaaactagccgcatttgttcgatccaaggaatcagcgcagttaaaacgtatcaccccattttgatgtgatctcaaacagaaggcaccttcaatgtcatcaatacagattacctcacctctgcaatctttcagtctttgacgtgaaggcaaatagtcaccttcagaaattcctattgccatagtgggagattttagatacatccacaatccttcaatagtttgctgttccccttttagtttcacgctggcatgccaatcataatttatcaggtgaacacgagtataaggaagctttccactggatttgataaagttcatcgattcttcaaaatgttgtactaagatacattctgatttcccttctccacttcttagtaaattaacgcacacaataggaacaaaagcctttttcttctggttttctccaacaggtgcatctagattcctagtatcatatcgcttgcttaacctttggtaatactctgtactgcctttataaggatccctatctgccacataaatttctgcttctgccgcagtcatctttaattctgcaccccaccatattggtatggtgccacgtcgccaaatgtacgagttgaaagcaatgctttgaccatttcttttaggtatccatacaagctgctcacactcaacttcgttacctgcactacacatatacttctaaattaggccctagtcaatccagagccacactttttaagagaacaacaaagaaattaagagagaggagcattttaggggggcatgtcacctgtgccagaacatgaattaatgcccctagctaggtaacgagtccctggatgcagtctgctacgacgggccattagagcaacaatcccttctagctggcctgagctcccaaaaggtcgatattctgcaaacccctataattaacatcaaataagaagatgatgtcatatcaatttatatgcttttgaatcttcacacaaaaccgaaatcggataggtagatcaaccttcatcaattcattaatggaggacgaacctgcagaagaatgacacagtgttcaggtagcccaatattcttaaaaggcacggacaaccatctattccaaacaaattcatcatcagggctttgaagtggcatacggcttgggaagggccgagtgatgtctctagtatcacagaaatagtgcttcccgtcgatgtcaagctcagtcaactcctgaatattcttggtttcacctttcccttgaggctgtggattgtagagtggtattttgacccattgactctcagccactgtatatacacatccaccaccaggcaaatctggaatacttggatttagcctggtcgcaactaaaagcatcccaaagctccccaagacagcataaccgagtattgccctggcataaacagagcttctaacacctcctcttgatccattcgtaatataatctaaggcttcacgctctgacttaaaattatcaaggccaggcttcccattgtaccgcaggataccagtcgtaggatcgatatagataacttgagtatcagccttagataacaaacttgcaatgacatagacttcaccagtgtctaaggtgacaacaactacagatgtcttttttgaaccacctacaccaagaagataagaaaattagccaaccaaatgatgaaaacagctagagtgaaaaaaaaaaacacttgaatcttcaaaaagaaactaacctggtggatgcagatccatctgagctcaggaccaagcggaccaggtgccctctttgacagcttcagggaccaagatatcaatgtggaaccaaaaatctagcaaaaagtcaacgaaataaggaacttccatcagagaaataaaaagcaatggaatccaaaaaatgtagcatagttagttctatacttaaaacgattcatcaacgccaattaaaatcaaaacagagagatcatcttcctaacaataatctccgatataactgagacaaaagatcagaattttctcacaaatttcgatagaagtaataaaaaaaacgagtaccagagatctgagactttttccgagaatagcaaaattaaagacgcaaatcgataattcaaattccgagaaagcagaaagataaattcttcagagaacccgaatcgaatcataagtcataagagaaggaactcaccttgaagttgtagagatgatcagatgcaaaatttaccaagtcgttcgtagacgaacaaacgaagaggaagaagagtaaatctgctgttacccaacacacagtacaaaaacaatcatagtacgacacgtgtgaatctgtttaattgatttatgaaaaaagagaagaaattattgataacttgaaaattggtccaattagttttaaaatgtaacgaatagacccaatcaaaagaaaagacaaaataaagtatagagatgatgaattaacggctttggacaagccacacgattcgctttgcttatcttgctccacccaatccaaattgagacacaatctctatcgaatccacgcgcctctatcttttttcaatcgagtcgccattaacatatttcatcaagctcagtccactcttctcatgaaacttcatcatcatcgaccttgaccctgataggttattaaagttactgcatttgatctctctttgaactgcttctgttgttcaaggttccaaacatgctcagactcagtaattgaataatgggtattcttgttgcaggtttcagacgacacccattattgtaaatctgctgctggagtcttttttgtctgaatcttcttcttgttgagacactgtttcttcttggtctgtgatttttgttttgttctcattaggacgttctttattccggttcagatttactggatcgtcattttctctttgaaattgtatttttttgttccttttctggtatgttgtgaaagctatgagattgctgtaagaatccaagactgaccaacatg

SEQ ID NO: 29384 - DNA, 3000 bp, Unknown; identical to SEQ ID NO: 14375
  misc_feature (1)..( 3000): 2750-1469P.txt file - cDNA_ID_3016537; gDNA_ID_2684112; Annot_ID_190648

SEQ ID NO: 29385 - DNA, 3000 bp, Unknown; identical to SEQ ID NO: 14364
  misc_feature (1)..( 3000): 2750-1469P.txt file - cDNA_ID_3016541; gDNA_ID_2684112; Annot_ID_190646

SEQ ID NO: 29386 - DNA, 3000 bp, Unknown; identical to SEQ ID NO: 14383
  misc_feature (1)..( 3000): 2750-1469P.txt file - cDNA_ID_3016578; gDNA_ID_2684113; Annot_ID_190719

SEQ ID NO: 29387 - DNA, 3003 bp, Unknown
  misc_feature (1)..( 3003): 2750-1469P.txt file - cDNA_ID_3016612; gDNA_ID_2684113; Annot_ID_190708
atcttcaaggagtttttgccttgtgcaattcaacttcttcccatgttgtttatgtgtagtccaattagtgttatttttaattaagatgtggtccaattagctgttctttttctaaaccgtataacataataatacgtgattcaaatacattaacataatgcaaaaatgtaacagcaaattcattaaaaacaaaaaatgtaacagcaaagcaccatactttctctcgtggggattagaatatacagctttcattacaaagactagtcaactaaatcgtaccagctaactgcaaaacatcatcttaggaaatagaaaaaggtatgtgtagatcaatcaaaatgaataaaatgtttgattatgaataaaaatgaataaggaagagttcaatgagatgatgatattaaattatggtagaagaaaagttaataacaggtcagatatagaaactttccgtaaagtcaaggatttaaattattcacgtgaatactctgtctaggtcctatcttgaaatttatcattcaaacctttaatattatctatatgtttttactttaaaattaaattttaatatatgtagatataaaaattaatatttttaatttatatattcttaatatttatatctagatagagtcatatcaaaacattttgtttgaatgcaaatttcaaaagataaattttggaataaacattttcaaagacgtaaattaaaaaagcaatttagaaataaagcattgcaaaaataaattcaactaaaatttagatgtagatgtatattgtgaacccccaaaattaattataaaatcttttggaactgacatgtcaatatttgtttgattgatcaaccttttttctcctccaatcttcgtttagttctaataaaaatatcataaagaattaaagattgcagttatgaagataatgacatttttctttaatattttatttttcttcattattttaaaaacgtttggctcaatttatagacagtgaaggaaagttcttggaatttggttcttcttctatacataagctttggttacacaatcaaaatcaaatcgagaactgttgttgtgtccgaaaatcaacatcaacatcgtttctttcttctgccattaaatttcaccatcttccaccttcaactgccctagacagctattctccacctttctcttttctctctctgttctctatcattcccagagataaccaaacaatctcagaagaaaccagaaagagcaaagaaactaaaaactattattcattaaagtcagtgtttttaaattcgatttcgtaatgggttcttctgcttcaaagaccgcttcttccgtttcttctgcttcttcctcatctgcgttttctccaccgccgaccaaattcagctccgattcatcttcaccggcggtgcagagagctttttcgtttccgacgccgttggttcaccatcctccggcgagaaaaggcgactctcatcaccttgtttcccttacatctacatcgtacggttctcttctcctccttgatctcgatggatccaaaaactcctcttccgaccaacaaacgctgcctcgtatctcaatctccgggaagaacacaccagatccggtctctcctgattcagtcataaacacttgggagcttatggatggcttggacgatgaattcgaattcgaaattcccaaaccgggtaagcgtctaaattcggatttttgctctaaacccgacccgaatcggaatgtgagtttaaatgggtcttcgttgaaattggatgaatcttacgagattgtgagaatcgaagaagacgatggagattgggttcctttgacttataaacctaagcaacctttgtggaagcatttgtctgaagaatcatttctctctgatttagatcccagcattgtctcatcctacaagaaagctttgtcttctaagctattaagcaatcatagtaatactagaaaccctcatagacccacaaagtctctctcttgtagcccatcatcaaatccatccatcttaataagcgaagaaccaaaatctgtatcctctagtcaattgatttcatcaccagccaaaccgagattaccaggaacagaagacaagattgtactctacttcacaaccctcagaggaattcgaaagacatacgaggattgttgttgcgttagagcgatattgagaggagttcaagtgtccgtagacgaacgtgacatctctatggattccaaatacaggaaagagcttcaaagcgtgcttggcgccgcagagaaaccggtttgtttgcctcaggtgtttatcagaggaactcacattggtggcgtggaggagattatgcagctaaatgatggtggtgaattagcagagatgttgaaagatttccctgcttgtgaacgcttggggacatgccggagctgtggtgatgcaaggtttgtgccttgtactaactgtgatggtagcaccaaagtgtttgaagaacaagatgaacggtttaagcggtgtcctaaatgcaatgagaatggattggtgcgttgtcgtgtgtgttgtctctaagtgatcagtttgatcaaaagatgtgtgtgagaaaggggatatagattgattgactaaacatggtatttggttagtaatgtatattcaaataagtaagttggctcaagccttttattatttactcttatgagttgtgttcttttgttccatttacgctcttgaccttttgaactaaatgattcttactatatgaagtacatcaaatggtagatgatgattgataattcgcataatagccgaatgatttgctttgtttgcaaggtattttttatcaatgaaaaatatgtgcaacattaccacaaatgtagtttgattgattgatgtcacctgctcgctcacctatattagctttcttccttctgttcttaaatcctaaaacgacaacgtttagtctccctttaaatcccatcactggactcgacgacttttgctcagataagggagacaaaaatg

SEQ ID NO: 29388 - DNA, 3000 bp, Unknown; identical to SEQ ID NO: 14386
  misc_feature (1)..( 3000): 2750-1469P.txt file - cDNA_ID_3016619; gDNA_ID_2684113; Annot_ID_190706

SEQ ID NO: 29389 - DNA, 3000 bp, Unknown; identical to SEQ ID NO: 14387
  misc_feature (1)..( 3000): 2750-1469P.txt file - cDNA_ID_3016627; gDNA_ID_2684113; Annot_ID_190704

SEQ ID NO: 29390 - DNA, 3000 bp, Unknown; identical to SEQ ID NO: 14381
  misc_feature (1)..( 3000): 2750-1469P.txt file - cDNA_ID_3016635; gDNA_ID_2684113; Annot_ID_190702

SEQ ID NO: 29391 - DNA, 3000 bp, Unknown; identical to SEQ ID NO: 14382
  misc_feature (1)..( 3000): 2750-1469P.txt file - cDNA_ID_3016646; gDNA_ID_2684113; Annot_ID_190699

SEQ ID NO: 29392 - DNA, 3000 bp, Unknown; identical to SEQ ID NO: 14380
  misc_feature (1)..( 3000): 2750-1469P.txt file - cDNA_ID_3016650; gDNA_ID_2684113; Annot_ID_190698

SEQ ID NO: 29393 - DNA, 3000 bp, Unknown; identical to SEQ ID NO: 14388
  misc_feature (1)..( 3000): 2750-1469P.txt file - cDNA_ID_3016652; gDNA_ID_2684113; Annot_ID_190697

SEQ ID NO: 29394 - DNA, 3003 bp, Unknown
  misc_feature (1)..( 3003): 2750-1469P.txt file - cDNA_ID_3016654; gDNA_ID_2684113; Annot_ID_190696
ttaacctgtgttatgttcctttttctgaaaatgttgagatttgtttcagacaaaccgaaccacggcaagaatattccctgcggtgctggatgttgagaaccctgagttcaagaggaaactggatagaatggttgtgagctatgagaagctgctggctataggagaaacagatgatgcttccttcatcaagaccctcaagaggattcctttggttacttctttagcctctgagatcttggctgcttatctcatgcctcctgttgagtctggctctgttgatttcgccgagtttgagcctaatcttgtctattagtagctgcaatgtcaagtcttgagtttacggctggttcttgatttcttgtaattgaatgatcgaaactgagaaacatcgtctttttttttttgcaataaacttttactgcatatatttgatcatattgcgcattggacttacttaaatttcagattttattgaactggttgatacagttgagtttgcaacataaaaaaaaaacacattacaaaatctacgaaaatatccctggaaacaatcctaccctctgtgtcttgtgtaaaggagatttatccagagaggattaaatatgaaagctgagctcattcctcattcctcactcagatttggccttaggtttctcttgttcttcggtgagaggcttaaacacaactttgaagaaccaaactgcaagcaacgtagccttcacaggtccaagccaatacacaagtaaatgctctttcgttatatgttcaccgcgtgcataagcccatcccataacctgcaaagattcacacaaaagcaaacattcaaaacaaagatcgctatttgctgaaatcacaatcacaagacttttttttggtacatacagctgcagggttcatgcatccaccggtaagatcagagccaagaatatgaagagttaacttagcaagactaccgatccaagtcttcatgaagaaacttcccgggatttttcttgttagtcccattgagagcagtacaatgaagaatgttagtatcccttctgttaaagcaccgtggtgaattgctacatttagtttaggtcctttcccaatctcagggaatacgtgaatgatatgcttaaccgcaagaattgatcctattacctgaaataacacaaaaccagagtttcacaatagtatcatctttgattacacattagagcaaaagatcttcaagatgaagtctttataaaacaatagagcatataaccaaaatgatctggttttcaaagaagaacccatcagctaaattctccttttttttctctaatttgacattttacaacattacacaaaccctgagacctctctctaacgaagagtcaatttcaattaaaccaaaaaaagtcaacgaaacaaacctcgacggggattcgaacgaagacggagaagatgaaactgctgaagccaccggagactccagcagccaaagcggtcaaaggattataaagcccgcctttggtggcttgttgaaggtaggcgaagatgaacatggagatgatagagaagagataacgaacgatctcaccggaaggatcggtccggctaaatccaagaactccatggactaaaatgttgaccagaactcctgcccatatccacatgaacgacaataccagatcagtcactactaaaccgattcgtcccatttttcgattccaacgatgagaaccaatttctcagaaagaaagaaattaaaagttagcgtttttatgatctgaatttaggataattgaggaccgttgaagagaatcgagattatatgattggctctaagcggctggtgaatttagcatataattgacgctagagacattgtttgagtctgagtcagcttccgacaataaaggttttggctttggtgtgtcgtgatgagattatagattctcttcgattttggaacgagcttcggctattaaccaatagacatcaactaaagtgatacgttattactggataaagtatttactttacacagttaactaataattacaaataaattactacaattagccttcttaagaattgtttacaaaaaagccctccaattttaacctgcgacggaagtttcccctcaggaaaaatatgaccttttgatctttacacgcttggctttgggttgtaacttttgtctctcttctatcgtttatggtgtttgaagcttcagcattgggaatggatctttccttttgaaaataagttgtgaatatacggaaaaatgtgacttgttagtggagaagcaatgcgtttaaagtgttcgacagaatgcctcagtgagttagagtttcagttacctctgtttttgattatagctcttagtgatctcagattggagacgttatcagtcttggctaaattgattaattattactttttccgattttttttgttctgaagaaaatatgtttgtttatgagaggaaagctcggagatgctaagaatagagaaaaatgggtcatgcttgtttctctaaatttgaaggctttcattggtttgaggagatgaacggtttcttctttgaacgacataattagttaagatgaattgacaagaaaagatgaaatgtcggagagaatttttttgatcccttaactcttttggccattggtttttctctctctctgattctttgttaggtttccatgattgttcatatcagctttcactccgaaaatgttgcattctaaaagaccaaaaaacattcttttttcttgtgattcaatggcatagagacaggaagtcacagagtaaagaccattgcagatttcttcatgctgcgtttgatttaatggttttaggtttacactttgttttttcttttgcacagagttcatggttttctcttgtgtatgtgtacattgataggattgttgtttagacaagaacaaatatgttttctgagtttatgttctaggatatacatataggtatcttagagaaaagttttattagtttaagaagatg

SEQ ID NO: 29395 - DNA, 1817 bp, Unknown; identical to SEQ ID NO: 14376
  misc_feature (1)..( 1817): 2750-1469P.txt file - cDNA_ID_3016658; gDNA_ID_2684113; Annot_ID_190693

SEQ ID NO: 29396 - DNA, 3000 bp, Unknown; identical to SEQ ID NO: 14392
  misc_feature (1)..( 3000): 2750-1469P.txt file - cDNA_ID_3016680; gDNA_ID_2684114; Annot_ID_190758

SEQ ID NO: 29397 - DNA, 3003 bp, Unknown
  misc_feature (1)..( 3003): 2750-1469P.txt file - cDNA_ID_3016684; gDNA_ID_2684114; Annot_ID_190757
gtctttagaagcagaaattgtgtgtggttgattgacgaagctgtatcttgtttctttgtagttcctcaagtggatattaactaaagagacaaacaaaactatcttgctgggtcgtcgttgtctcttttgttacttgttagaaaagatactgaaaaatagtcatcagattgttgattaactaaatgatctgtcccatttgttttattgaaacaaaaactcaaatagtgaaactgaaatctaaaacataaacacaatctgaactgaaactaaaacataaactcaactgaaactaaaacgtaacacttgaactgaaactaaatcataaactcaactgaaactgaaacgtaatacttgaactgaaacaaaacaagacatttaactttaagtatcaaaccaattttttcaaaagtacttaaactgaaacatccaagtacttaaactaaaagtacttgaactaaacaaagacatttaagctaagtctaaagtacttaaactgaaagtctaaaacattacaaaacagtgataagaaacatatttaccgtagcagcacatatctcagtcttgtttcttgatttcaaaagtgattgcttccaactcacaaacaaaaaaatatatccgtttttctttgccagactgcttggtgactttccctgtgagacaccaacaatataaatatatgatgtcaagactaaatcgatgtgggtaattcattaagaaggaatgaagatatatccttttttatatgaaagccatgacttctacaaactctgcatcaatctgaagcaaaggaccaaaaaaacactgaatttattttacaatgtcaatattttacaatgctgactataacgaaccccaaattctcatctctctgcctattacttctcaatttcacaacctcaacagctggcttaggagtgatcacagattcaatcttagcctttccgatttcgattgaacaaacatgaattcactacaaaaaaatcattgtttatttcagtaaatcaaggaacctccaaagaattgaagcaacacaaaaaaaaattacttatgattcattacaaatttatttcagtaaatcaaagattcaaaaagaactgaagcaggactgaacgaagatttttttttttttttttttttttttaatcatcccaaaatgggctttaggcaaggccttacaacaaccaaacgggtacaaaataagaaggtaacgactgacaaatccggtgacccgagatcggacccggaggttgatcggaaaacaaggaaacacgtccaatagtaccagcgattacaagaagcactgcttcgcggctacgacggcaaggacaaactcaatgacagaagtaatcagttcccaacgccaagtcgatcccgacgacaaacctgaacctacaacacttcttccggtatgaaccgaaacctagaaaatccggaacccaatccctctaatccttaacctagcaaaaagagagaacctaaaaatctaacacccagactccagatctgtcaagcaaacaaaaccttgtacgagcaaagccaacctcaaatccggttagacgaaaactaaaacttggaagctgagaggtttagtggctcaaaccaagcctccacggccaagatccaagattagccgaaacagatctacaagaaaagtcgttaatcgtctcaacaaacagcctaaacccaccaatccgccttcatgacttccgccgcaacccacagcacccaccgcaaacatatgagccgcaagaaaactccaccaccatgcctccgacgtccataaccagaagatttagccggggagatttctcaaaaatgtcgagatagaagccacagatgcatcacgaaccagattaaccatacgcagctgtcggagaagaaagctcgctcacccccactttattgaataaaaaccaaacctgcaatgaagatctaaaacaagaaaagaaaccggaaagtagatctgttttttttttctcttgaggagagagaagagagaacgattggaacgattgtccccttaaatcatcttttcctgctacaatattctattgtatcaacaattacagttttaaatctgctgtgtcacttttctctttgaaaggaatgatcgtcattttcttttgcttaaattatctttaaagtttttttccttccttaacgaagattcttcataaaagatgcaaaggttttttttttctctaacttttttccgggtcgcccgcaaaaccgcggtctttaatgggcatccatgaattaatccgcaatccaaacggaccattcccgcgagacccgctattttttttctccattatataggcgggccaggcctgcggaccagaggcccgattaacatccctaaacataataaatgacatctgaattaaatgtaggtacatattgtgtaggcattgttgcaagtgaaaagaattcagcatacgatttcaaataaagaatgatccaaggtcctcatttccaagttataattaaagctttccgggtcattaagtatattaattctgacccgattagcttttcttaaaatatacttcaaaaatgttaatttagatattggatacccaattagttaatcatgtcggaccgagtcagatcagattttcgaacataaatctttatctctccgaattgaaccaaatattaaaccaaaccaatttgtaaaaagaaaaatcggtttggtttggatcaatagaatcgggtcgcatcaaaactccatgcatgcctagttctgtccatgctggaaagaaaacccacctacactcgaaagttttctttaaagaaaagcgcgagagaagtttaggttttgtaaatttccaacttttaaccacattttttaaagacaaaaaatagtgaaaatggtaaataatatcccgcgtgtcccactctgaaactggcgccaaaatcgaggttaatactaaaaatgcccaaatcaatcagatagaactaaaaccctagaaccacccaaaacaatcaacatctccgatg

SEQ ID NO: 29398 - DNA, 3003 bp, Unknown
  misc_feature (1)..( 3003): 2750-1469P.txt file - cDNA_ID_3016706; gDNA_ID_2684114; Annot_ID_190751
aaaggaccgagattgaaatacaaaaaaaaactataaactatattgctattgctatgcactaaaatcaagctacgatgtttgtgtttgagaggagggatcctatatttataggtattttcagcataaggttttagggttttacatatgacagcgtaaattatacgggcctaatatctttgtttgaaaagcataagcccgttagggttgttaggcgacttatgattgattaggtttgattaggattaataggcgatttaggtttgattaggggcgccagagaataggaaatttagggttgagagtgaattaaaccttttttttttctacacattaaaatataaaaacaaaataataagttatctcattagttagtaaaaatattaatttatccttaaaaaccttaagagagggagggcaaatccatcagttcattttctgagagcgaacatgaaagtttttgacatctgctttaatatataagattctccaccgcttatgtttgggccgctacgaattcaagatgttctgattcgaatgattgagtgattatgaaattttttacaaaaatgatcgataggtattgtgttgttatgggttttaagaaatatttaaatacttttttagagacggtatgcttgaccttttgtaatattatggtcgaattttcaaatctcataactatattctatcattgaaatttaaatttttttttaaatactctagttggtattaaataacattccttagttttgcctcgtttgagctctaattattaatcggatgacaaaaaaaatagttaatattaaatagtgaaatcttttataaaaagaaaagaaaacatttatttactagtggggataatgtttctaaagcccaataaaggcccaaacgttctctgaaataacaccctaattatagcttctgaggcccaaatctctctctctcccctccggaaatctcctcgattcctccgtcaccaccgtaccgtaaccgagactggtcgcaatgttgtcgctcaatctatctttgaaaccccaacatctcaagctcttatcttgttacacggattcgtctgctccttcaatcgcgaaaaaggtacctacacacttgcttctgtttcttagttcacttcatatcttgaattttaggtatctctctactttgtacagttgatcaaggaatcaaagctatctagggacttcagtcaaaagatacaaatcgtagactacgctccattagttcaaactttaagccagagaagattacctgatgtagctcatgagatttttctccaaacgaaatcagttaacttgttaccaaattacagaaccctttgtgctcttatgctttgttttgctgaaaatgggtttgttcttcgagcacgtacgatttgggatgagattataaacagttgttttgtacctgatgtctttgtagtctctaagcttatatctgcttatgagcaatttggttgttttgatgaagttgccaagatcaccaaggatgttgctgcaaggcactcgaagcttcttccggttgtgtcttcacttgctatatcctgttttggtaagaatggacagttggaactgatggagggtgttatagaggaaatggattcaaagggagtgttgttagaggctgagactgctaatgtgattgttagatactatagttttttcggtagtttagataagatggagaaggcttatggccgggttaagaagtttggtattgtgatagaggaagaagagataagagctgtggtgttagcgtacttgaaacaacggaagttttatcggttacgcgagtttttgtcagatgttggtctcggtagaagaaatcttggaaatatgttatggaattctgtattactgtcatatgcagctgattttaagatgaaaagcttgcagagagagtttattggaatgcttgatgcgggtttctctcctgaccttaccacctttaacattcgcgctcttgcgttttctagaatggctctcttctgggatctacatctcactcttgaacatatgagacgtttgaacattgttccggatcttgtgactttcggatgtgttgtcgatgcatatatggataagcgactagcgagaaatttggagtttgtatacaaccgaatgaatctggacgattctcctcttgtcttaactgatccacttgcatttgaagttctggggaaaggggatttccatcttagctcggaagctgttttggagttcagtccacggaaaaactggacgtatagaaagctaattggagtttatctcaagaaaaagttgcggagagaccagattttctggaattactagctacatgccacatctttgctgcaaagaccgtcactctttgctcactatcacaatccccctgataaacttttccgatgcttgaaatgaaacattgaggttagagagtcttcttgctactagatttacatataaatcatacatgcctgtatttacaatgttttattgttaaatagatatgtatattgaattacatacatattattaatgcacatttttatccggagttgtggaccatagaaagacatattgactcctcaaagtaaattctgcatgttacattgaaatcataggctaaatttgagatgcactatttttagaaagtgtagagaaaaggacaggaagaaataagcgaaagctttggtaagccaccaaacctgattactggaagaaaagaaaaaagttccgagaatagagttagatcgctggtgagggttttaaatggaacacaacaatggttgttttagagtgtgttattcttttgtatttataccttctcataggtttcttgtaatacacgcttcttcctctctctccctctctcttatggcctcgtcttgaaagcgtcttgcatgctaagagaaggctttagagcaaggagagaagggagaagttgatttatacgtccatcggatatatcttctttttatatctgtctctcttttaaggaagaaaaatg

SEQ ID NO: 29399 - DNA, 3000 bp, Unknown; identical to SEQ ID NO: 14391
  misc_feature (1)..( 3000): 2750-1469P.txt file - cDNA_ID_3016714; gDNA_ID_2684114; Annot_ID_190749

SEQ ID NO: 29400 - DNA, 3003 bp, Unknown
  misc_feature (1)..( 3003): 2750-1469P.txt file - cDNA_ID_3016749; gDNA_ID_2684114; Annot_ID_190738
ttttagtaattatatatatttaatataattattttaagaaaaaggatagagtatttttcaaataaaaattcaaaaatagggcatttttccaaatttactctaaatttaaaccacaaattttttaaaactcagtaggaaacccgtatgattctgctatagcgagttaatagattatctcgaattctcttttctgctttgcttttcgacatcctcctctttgatttgctcattcttttattttctatttctctgcctacctcttgatccctaaagcggttactacatgattagaatgttggcaatgacaaacaaaagctaataataacaaattttggtgaatgtggtggaaaacaatcgtaacaaataacgatagcggatggaattgataattgatcttgtcaatctatagttttcaacggataaactaatccgagaagtaaataaattttattataatagataaaccctaaccaaacttggtcagcaaggcaaataaattcaaaattgataaaaaattttggttcggtcacaaaatcaaagccttacacctttgagtggtgagataaaatggatttccttatttcactacaccattcctcttaggagagagagtgagagatacatgttttttttcatcgataacttcactatgtgtagatcacaagcttatatagcgctagttcgccactcatgaccaagccgatgaaccgtgcgtcaccgaacatctacgcaaaagcaaagcggtaactatgataataagtctaatatgcttttgtttttaaggaataaatgagccgctaagagcatctacaatggtaatctctcaccaaaatctctcacctacaaaaataataataaaagaataattaatgttttttaattaacagagtctctcaataaaggtgagagtcatgagagatgataggagccttttccaactgttttgagaaactgcccttattaaattatattacttcttattttattaatacttttatatatgagagattttggtgagagatcacctcctttgtagatgctctaagagattaatctctttagaatttgattaatctgagaacatatttgttaaagtctttaagtaaaacaatcaattcactaagataaaggttgctacggaatagactatgactcacaatgttcagtgatcaggtttatcaacctctgcatgttgagatcgacacaagccttagaaaaaaagagaatacttaagccttgaatggctgtagtttttggatttggattttgtaaaaaccaaataattatccattcataattctgcaaaaatagattttctcaaaaatagtaaaaccagattttagtagattttacctatttgttcatagaatctaaaaacaaaaatttgtggattttttaaaacaataaaaattaaaaactaaataaatttccattcacgattttgcaaaaactaaattctacaacaaaaatcaaaaactaaaaacaaaaatccaaaaaccaaaaacgaaaaccaataaaaagtacaaaacattcaggaccttactgtaccatcgtacgttaggaaaaatattagaaaatcaacaaacactaaacaaaccaaaaaccctacgatcatttctttcttctccttcaattttttttcctgagtagatgccacaacaaaacaatagattataaactaaactgagcaaaatcatcaaaacaaaatgcaacaaaaaaaaacatcaactattctctttgaacaaacgtgcaacatatatataatatatataaaatatttcacaaagaatgaaaacataaaatttatagaccaaaaagaaacataaagatatagaacattctcaatattaatttcgatttaacaatcctgatatcttcagctccaatcacctgaatgttgttcacatgtagcccacttaatcatctccaatatcaatattttatatttatagattttccgttgcttccttctacaacttataaacaaaatttaacccactttattataagtgcaaacattaaagaaatatgtgtaccttcgaagacactacaatttgactcatcaaagcttcgttctttatcttatttgccaaattggttcaagaaacagagaagttagtgttgattcgactcgtatgtaccaaacaggacctacttcaatcccaagcctatcgatatggagacaaagaaagaaaagagcaaagaaggtttaatcgctgccaaagagctcaagcgcctccaaaccaacttagtccgacttgatcgattcattgattctcatgtttgtcgtctccttaaattcgatctcctttttgttcttgctgaattttcagagacaaaaccaaattttcctttgtatgacggacataagttagaactataccaacatgaacactatttattatatttataataatgatacaaaaaggtactttaaacagcaaaattatatatacttttttgctcaaactaaaagagaaaactatttaatatatgttattattctttatatagaataacataaaataatatagaaattaatataaaattatagaacggttacaaaaatatctatctatatatcttattttattgatttagaaaaacagataaagattagataataccgaatacttgtaaaaataaagttatattataaattgttactgtgataataagtttttaaattattatatagttaaatttatcattctcagcagccgtcatgtttcaggtatatatcattctgagtaataatatactcaatattaattactttaaaattttcaatcttcaatttagcataataatcaaatataccaatgcagccgatgaagtacattctctgttaaacttacgttagtttctgggtgctcctctacaacatcactctaggcacatgcattaaaatattcactgttttattaaatatatatatatatttatttattttctgacaagataagttacaaatttttgtttccatactctttgaaagagatg

SEQ ID NO: 29401 - DNA, 3000 bp, Unknown; identical to SEQ ID NO: 14401
  misc_feature (1)..( 3000): 2750-1469P.txt file - cDNA_ID_3016769; gDNA_ID_2684115; Annot_ID_190785

SEQ ID NO: 29402 - DNA, 3000 bp, Unknown; identical to SEQ ID NO: 14399
  misc_feature (1)..( 3000): 2750-1469P.txt file - cDNA_ID_3016775; gDNA_ID_2684115; Annot_ID_190783

SEQ ID NO: 29403 - DNA, 3003 bp, Unknown
  misc_feature (1)..( 3003): 2750-1469P.txt file - cDNA_ID_3016791; gDNA_ID_2684115; Annot_ID_190778
tgatttgcctgaatgaaaataatttattatacacagaaatgtatttgatttcaaaattcaatttatgtgacctgaatgacaacaaaattcccgaaaacaaaaccaaaccatgagatgttttaaccgttctaagttttgtaacccagccggagcatgtccaatgctccaccttgttgaaaagatatattaatatcatttttttgggccaccttttttactgcaaattaacaattgtttggctatatactccaaaatatgaaaaacaatagttgttttaactacttacaaatttgaggtaactccatgtattagctattaggaggtcaaattattcaaaattataactcaaattttcacgtttgcaaattaattcctcaagttttcgctaccacgcaacatcatgctaaaaatagtcaacgttaacttctacgttttcttatttggcgttgacttttttcaattgtatagtcaatttaaacttcaaaaatttaatgtgcgcacacacagttgagaaattaataagtcaattgcaaatatttaaggaataatgaataatttccctatctatttggtggtttaatctccaacttatcttttggagaatcttgtttcacagttattaactttcactaaaacaaatgagttctttctaaaataaccttttaagttgtaacctaattatagtcatatacacatacaaaaaatctacaaaattctatattcatatacacgacttttgctttctttcttctctaaaaccatcatctttttgtgtagtgaatttgagtgaaattaactttgatacgtcaaaaataattttatttttattcttgagaatttgctaatcttgccattaaaagtatttttgggatatctaaaaactaaaaaaatgaagaatctaaaataatatttgttctacaatatagagtaatctctttttcataacatcttttacaaagaagttacaagcaaaacttgaaataaatatgtggaacagcgttatcaaaatacatggaatgcttatgatgtttgctacataataatttttgtttgttacacattacttgatgttttcatttttcaatgcaaaattaattattttatttgtttttaatcatttatattctgcgctttgttgtctaaatagtttttaattaaaaaacattatgttttaattttgtttttaaaaaaaaacacaattggtttcttaatctatttaatcatcactaatattgaaacttaagaagtaatgttaaaacaaagtagccctatagggtttttatagaaattaatgtaccgttaagtaatagatttcagacatcattgactatcaaaaactaaattttcggacaaaaagaatttcattactattttaaatttgttgatgttaaagagaatagattggctgaagtgattgatgttaagctgaaaaacaatcacaaccatggaaaagtcacatcagcggcaagactggctagtagttgtgtgaggatgaaaggtaaaaaatggccaacaatggcgaagtggctgtcgaattggagcacattcgctcattagcgtagtcgcgtttttttttgtatttttttttttgaagaaaagtaaacaggacctagtgtgactgtgtgaggtcattgattcatgctgatcttcaagaccgatcgaagtgtagcaaacaatcatcctgcatgcaggcatctggttccttgagcagtctccatagctttgatttgcgtttgctcttgatttcaatctattttcacttattatactttaaaagaccttgaaaactcgaaaccaggaatattgaactgatcagatcctggaccactgcaataactgagttcatgtacgtacaaaactaatatgtcacgactaggaatttagcgtcctcgtgagattgagagagacacgtatggtgtcaattgcccgaaggtacagtattagtttgaattgggcaacaacaacaaaaacgtgcgttctctaatactcacttctctagaaaacaacaaatatgataacgtaacctcctttgcttcttttcttattaattaagaccactcgtaactaataaagatgatagatcttttatataaaaaattgtattcgtcaatgctcttttatgaaaacaatagttcaactacccatacttgcatctattagctatctagtattctcatattattacaaacattatgcagattggagataattaccaacatttctatataaacaatccgaatttggtgattataaatacttaattaccattctggaagtaacaatataacaggtagtatctatgttattttggcatgaaaggaaatgatcttaacttctcaaagtatatttcccacttttctcaagaagatcattaataaactaatacctcttcttggacagacatttttgagttatcttgtttttgtttcggtcactagttaagaaaagagaagaaaactcaacataccattttatcacgttatagccatgttcgaattgaaaactaaccacctaaaactagaggatatgatttcttatctattttttggtttcattttaagcaggaccaaaacctaaatggccggttcctccaaaactagttatattttttttttgtataattgcaaattcataaagatgaaaagagctgcattcttgggtatatacatgttaacatatctttctttagatacagtggtcctcctatgcatcacatgcaatatcgggtaaggtcaaaaagatattgaattgtccacaacacataagaagttaagatgtcactcgtggacattaacgtcgtagagtacccatatattcccatggaaattattggtattcgtaactcttggatatttttaaacgttgttaatactttaataaaatatattatattgtctaccgaatcaaacacagctgtatcaacaaaaataatttgaaacttgtataaatagatgaagtggatatgagaggaatgtaagccttatagaagagaaaaaaaatatg

SEQ ID NO: 29404 - DNA, 3000 bp, Unknown; identical to SEQ ID NO: 14398
  misc_feature (1)..( 3000): 2750-1469P.txt file - cDNA_ID_3016796; gDNA_ID_2684115; Annot_ID_190775

SEQ ID NO: 29405 - DNA, 3003 bp, Unknown
  misc_feature (1)..( 3003): 2750-1469P.txt file - cDNA_ID_3016800; gDNA_ID_2684115; Annot_ID_190774
tgcaaggaacggatgtgatgcttcgggaagcatccattcgccccctatataagggaggacgcccaaggcatctcacatcatctcacaacatccaaaacaccataaaacattcttaaaggagtcccaacacatcctagagttgttggtcggaaagggggtgcggctcggcgagtataactcgaccgaactgatgcgcatgctacctcccggtccaacggttcgatggagtgtagaggatggagagggtagaccgttcgtcttagagacgaatcggatccgatagaccgatcgttggatcggatcggccagaccgatcatcagacggatcggatcggccagacggatcggacagaccgatcgtcggacgggtcggatgggacaggccgatcgtctgacggaacgggtcggacagaccgatcgtcggatgggatggatctaattgacgtattggccaatcgagaccaacatgaacattgagaacagttcgtattgtcgccggcttgaccatcggactgaacgtctctgtgaaatcaacaccggcttcctgtgattttccattagcaactaatcttgctttgtgacgagttatgctgccatctgcatcatatttatgtttaaacagccacatagatcttacaatattgaccttaggaggtctaagcactaaactccaagtcttagtcttaagcatagcatctatctcatcagtcatcgctggtgtccaatttggatcagaaaaagcatgaatgtgactttttgggagaggcgattttgtggtggtgagaagtgagatgacctgttttggttttcgaatcccagctattgcacgtgtcatcattgagtgacagggctgaatggaaataaattgtgtttgtggctgggttctttgagcaggaacactagtaggtgttggttttgagtaggaaatggagtttgaagaataggttgcaattgagaagaaggaacatcatcatcgagaaattgatactttgtgtctttttgatgtgtttcggttgccggaaaaatatcctcatcaaagtatacatgacgagatataatgatcttattagtttttagatcaagacatatgtagccacgatgttgtgatggatatccaagaaacaagcatggacttgatcttggagaaagtttatgaagattggaatgatttaagtttggaaaacaaaggcagtcgaatactctcaagtgatcatagcttggtttcttattaaaaagacgagtgtaggggatttggttttggatggcggaagagggaagaatgtttaataggtggacatcgacatggagagcttctacccaataacttggcgagagttgagcttgaaagagaagagctctaatcgcattgttaatggtgcgtatcattcgctcagactttccattttgttgagatgtgtgaggacaagaaaaacgaactgtaatttcatttgaatccaaataattcttgaactcatggttattatattttcctccattgtcgcattgacaggattttatttgggtattgaattgatttttgacataagccgtaaattgaagggatttttgaaccattaccaacgatgaccgagtgagtgatgttatgattaagattagagtgaagattacctgctgtgcccgagagatgtgcagtggcagccgaatccatgacccatggtgcaccattaggatcaaccaaagtctttatcgtgtaagcttgtgtgaagtcagtcgtcgactgaatttccgtcagatgggcttgttgaggatactggtgtatttgaggaaagacatatgggcctcggtatgagcctagttgagagttgggtccccagttcgcaaattgattgggccacagattaaatggtctgggccagaaatttgagtaagtctaattttgttgattggggtgaaactgattgttgttcttgtttcctctgaaatgattgtttcctctgtagttgttgaatttatgcggctgtataggcgaggttgttgatggggttgcagagacggtgagagcagtggatgataatgagttatccttgtgtgttgcggaagctcggtgttactttttgaggcgagtttcctccaattccaacattgacttagccgtctcaaaacttggaaacagctctttgtgtttgattacgttgacgatgtaatcatatttgtcattgagcccgttgaggaggtaagtgaccagatgtatctcgttgaccggtgcatcaacattggcgagcagatcagcaagcgatttgagtttttgacaataagcctgaatcgtttgttctccaatctcttgattacgcaattcattatctagttggatcgctcgagcctctttgttgttgcggaattagttttcgattcggatccaaacgtcacgtgcagtgcctccagtcttgaatgatgagcggaacagatctggagcaagagttccatagatccagagtttaacgagtccgtcgcgtttcagccaagaaccatcgttatctccactgggaaacatagtaccatcaaggtgtcctagaacatcgaacgtcagacagcgtgtctggaaaagctctctccaagcatcataattgtgatcattgagatcgagaattaagagtatgtgggctttgatatttgtaaccccaaacgctcgctctatcgctggaagttgagcagccattggagacttttgaagaagaaaaaagagatgaaagaaggaaagaaggaaaaaaggaaagaagaaagagaaatgagagaaaaggttaaggagcgatggtgctctgataccatgaaagttaatgaattcctcttgagaggatcgttgaattgacaaggctatataaagccaatgttgttacacaaaatcagggattaaaaaatcatatatacagaatatataaaacagattgtaacagaacgtccctatattctatcatggatgtgtactttaattttttttagtagtaaatgaatgaaggtgttaaaaaaaaaacccaactgggcatg

SEQ ID NO: 29406 - DNA, 3003 bp, Unknown
  misc_feature (1)..( 3003): 2750-1469P.txt file - cDNA_ID_3016813; gDNA_ID_2684115; Annot_ID_190770
tctgccaacagagacaaaaatctatcaaggaatgcaaaactggttacttataaatatttacacacccaaagatcatcaaaggacctcataataagtctttcacatgaagaacaattcatgccagggcaaccaaaagattttacataataactatatcaggcttgcagagaaaagtaacaggactgagcacaaaccacaccaatcttgaaatatactacgagtttaagaaaagtcttgtccttaaccaaatcctaaaaagactattagagacattgataaagacgtgcattaactaactctcacagcagaaagctcaatactagtataacaaaatttccaaatttccaaactatgtaagatcaagtttagtcctttcaagatccaaacacatcattgatctaaccaatacaaaaaaagtctcttcataagattgatccatcaaaactaaaatcagaaacaacattcaatgagacaaaatcgaaataacaccttgaaggcgtgacgagctttgcaacccataagctgaagagtactctgcaaaacaggacgcgtatacctaaacgaatcatctccattattatcatcatcatcaccttcttcacgcaccactatatacaacaccttcgtcgcctccgtcatcatctctatacaaaacaaaaacaaatctcacaaaattttcagagaaaattcaaacgatcgggaatgcagatcaatcggtaacataccggagaagagaaaaatcggagatcggagaagttagagagaaagagaaaaactgttggaaaaatttagggtttataatgaggatcgtgataagaagaagaagaataagaagagaggaaagatattttcgccattgttgttggtcactcgcctttcttcaacgcatcgctcgaagagagccttcacgacttcttaaaagataccttcttcttctctctctctctttctcacgtttctcttttacacagacccaaaatataaatgtttgaactcaaccaacattttacttttcttgacaaagacgtccctagattttgtttttagatcaaattggtccatcttaatttcgtgaaattagaatctaatttttggttgccaacttgtttagaagcaagagattaaatctaaatcaattttaataaataatacaacatagtaaattagaaaattagaggatgaaatctaaaattgaaaagataaagtgtgtgaatttaagagataataaagtagagggggtttttaataattttattttttttggttattttggtagggttttctttgggtcaagatttcagttattagaagtttcaccgactcatttgatcaggtctttgtcagcaatttaactatatgttacaagaaaagtagattcgatatctaaccataagtgtaataatctcaaatcgaatctaaccataagagtaattatctttaatatatatatatatataaacataagtgcatatatatatatttataaaaacttaaaaaactttagaaaaagttatatcttaaacccgaaagaaaaaaaagctatgaacttggttttggttatgttactagtgaatcttttttttccatggaatataatatatgcacttgcttatctaattgaggtggtaagaattttaaaatagaagaataggattttacttcgattgagagaagaagagtatgaagatgtaccttcacaactgttttgtttgcacaggttctatcgatttgcagagagatgggattggttttcttcttgtgatatgatgtaaaccgtatttatagcgtttaagattctgaaatatatttagttttggatttgtgtatcgtgcatcattaaattttgtattttaaactacacaaaatcaatatccaatattgaacatatgtttttttttttcacttgcttaaattcaaaatataatgataaaattgattaatcagtattgaaggtcttaccaacattatataaaataaattttaaaatagtcaataattataattatattaaaaaggttatttcaacttaaaataattatttattcattatatatatatatatatattgaaataaaatatttagttatacaaccaatgagttataacttataaattttaaatttatttataaacaaaaagttgtaatttaatttttcacaataatgtaatactagtttattttctcaccaatttgagtatatttcattccatacaaaatcatggcaaaataaagctctagtggaaactacaaaaacaattaatttagtaaatggaaagagaaaaaacaaaatctaaaacttaatcactatcacatgattcagattcaccgtgtggaccccaaataaacaagaatcaacaagtggtaaaagtgtaaatctggtgtgggaacaatggtaataaaaagttttcttctgtgaatgatttgtactttgtcgggaaagaatctctaaagggacaaagaaagtgggttccatcgttaaacaacaaaaattccaaacgttacatccacgaagttttaagccctctataattggtcaatatattttcttgttaatttcctattgaatttaaaaaatacattataagtatctaccaaaactaggataaaataaaacatcatgagaaaaaatcgtctaatcattatatattgttatatcatagtcataactcataacacatttgaatgctctatactggtcggatgatgagaaatagtctcatgaaaaagtctatagaaagaaaaatgatgaccggaactttaaatgttcaataggaatatagttatgtgaatcagatttcagtattgactaaatatcactatacatttattaatagttgtaaccgtttttggtaagtgaaatcttgaaagaattataacttgtatatatatacaaacaaaatctttaagtttttttgctcaaaccatcatctaaactagactataaaaagagacgaaacgcatgtataacttcaccatcaaaagcagaaagaagtagaaaaatg

SEQ ID NO: 29407 - DNA, 3000 bp, Unknown; identical to SEQ ID NO: 14408
  misc_feature (1)..( 3000): 2750-1469P.txt file - cDNA_ID_3016837; gDNA_ID_2684116; Annot_ID_190812

SEQ ID NO: 29408 - DNA, 3000 bp, Unknown; identical to SEQ ID NO: 14408
  misc_feature (1)..( 3000): 2750-1469P.txt file - cDNA_ID_3016837; gDNA_ID_2926275; Annot_ID_205287

SEQ ID NO: 29409 - DNA, 3003 bp, Unknown
  misc_feature (1)..( 3003): 2750-1469P.txt file - cDNA_ID_3016841; gDNA_ID_2684116; Annot_ID_190811
attaaatttggtacatgacaatgggagagattgagagtaattaaatgattaaaatttgatttattcctattaaatagtgtaatttgttttgattatttctgattttatctccggctcttttttgtgttgaatgtatctttaagaatatttgtttttgtgaccgaaaatatcatatatgtaacgaataattcgcaacaattaagtggcaaaattaaaccattttttaattgattagttagatatcccaataactaaactgataaagtaacaatttaggaaaatgattacctcttttgataagagataaatgagaggtaaaaatcattcaaaggcgttactgttgtcactcattgttaatgcttagtttgtctccaaatttgctggcgactaactattctcgtttagacaactcgagaacatagagatgaaaacgtgagtatatacaacagaactcaaacaaaatattactattatatagataccaactaatcttgagtttatattttacagacactttggaaattaaggtgaataaacgttttgcaaggctgtcacattctacgactaaaattagtgattcataagaaatgattggtatccaagtaaggaatattgatcattacattgcaattggaccctcctcgtggatcaagtttaaaccaactaacgatgaccatttcatatctcttttgagttattgtaatataatatatttatttatttcattacaacaatcaatttttattaacaaattatagtttcgaattttagatcagataaaagaaacaaagtgattgaggatccgcatgataaggattaaaaaatgcgacacgtgacgaaaaaagaaaaaatctttgaagaaatcgagaagagagacaaagaaacaaaagtggggatcccagaaggctctgatagatatgagcatgtggtctcagtcaaggccaagactcaaagctgagaccaacccacttctattatagatacatacaatatttgttttatatcttgtcatgtattgatgtatatctaagtagatttatcataattatcgtaccatgctaagtgctaacgaataacgatcgttcatgaatccaaataaaatcacgtcaggtgctgcgacatggcttcttcattcggtttgttactgtttttttttcctctctttttctttctatgatcatcataaatgttgtaaaactatgttaaaaaatcgattcatgtctttttgtgtatgatgaggaagttttaacatttctttaggtatcatatatagtttatctttttgcatactataatatagttaactattttgtgcaaattttataaatcataattttttaaagtttagaatctatattggtattttcgtcctatacgaaaacaagtacaaagaattaattatacactacaaaaaaacgacattaattaattcatatagttgtacaactaatactataatccatcggttcttttttgtttgattttaggaaaaaaacgatattaagaaaacatattaaatgtattattctttgtgatttacaattttcaataattctaaacgaatgatattcaataatttttattaatatttacaatttatcaattataattaacaagtattgcattaataacttaaaaaatcaattttttataaaaacaattattctagaaaatccaaaaaaaaaacatatggagtatatattagaaaaaaatcccatggctgataaataaataattgtatatatatatatatatatctcacgcatacatatataagatatgatatcattactctataagatataaataattttattctatattttgaatagtccattttcatatgcaatttgaaaatttataacattataaaaaagggtaataaaacaagtagtggatcggaccagagattttgaggcgcaatttccaaagcgatctgcatctattcttacctccatcttcaagcaaagcatcaacgcctatagattcccatgcaacgctattttctttataacatataataaaaatatttctgttgctttttattcgtttcactttcctgacattgtttttgtttattcttactttctattcatagaattaatgaatccttatcatatgatccgttataagtctctgctttcgaacttaggaaaattaaattcgcattttttttatcaatgacaataatcataatcactagctaggttaggtataacttataaggtctcgcacttccttgattttaaaataactttgtctttaccaaacaaaaataactgaaccgtaaataccaaaatattttggataacaaaaaatattttttaaaaatatatatttcaaaatattagttatttctaactaaaaatagttgaaaatatatataaacagtaaaaatatttaaaaataacaaaaaatattgaaaaaatgacaaaaatatccaaacataactgaaatatccgaaaatattcaaagcaaataaccgaatgaatactaaattttaaaaccaaaagaaccggagccgaaccaaaatcgaaccaaactttcaaaataatcgaataaatattaaactttagaaccgaaaaaatcgattaccgaatagatacaacctaaactgaatggataacagaacgtcgagaattatttttaatggtcaaatcagttgccaacaattttgaggcattaatactctcaattttgccaaaacaattttgatctatgaatctggaccgactctactctccaacccaattggtattttccatctacttaaaatatgggcttgtacggcccaaattattattttactcatatcgttttaacgtcattaatgattttctgaagaaacgtaaacatttgcactgtatgacgttttagagtgacaaaaacaacagatcaacaaatttcgattaccgtagacgacacgatgtttcacacccgactacgaatcacgacgacttatacaaaacagcaaaagcgtaaagacttgaacttaaaaccatg

SEQ ID NO: 29410 - DNA, 3003 bp, Unknown
  misc_feature (1)..( 3003): 2750-1469P.txt file - cDNA_ID_3016900; gDNA_ID_2684116; Annot_ID_190793
ccgatagggtcgttgattaacgggattagagccctccaacaactcaattttgtggtcatgttgagtccgaaatggaggcaattcagttggttcagcaaaaatatcagggaagtctttgacaagctcctctatctccgtatcatcaccctccgtctttgctactgcattcacagaacaactcaatccctgttccaacaactcttcttctgctggcacttcacgaacatacaacaaagcaatctgaacttgatcatcatccaactttcttaatttctgtgctttcacatctcggacagaaccttcacgaattccacgtaatagcaccttctggttattgtacttaaacttcatttccaactccttaaactcccatgaaatgcggcccaaagtttccaaccattgtactcccaacaccatatcaataccttgtagtggaattagtaaaatatcagactgaaatgttgtagtctgcagattccaagtgaacttagaaatcttgccatccacattaatttttctcccatctgcaacagaaactctagttaaacctgcatattcaatcgcacaaccaagtttagcagccacagcagagtcaataaaattgtgagttgaccctgaatcaatcaaaataaacacaggcttcttcccatatgttcccctgacccgcattgttcgataaccagcaactcctgaaactgcattaactgaaatctgaggttcctcttcattgtacaaaacttcctcagcatccttgtattcatcatcaacatcgatactaaaaagctgagttttcttatgaaccaaatagtgttccggtgtaaacttctcatcacaaaaataacaaagccccttagcacgcctatcactcatctcttgctgtgttaatttctttgtattttgaggtttaaaagacaccttgttgccataattctcacctttctgatccacgtcacgcgaagtcttagaaacacccgtagtaacccctgctttagattgccaatttgtagaaaaagttttcttaggatgagccttttcatacaaacgtcccaaacgcaaacaatcacgcactattctcggctgaaacatcttcacatgcatttgtgtatccaaacgtaaacccgccaaatacacacacaccaaataatcttcaaacaaattcactctcatcttaatattctcaaacttctgatgacattccacaattccatctgtctcttgcaattttttcagctctgccattggatcatcatcatcttcatcaaatctgtctttcaacaatttcacatattcaggccaatcaaacataacatccaaacccacaccagactgaataaacgtgtatggaagccattttaaccttcaaatcctcaggagtaaaatcaacaccaaaaaattcttcaaccttaaacagccattcattgattctgcttccatcaaacctgggaaaatcgattttgcctaatctagtaagacctccacaataaggatttggttcaagtcttaccggttcagctcgatactccctctgatgatcagatccaccggatcttgccatcgttgatgttgatgaccttggtaagctccgatctaacacctcatcctcatccataaccttcttcgctgtcgatctgctcatcgcacccatcatatcagcaatctgcttcaacatcgccttatgttgctcagcgaccaactcttccaacctcgacatgcgtgaggcaatcggatcttccctctcaacacctttccctttcaaatcctcttcctgcgatctcgtagtcaccatctttgccgagaaacgacacagctttgatacctttaatacagtaaagtcaccgatgctcaccggactcttcacttctccgatcaacgaacaaatatgtaacctcactccgatgttcctgaaacacgaaaatgataaagcgttaactctcgagacgagagaaacttagctcatgaattgtttttgggttttttagatttttacaaatgattctcgatgatgatggaaatgatctgctcatgactcatatagctcctaacggccttctcacatctgcccgttataagcttccacgcgtcacttccagatctttcttatttgccacttgattccacacgtgccaactcacacgtgcgatggttctgcaacaacaatacttgaaatcgacaaaattaaacggatctccaattgtataaattcgagaacgttactctccccaaacaaaccatcattggacatagacgagccacacgatctcaatctcacgctcatatttcacgtgattccacgccacctgctcacgccgttttcttctcagacaacaatggagttctattagtttcaactagttacatatatatagagttcaatcaatgttgttacaagtttacagtggctccatcgttgaaggcttaattacagctgcagggaatcgtcggttcgacactaggttgtgtccgattttcttcttaactttaatttttaaaacgacgtcgttttgaactgttaacggaaagttgactccgttatttttctgttaacggaaatttcacggcatgccttaaatgaccaagtcaacgaaacttagacattttttaagaagttaactcaaactttgaggtttaaatgacatttcgaaagttcatgcttttttcgtcccaaatttgaaagtttgcgcattttccgacatttttcccattattacgtaactataaattttagcatttttatatttgacattaataaattgaaaaatccagttaaatattataaacaatttagaaaaaagatcctttatacttgatcaatcatttgaaagcctaaatttttaacctgtttcgaatatgaaacctgtttcgagaattcaaaggttctcagggttagggaacttaagggcttccagtgcactggatttaatggcaaggcctttccttttgaagtttaacctttcaatctcatcccggaaataaaaagctagccgatgcataccctaatcgatg

SEQ ID NO: 29411 - DNA, 3003 bp, Unknown
  misc_feature (1)..( 3003): 2750-1469P.txt file - cDNA_ID_3016947; gDNA_ID_2684117; Annot_ID_190841
tgaattgatttgattgcagtttccatcagtttgagtcttttatcttgctcttcatacttcttactgaaatttgtcatcctcttgttcatggacttaaatccattctccatcaaattcttcatttcgtttacaacctcagtcaaaccttcatcacttggactagtcagagctgcagcagtctttcccttgccttttttttccactgcggcttttcttggagcttgtaccacagtagacggagcattattagccacaaagctttggtgtgctacatcttcattgaacaacggttcaaaacatatagtcctctcctcatcaactagacgtttcttccagccatcagctattagatcatcgacatcattcactccacactccttatccataattcttttcaaaagtaggttctcatcaggagttggagccaagatactctgaatgtcatgtgcatgataagaaagtccaattaatagaacatacatgatagaacatacatgatacatgatagataactaataaatatgttatcactaaccttagttgtaccgagtttgtcatacacatctgacattggaaaccctttcatagtgcttgatttaaacttcattttacacatccggggacactgaggatctgcggattcaatatcttcgcagaaatttttcctgagaactggaatcgcctcgaatgctaaatactacaaaaaaaaatacaagattattcaaaactaagttgtataactgctaataaaaacaaagttgtacacagtttactttcttaaaacaattaatagatgcataatgaaatgacaaacctacaaaggcataacaaaactaggaaacaacttttgtggaccaactactccattgcactttttcatcaaatagaaaatgtctctcacattttcttcaaatgcattttttccccacggaaatgttttgcacaactctagatcagccacaaccctaaggaagaacttctccaaatttggtgcatgttttcctgtcttaccctttccaacgattacataagaagtatagcacaactactctcagacgagcttcagaaggttttttcatagacaataactttttctccacatcaggatactgaattgttgctccgggtccaaacatctagccaacaaaagtggtacacccaagctgtccaagggtttgggataattgtggcagtataatcctaacatgagtgcaaatttttcgagagaataccggatcggtacgccattgacaataaaccatacttcctttcttatctaaacatgttgtacgaataaataacagccacatacccatcaccttatgatttggatccttatgcatgtggaagaagtgtttgaattgtgggtgctccaaaaaccacttcaactcagactcttcaagatgactctccaataatccgactgccttatgaagataacactttgctgtaatcttgaatggctttgtataatcactcggaccgaaatacattttaagaggttgaagagcttcggtttcctcatcagaatcctgcaatcaagatagagatataccttagaaagcaacatagataaattagaaatcaagatagatatatctagtttatacatagatataccttttagttttgaaaatttctaagttagaatcaaatatagatatacctagtttcaatatagatatacattttagtttcatataatttaaaggtagaaatcagcatagatatacctaatttaaaaatagatataccttttagtctctaaaatatctaagttatattcgaacatagatatacctagtttaaatatagatatactttttagtttcatataatttaaaagtagaaatcagcataaatatacctaatttatacatagatagattgtttagtctctaaaatatttaagttatattcgaacatagatatccctagtttttagtttcaaaaatttctaagttagattcaaaatagatatactaatttatgcattgatatactaatttatacatagatctactttttaaaatttctaagttataatctcaacaaagatatacctaattcatacatagttatacttttttagtttcagaattttgaaagttacaaaatcggcaaagttctactataatctgctaattgtgtaaagtttaaagttcataccgctctatcgtcgttagagattagatttgttgcttcagaatccacttcagcagccgacgctactactacttcgtcattgattgtctgtgaaactacctccgccgccaacggcacacctgcgttctttgttcgagccatttctccaaacctacaaacaaaatcatttggattagtactactcttcaatcaatttcgatcacaaaacccaatctgaaataactcggatccgattttaacttacccaatttcttagttttctacagatataccaagatcgacgaacagatctgtcgttgtcgttgacgagaattgagaattgttttactggatttagatttacagtgaagaaataagaaaaaaaaacagaaaagaaagagaagaaagagatcgtgaatcgattttaccgcagagaatttggaaaacctagtgttttactagggttttattggatatgacccaaatacaatgagcttggataattttggaatccatttatattggttgggtcgtaaataatcaatatttttaaggttttctatgtcatttacttcttttacggataaaagaaaatcatttttttttctttttttataatataagtatataagattactctccactaaaaaggagccctgaaaatttctttccactacattatccacattataaaaccacatatttaataattttttgaaaactgttatttttgcaattcaccctaataaaaataactttctgtgaaaaaaaaaaaaaacttgttaaaaaaaaaaaagtctgactaaacgtttgcttcttcttcttcacacaaaactgtagggaagaaaaggaataatg

SEQ ID NO: 29412 - DNA, 3003 bp, Unknown
  misc_feature (1)..( 3003): 2750-1469P.txt file - cDNA_ID_3016966; gDNA_ID_2684117; Annot_ID_190835
taaaatatccccttaaaaataaataaatgagaaaataaactctattggttatctttaatcatttttttcatattttcgtaatattcaacttatttactcttttttaatacatatttatttaaaaatatattactatattaatgaacgtatattgttattagttatatgtttttgttttgaaatatcattagtgttttatttatttatttttcaaaagaaaaaataaaataaattgagaaacagattttttgaagattatgttccataaagaattatgtacttttattttgaaacaaaatacaaagatgttgtaattaattttggaaggtgtttgattacacggtttgtgggatttgtttggatatgctatgtatacccttaatgatttcaattgtgattttgcatcttttgttaccttccaaacaaaatctggagattaatctatttaaaaaaataattattctactaatattaaaaaggaaatacatcttaaagatttgtagaatattgcattataataatataccctttatgaatatttcattgatttgtagtaataacagatgcaaaatcacaattgaaatggaatttggttccagaaaaatacctacaatgttattacttgtcatggtgagaacaatgttatcacttcccagtatataaaatattctccaataatattaatttaatttgaacttataattgtttaactgtcacagaaaaaacaatgatgtgtcatgtgtttatgcatacattgaaattcaacatatttacacatttactactaatgttggttctttgcttgagtctctgaatccacaaattcagcgactgaagaagtcatctgatttggtttcttgggagctttctcttcagggatgatgtctctctcaggttctttcctcttcgaacttacactctgagaacctgtatgcattgttcctagactcggtctcatttctatctgagaagagcctgtggctgcactaactgtaacccttttttttccactcctgagaaactcttcctcagcttttaatcgttccaccaacatacaaaccgttagaaactcctcttccatcaatctagtcacaaagccactccacgacgaaggaaacttggaaatgatggtactcacataaaacgtctcatcaagaaccataccagcacccacaatggaatctgcaatcttgataaactcttgaacttgctcaagaaccggtctctcttcaaccattttgaagtcaatgtactttctgacttgtaccatcttagaattggattcctcacgacggtaaacccatttcaactcttcccacagttccttagcatgcttgaatctcttcaagtactgacggtacagatcatcagacaatgatttcatcaaatgattatggcaaagataatcatctctcaaccaatcttgagagctaccactaccaataccaggataaggctcagagagaacataagccagcttcatttgcttcaaaaaaagctccatctctgatgcccatgaaagataactcctcccatcaaatcgccaagtctcgataagcgaaaaaccgtgagtgctactgcttctcgtatccaaagcctcacaagcatttccatttggtgttctgcagcaagatatgcggtccaatgaatataaaacaccaaaaggagaacatgaataaggtaacattcttacgtattctttaactggaaatgcttaatagcttcctcagtagcagagaaatttttcttgaacacagaccattggtgtgttgggaaacttattcctaacagagaacacaacatgaaagctttttcatcattcacaagagttgcttcagagtaaagataacaagtaagtgtgtgtgttcaaaaattgtacctctaaattttgcatctttttccttacgaacatgtttcttcccaatcaatagagaagttttgccttggtatttattaaccatcacatctttcgtctccgagaactattaaacatataaaaacagattccagaaaaatatctcacagaacaaatcgaaaatcaaaaccattcactagaatagaacatagagagtagagtaagcaaaagtcgtaaccttataaagaaagcgttcttcttcagcaacggaaacttttcttttatacgccggaggcactttctccggtacgggtgcttcaccgtggtctatgtcatgagatttaacttctctgagagtgtctttcactgtttcctcgtttttatctgtggtaattatctccgttgtttcgccagaatcgagcaacgatttctccatttttagagacgatttagacggtggatctccggtgaggagggttttggttttctgcgttgatttattgggagactacacatacatattgggatgaaagaccaaaaacgacgtcgtttactaatgcgaagacctgggcagatgtaccggacccatccgaaaattttggtaatttgggtattcttaaaaccgttcagaaacttgtttttgaaatcagtgaccggttcggtgatatgaggaggtgcaccaatcggttaccaaaatattctttaaattgtccaatttttgctataaatcgatggcaaaattgtttgaaatgttccgaaatattgaaaaatatgccgaaattattggaccaatcggaatttaaactgagcaaaccgtattaattattgttgtttcaattcagaacacttcagaaccgaaatatatcacttcagaactgaggaaaaccgtagttcaaattcggttaatttggttagattttttattaatcaaacaaaccgaaattccgaactgacccggaccgaagtaccgattgcaatgcctaataaagtaagatctaatgaaaaccggtttgcagataagaccaatttagccggttaaggttcattatttgattaacgttttttgttgttgattttctccaaaatcaatcaatcactaaaattagtcgttaaacaaaaagcttgcgaagaagaagacgaagaaaatg

SEQ ID NO: 29413 - DNA, 3000 bp, Unknown; identical to SEQ ID NO: 14418
  misc_feature (1)..( 3000): 2750-1469P.txt file - cDNA_ID_3016968; gDNA_ID_2684117; Annot_ID_190834

SEQ ID NO: 29414 - DNA, 3003 bp, Unknown
  misc_feature (1)..( 3003): 2750-1469P.txt file - cDNA_ID_3017015; gDNA_ID_2684110; Annot_ID_190604
tcaatcaatctcttttgagaattttatcactttaaactacacatcgctcatgatttcatcttcttgttttggcattttataggtgtgctggtgcaggacatttgcgagaagacatcgtttactacagtaaagagctgaacaaacttcctattacaaaagatgaaaaccgttcatacatcatggacatgggtgttaaagccttaaggttagttacttacaacttcaatccggttaaaacgatccaaccaaaccatgagtttcgtttcttcccatatccaaacaaataatatgattgttttgtatgagcaggcgctacttttacctgataacattcagatcatacctctatagcacgtcgccggaagaaatgaaattcttggattggatgaagtcacggccggaacttggacatctctgtcataacctcaggatagataaataaaagtgtgattttgggtttcagtgtccatacatatatgtataaatctaggcaaagttatgttgtttggtttatacagagcttttagtgtataaaaaattgtacagccttctcttctccttcgtctgctttgtagagagatctctgtttataggtttgtacctttatatgcattgcttaaaaccctccagctgattcagcaggttattctaatgaacaaggtttattttttcctttattaaaatttaaaaaccaattaataaaatttaaaatatatatatataacgacgcgatttttagactttcttgggagcaaacttagatttgattttttcgatttctttcgttccgatttgaaacgtcgtcgttaaaacgtgatccggaatcgccggagtggctgtgaatagcgtggcggcgatcgattgtgttcccggtaattgactgttgaacgcagagatcaccgacgccggtttcgctttgtcgttgtttttctggtaatgaatcaatcctctagggaagacgaacacttctcctttcttcaccgtcttagcgaagagcttgttcgccgtcgttatgaatccaacgtcaagctcgccttccaaaacgaagatcacttcggtggcgcgtggatgcgtgtgcggcgggtttaaacctccgggagcgtagtcgatacgcgcgagtgagactccgagcgtgttaagccctgcgatcttctctacgtttgctcccgtgacggctgacccgactgtgttgttaacgacggcgggttttccgattccggcgaagaaaaaatctgaagcggtgatgtttgattcgggtttacatgtgaaaccattcacttttatccctacataatccaaaaacgacgacatttcattactttaacaaatcattcaaagtagacagtaaatttaatttgaagatatatgtgtacctgaagtgcgatccgcaacgcagagatcttgaagtgtgtcaggatcgtaagcaagaacaatcacatttagagataacaaagtaaagaagaagccaaaacatctcgagtccatggttttgacttttgatgatgtactgtagaagaacaagtaactagatttgaagctctaatttgaaactgtgtgatatgtttttgtttcgatttggatcgttataaatatttgaatctgtttgaggagaaattatgcatagcttaactaacttaaacgcaaagcaaagcttgggagttggaggaaagatgtgatgtcgttttcttacacatgtacatatttaatctaacttttaagttttggttttcgttagctagaattcttggtttaaccgaaatatattccagatcagagatctatagatcaataataaaaagtttcagtttcaaattcttggtaaggagttggaaagttaattaaaaacttgagtgacaagcattttcttatcatgatgggctgggcctggtagataaacaaataggcccacttgtggtaatcatcgatagggtaaattaaatcgaggtgttaggttaaagcagatccgtgccttgtttgggccatggtgcggcccaagtgatgtttttcctggattgacaaagaaagttactcaattaccctacagttacatggttgtgaatgtgccttggcaaggggtagagtcgaaattagcacacgacaaccagtgaaagcaaaccagtaaatttcactcatccacaaccacagataaatctaactaaaaccctctcagctaccaaacaatctcttagcggatgagaaatatcaaagtactcttggcactcaaggaacccacccccatcagcaatacaatttccttatgtaagctttgaatggctttggcgaaaactcttagctgatgttccgtttacttcttctcccttacgcagtcggtgctcaacagaagctgttacaaactccaagagagacgaaagttgctgatgcatggtacagcaaattatgtgtgtttaaataatgtccaaagactgtagtagctttgtgtatgaaaacatgaacaattttgttggttcttggagtttgtggttttgatctattgagtgtgaaataatagacaaaactaatcttgctggtcttatgatgttgttcataaaaacatgattttgttctaggaatattaaatgccaaaatctgtaagcagttaaattttcagagaatgatatcaaaattttggaaaattaaaaattgtgtgctttagaaagaaaaaaaaaggctttctacagcaaataataaaaaaaggctttctacggcaattgtacttgatagtcatccgcaaccacaggtttaaccctaacccaattttttgttgtaacttaagagagaaagcatttggataaatgacttgggctgggcctaaaagaaattaaaaataggcctctagctgtcattatcattaggcgtaagttagcatgagatgctaaggataccaccaatccatagagttgctaacttaaaaaacaaggctcgaggcggttctcttatctgcaaaactaaagactgttgtctaaagcgaaccaacaaaaagtcttcatctttaatcattcaatg

SEQ ID NO: 29415 - DNA, 1355 bp, Unknown
  misc_feature (1)..( 1355): 2750-1469P.txt file - cDNA_ID_3017015; gDNA_ID_2684118; Annot_ID_190853
aagcttgggagttggaggaaagatgtgatgtcgttttcttacacatgtacatatttaatctaacttttaagttttggttttcgttagctagaattcttggtttaaccgaaatatattccagatcagagatctatagatcaataataaaaagtttcagtttcaaattcttggtaaggagttggaaagttaattaaaaacttgagtgacaagcattttcttatcatgatgggctgggcctggtagataaacaaataggcccacttgtggtaatcatcgatagggtaaattaaatcgaggtgttaggttaaagcagatccgtgccttgtttgggccatggtgcggcccaagtgatgtttttcctggattgacaaagaaagttactcaattaccctacagttacatggttgtgaatgtgccttggcaaggggtagagtcgaaattagcacacgacaaccagtgaaagcaaaccagtaaatttcactcatccacaaccacagataaatctaactaaaaccctctcagctaccaaacaatctcttagcggatgagaaatatcaaagtactcttggcactcaaggaacccacccccatcagcaatacaatttccttatgtaagctttgaatggctttggcgaaaactcttagctgatgttccgtttacttcttctcccttacgcagtcggtgctcaacagaagctgttacaaactccaagagagacgaaagttgctgatgcatggtacagcaaattatgtgtgtttaaataatgtccaaagactgtagtagctttgtgtatgaaaacatgaacaattttgttggttcttggagtttgtggttttgatctattgagtgtgaaataatagacaaaactaatcttgctggtcttatgatgttgttcataaaaacatgattttgttctaggaatattaaatgccaaaatctgtaagcagttaaattttcagagaatgatatcaaaattttggaaaattaaaaattgtgtgctttagaaagaaaaaaaaaggctttctacagcaaataataaaaaaaggctttctacggcaattgtacttgatagtcatccgcaaccacaggtttaaccctaacccaattttttgttgtaacttaagagagaaagcatttggataaatgacttgggctgggcctaaaagaaattaaaaataggcctctagctgtcattatcattaggcgtaagttagcatgagatgctaaggataccaccaatccatagagttgctaacttaaaaaacaaggctcgaggcggttctcttatctgcaaaactaaagactgttgtctaaagcgaaccaacaaaaagtcttcatctttaatcattcaatg

SEQ ID NO: 29416 - DNA, 3003 bp, Unknown; identical to SEQ ID NO: 29414
  misc_feature (1)..( 3003): 2750-1469P.txt file - cDNA_ID_3017015; gDNA_ID_2684110; Annot_ID_137153

SEQ ID NO: 29417 - DNA, 3003 bp, Unknown; identical to SEQ ID NO: 27082
  misc_feature (1)..( 3003): 2750-1469P.txt file - cDNA_ID_3017039; gDNA_ID_2684118; Annot_ID_190882

SEQ ID NO: 29418 - DNA, 3000 bp, Unknown; identical to SEQ ID NO: 14436
  misc_feature (1)..( 3000): 2750-1469P.txt file - cDNA_ID_3017047; gDNA_ID_2684118; Annot_ID_190879

SEQ ID NO: 29419 - DNA, 3000 bp, Unknown; identical to SEQ ID NO: 14434
  misc_feature (1)..( 3000): 2750-1469P.txt file - cDNA_ID_3017051; gDNA_ID_2684118; Annot_ID_190876

SEQ ID NO: 29420 - DNA, 3000 bp, Unknown; identical to SEQ ID NO: 14432
  misc_feature (1)..( 3000): 2750-1469P.txt file - cDNA_ID_3017058; gDNA_ID_2684118; Annot_ID_190871

SEQ ID NO: 29421 - DNA, 3000 bp, Unknown; identical to SEQ ID NO: 14428
  misc_feature (1)..( 3000): 2750-1469P.txt file - cDNA_ID_3017066; gDNA_ID_2684118; Annot_ID_190863

SEQ ID NO: 29422 - DNA, 3000 bp, Unknown; identical to SEQ ID NO: 14427
  misc_feature (1)..( 3000): 2750-1469P.txt file - cDNA_ID_3017070; gDNA_ID_2684118; Annot_ID_190862

SEQ ID NO: 29423 - DNA, 3000 bp, Unknown
  misc_feature (1)..( 3000): 2750-1469P.txt file - cDNA_ID_3017074; gDNA_ID_2684118; Annot_ID_190860
ttctagataaccaatatgttattacatgtatttggtcaagtattttctttgaataacgtataaaattctggaaagcgaacatagatagtaaaaacaagaaaaaaatagagtcaattctaagtaaattaaatcctatttgtgaaagtataaaaacaatactaaaagaaaattggagaattgagatttcaccatatgtacatagaaatgaaattcaaaagaaaaacagtgattctcagattttcaaggcactcatagttttttagtttcaagatttaatgataatgtctcgtccttttacaaatcattaagttgtaagagagttttgcttctttttgaaagaaaaaaaatactactcataatttactttatgtttatcataaattatgataactcgactttactgcaatgtgtttgcttgtcagtaaaaacatgggctggcttcaaatccggatgattgcatgtctcgtgactcttttgtagcctctcttgttggccaactcattccattttctcgttttaggctctttcttttttttagtcacaaagttgaccataccaacatgcaagaccaattattatatctctttttgacataaaccaattattatatcttcaaaattagaggtttttgaccaccactctgatatatttttggcttcgaaaccaaccaacaaaaaacatagcggtttaaaaattaaaaaaccgtctttatcataaaccaaaccataaaatgcagtgattcaccttctaatcttctgtttgacgtacaagtgataaatgacttcaaagctactcccgtttctttacgagtgatttcatttcatcataaagaaatatgtgttgctcttgttcttagaaaattatttctcccagtcctttacaataatgtagatttcttctgttagtatgataaatatatatatgattgaatgtatatatttaacatgttttacgaaaaaagtcagtgtatactatttatgggaaaagtatcactaacttcgaaatatagttgatatttgttagttttatgtctactttaatttaagtcatttaatcaaaaattataatgttgaggtccataaactttaaaagtcccaataatgtgtaattaagttttagaaagaatacttattggattttcatctatgactctatttagaaaagttgtgtctacagtgactagctgcaaaaaaaaggttatgtatagtatcgattgccccttaaaacggagtgaaaacatgttttcttgaatcaaatccaaagtttacaaaatagaggaagatttagatatggtctctaaagtctaaagtagtctaggactaggagggcaatcttgtgaggtattagtgatgttcttttcatgtatttaatatataaatgtaagtttgctgaagcttaatacattaatgaatatgaatgcatgaaaactcgataaagcaagatacgtgcgtgttactactatttgaggtttcgttcgtgccttttagaatagacctattgatactatattttatttcaataatttgggttagattacgcgctaaccccgtgattgatttgttttttttttgtctttaataataataattaccgaatcttaaaacatgataatgatacgtgtgggtgtgtgacattatgttctcttttaagattctatatgacgtcatttcccttccaaatgacatttgatttgcccttgtgccgatgcatagttttaggctctatctctttccttttttcgtgatgacaaggttaaagccttataacctcttggcccaataaatttgtatttgtatatgtaatatgttagatcaaaatgttttactgtgcaatgttattttacttggtttaatatttcaaacgacaatgttaccctgaaatagtataatagctagagatccctacttgtaaatatcaaaacattgaaaactatttttctgaatcatttggtgtaaccggctaagttatattattggtcggacaccaaatattatagaatagaaaaataaaataaaataaaaggatgcatgagtgagtcatttgttatggaagagtagtgaggacaagtgtctaatacactgcatacgggtacccccaaaaaaaaaaacacaaaggtacattgaatcacgtggctttcacgtgaacttcacgctctgctttttttacttcttccattgtttggtctactttttcctttcaagagaatgctgccaaacaccttgtaggtcctatcaatattttttgtgggcccagcccattccttattgttcttgtactgtgaatgttcttcccacaaccacgtgggctttttggcccgttctctctctctctcctccccaacacttttttttttgtcgtactatcggtttgtgaaacagagatttgttgtttcactgatgtttacaaaagatatttgtctatgttgtggcaatctgatattctgacggatgtctattattatatttttaagtcctttctatttgtattttatgtgatttcgtttttggaaacgacatcccttgcatttaaataatctttttataatttataaaggcacaataaagtatcaaaaaaaaaatctcaaagatgctaagattcgacttatataaacagtggtactgtacaacaggaaattcattgcacctgaaaaaataattaaaaacaggtgaaagagataataataccaaaaaaatgaaaaggaaagaaaagcgaaatataaaataagagcaaaagagtctgaagttgatcaacaaaagaaagattagctttcacttacttccactgaagaaataacttttggaacattcaacaagacaacaaaatatgacttccccatcatccaccttcagaccaaattaagttcttcaatcttgtttccctgtttcacacacatatatatatatatatatatatatatatatatatgtgtgtgtttgtgtgcagacgatgatgttcttaccaaccgattattgttgcaggttaagcgatcaagagtatatg

SEQ ID NO: 29424 - DNA, 3000 bp, Unknown
  misc_feature (1)..( 3000): 2750-1469P.txt file - cDNA_ID_3017126; gDNA_ID_2684119; Annot_ID_190910
aaatgattatgaaactaactcctatggcataatgcatcccgatgtcaacaaatcagatactctggaagaccgggaagattccaaaggtctaaggtatagaggagggtccttgaatgataaaaaggaagcatacatgcaatgtgaaagacagagactcctaaatgattatgaaactaactcctatggcatgatgcatccccatgtcaacaaatcagatactctggtagaccatgaagatggcagaggtcggaggtatagaggagtttccttgaatgataaaaaggaagcatacttgcaatgtgaaaggcagcgactcctaaacgatcatgaaactgactcttacgtcatgaggcatcccgatgtcaacaaatcagatattctggtagaccatgaagatgccagaggtcggaggtatggaggagtgtccttgaatgataaaaaggacgcatacttgcaatgtgaaaaccagcaactcctaaacgattatgaaactgactcttatgtcatgatgcctcctgatgtcaacagatcagatattctagtagaccatgaagatgcaagaggtctaaggtatagaggagtatccttaaatgatcgaaaggaagcatattttcaaagtgaaagccagcaactcctaaaagatcatgaaactaactcttttggcatgatgcatcccagtctcaataaatcagatattcttgtaaacggggaagaagccagagctcttgagcgtagaagaggatccttcgatgatggagaggaatcatacatggattataaaaggggggatgcatatctgcattacgaaagccaacaacttaagaaagatcatgactatggcattgatgacaggatatatcgtgatgtcaactcgtcagatattatagtagaccatggagatgccaaggcgctagagcttaggagagtagccttcattgatagaaatgaagcgtatttggataatgaaagcaaggatgtttatcagcattacaataaacaacaactgaagtactacgactctggcattgatgagaggatgtatcctgctgtcaccaaagcagagattgtggaccgaggaggtgctagagctctagagcgtaaaggaatgtcctcgaatgacggaagggaagcctatttgccctatgaaagccagcaactcctaagagatcatgaaattgattcgtatggggtgatgcatcctgatgtcagtagatcatcagctggcaagcaagatgaggaagctcttcgaggcaggagatatctttttgatgaccgagatcaagtctacttggatgatgagcgtttgcaacgacgtaatggtggtgatgttaaagtttatgccaatatgagatatcaagatggtagacaagaggtttatcattcgaatgattcaattttgcgtacaagagatgattatggtcttagagacaacgcaagtgaggttatgcatgagaatatgccttatgattacaactacagggatgctaagcaatcaagaatgtcttatgagaaggcagatagtaaaaggttccgtgaacatgaagtagcatatgattacagagacaagctagggaactatgcagtggatggaggaataagcagagaacaattccgatactcagctgatgaaaggaattctggtaatgttgatcacacatcaactcgacgccgtcgattatctgcaaaggagcggttaggtgggcgtgttgaagaagattcacgtgttcatgtgaaacatagactgcatcaggttagaaacccaaacctaaaaggtaagtcccataagaggtacctctcctgaggtcatcatttctctcaacattgttgattcctccaaacaagattgagagagaaaagctcctaggttttcaaaggatgggtgtgaaaacgaaggatcctaaagttgtaatctcggctcttttttggtctgaaaaaggttagaaacagattcaaggattgaagttttttggcaatggaggatattatcttggttagtagatatgctttcttttggcgttgaacttgactttaaaatgttgagatttttgtctgtcttttagattgtttggtcggtggtttgtatcgacctatcaatcaagtagacagtggttacgagacgttggtcttttttggtctctggtagtgacattgacatcggagatcaacaagtaaataactcaacaagtttatataatctaacaacttcttactattataatctcgaaattggttttctttctcattttgattgtgatcattccttggtcgaatttgattcagtttacatgttttgaaattgaagatgtatactaaaccagacaagagaaagaagaagatataactaaatcgattgatttatatacacagtatcaaattcaatttcgattcggttcaaatgatggaaagctaccggtctggtattataaaaccatgagtcaaaaccgctttttatcaaatacactttaaatgacgtcatctgtcatgtcatcagaacactaaaacgacatcgtttcacttttgactctccccttgttcttctcttctctcttcttcttttcgcttcgttgctgctctcttctcggctccgccggagaatcgtgaaatctctgcgacttcatcaatgaagaaatcgtctcatctctctactgaatctaagcagacctgaaatatctctgtataatctttctttaagattgatttcgtacgatcttcgtgtcttttcttctttaagagatgcgttccaaggacaaaatctcttacttttatgatggtatattcatttctttcccttttcttctttatttatggtaaagaaactccaaaatccttgagattgatgtaactcttgagcaagttttatccacttgaaccgcactagtttttgtctttattgctcaatcgatgcatcgaaaggtgaaatctttcatatctatagtctagaataagtaaagggttacgattagtttggaaatactccagaattgagtagggtttttgatg

SEQ ID NO: 29425 - DNA, 3003 bp, Unknown
  misc_feature (1)..( 3003): 2750-1469P.txt file - cDNA_ID_3017133; gDNA_ID_2684119; Annot_ID_190908
aaaaaagaaaccctacctcgtcgcagcccccaataaatacctcagcagaaggaaaacaactcttttcagttccattgcttatcattttctctgtttctttattcatttgtgttttcgttttacattctttctaatgttttttatttaacatcgagtcttatgttgctcgatatatatatatccatctgattgcaaatgatgagttaaatcaccattgataaaagaagctcaattgagcagtgttggaaatctaaaacttccatgactctgatgcaaattttgatcaagaaaaatcatatccttgatcttttttttctgttctttctcagattttgttaataatcactgaattttgcttttcaaatgtatttttctgtttaatcttaataattctctgcgtatttctcactagcgtttttaaatctattttttctattaatctttagtgttttttactaacaaggctgcctaaaaataaaattgaatttgatcaagtgcaaattgtactgtacaatatgtaacgaatttgatcactatataagtcacaatgatgagaaagtgaaccaaaaagcttcattcatatacaccaagacgaaaacatgaagaagatggaatcaatcagaagcggttttggtgccccaatagccgttaaaatgttgatattattacaaatctcataactaaacaaaaaaattaaccaacaatttctaagaatcgatgttttacgacgcatcgttatcgttgtctccatcgaaatattcatcatccctttggatctgcttatcccgtgaacgctctgaaacattccatatataacattagtcactaagaaaacaaagggactaaagtagagccttgaaggtggttatcgatacttacgatccacacgtacatccgggttttgttcgtcttcatcaaaatccggtatgtagaaatccggtggaacctaagaaattcaagtaaaaaaactgatcagtgtaagattgataaaagcatcaatgtgtcctatgatgatctgagtttacctcctgcatctgtacgcttggagcgtgttgaatgtatcgcaaattctccaaaatctgcactttgatcgaactgatgtacgatttggtattaagattctcctgttttcatttcaaacacacaaaatgattctcaatctctctttagattttgttaaagcaatgaggaactataagttacataagagctccttacaatgtgaccacccggtatcttcaaagaaaaatccggcgcaaaatactttatgtagtcgttttcaggaatctctgcagaaacaattaacccctgagccccaaaacattaaactttctctgacaaaatattgaaacaaacttttactaaccattaggaagttctgtatccaaaagaatgccagtctcaacggtccaacaacgagctacattctcctttgtgtatcctccacctcctgtaacctaaacaacaatcggaaaaaaactgacttattcgtagagaaattaaacacattcagcatgtcctgtgaaaagcatagagaaagccatttcaaaacccaattcgcaaagaaattagcaaacgggagattgaaagagagaaagagattttgattacaagaagaaaaagcaccatcaatagagagattaaagcatcctagtcgataatatgagtttgaatgtttgtagaggatatattaaaggcttataatgtgtggaaagccagatgcagataagaaggtaccgttagtgtttttttggtttttgctggactttggaactctttttaggagatttttcagagcattttcattgaatttttaggtctagctaatgtgagtatgaatgtttgatgtttgcagaggatatattgaaggcttataatgtgtggaaagcgagagggaatttcccgcccgatgcagataagaaggtaccgttgttgtttgttgttgtttgctggactttggaactctttttagaacactttcattgagttttcaggttaagcttatgtgttcgtattgcaagaaacacaatgcaagtttgttcctgatccatatgatggtggagctcaaggttttgagaaggtaattaccattagagactaagccagttgtggattagtaactttttggtttaggcagatgctacctataaaatttcagctatgttgtcttttcaaaatggttgatttggtttataagactttactatggcattagcataccattgttgtcactcccaaattgccttccgttcgagaattttgcaagggggaatgcttatatttcctgtttgatctattttgttaggacaaaagtcacttggaaagttgaatcttgatctgttacttgtctagttgtttctttcataggtactggacttgctagaagatgcttgtgagtctttgctggacagtattataacagaaaaatgatgtgaagcttgaaacttgctgatataaatcttgttaaactgaactctttacacgattgaatgatatgaactctttacaagattgaatgatattaactcttttgttttatcattattattattaggagagaaatagaaagaaaaaaatatatattgtgtggacgtaactttgtttgagacagtgaatggtggagcatagggacagtaattttgtcgtttgcaatattttccacaaaatctcactatattttccaggaaacatccatggagtttagagtcgtcaacgatctatatcttcagtcacacaaatcgtttcaactacaaaaattacactaaacccgtgtgattcttcaactctctagagatttctcatcctttcatgtatcggtgagattttccaactatttttaagttttgcttaaggttttatcactgtggaatcgaattgattggactggctcttgatgattatgctgatattgatgctttgattagtgttttgagctcatttcttgattatgtgttcttgattttatattaatttcttgattcatcgataatcaaagttctcatg

SEQ ID NO: 29426 - DNA, 3000 bp, Unknown
  misc_feature (1)..( 3000): 2750-1469P.txt file - cDNA_ID_3017137; gDNA_ID_2684119; Annot_ID_190907
taatcctgagtcccaaataaatcgaaagttatccctataaaacgcctactatcctgaaataaagccaaaagaaatataagtaatgatggtttgttatcaaataaactcaattaacagggggcgatgcaatggcaaaacttactattgtatcgtcactaagtacttcacatatatccctttcaccaaccaaaagctgacgtttcgtaaagccatgataaacgaattgcttacgagaagtttctcttccgaattgtctgagcaaagtatgcatatttattgtgtctccatataaggaattctcatcaatggatatgagagatttctgagctaatacgtgaagaccttgtttcacatccaagaacttgtttgcaagaacctcttccactttggttgttgattcgtagttaaaaaggcaggctatataaagaaggagatatttatcttcgtcacataagccatcgtaactgaactgtataatgctcccgatatttccgtcgaggctagtttttaaccttggtagtgttctttcccactctggcttggacttcccccgcaaagcagagcctagaaccttcaatcccaaagggagttcaccagctaaagccataacttcccatgcaatctcatcgaaaccttcatgtggttgtttctgaccaaaggcattcatacagaagatttgaaaagcctcgtcatttgatggatatttcactttgtaaacatgatttatcccatgagccttcaaaactcctagatcttctgttgtgataataatccgacttccaggaccaaaccatcgagtttctttcgccaaggcatctagttgtcctaattgatccacttcatcgagaacaagaaacactttcttgtctctcaaccgttcttgagccactcctaaatgagaaatcatgatatctttatgattgatcatctgggacaacatttggttttgtagttgcaattgtgcactgtactcatcgaaacaaggtcttggatagattcctctgatattcacaatgatggcactaagttggaatctgtcggagacttgattaaacagaaatctggcgatagttgtcttaccaatcccaggcggtccccaaatcccgatcatccttacttcatccaaatctaggcgcaacaattgttccagcatatccatatgagctctcatccctactaacccgtcgaaatctcttgatggtgtgaaactatttaacatgtttgaaacatcagtggctattttctcaatcatgtctgcttcattcctcctgacattagaggatagatatcaaatcaatatacaaccgttatgacaaaatggtcatgaagatctgaacgaatacactttaacaagtaaatcttaattatggagagtagaaatcaagaggacaaaccagttgcgagaatgttctccggcgattgtggccacatcctccaaagcttttctccatctctcaacatactcttttgttttacctttacatgtttttgtgaaggcttttccaaattcaccggtctgtttctttatgtcagttggatccacttcatagaaaatagtcatgactatctgacccaacaattccctacacttcatgatttctgctaattcatcaaggcaccaagatgaagaagcatagttctttgagagcaagacgatcgcgatctttgatcctttgatagcttctttgagctcatgaccgatcgacttactcctctctatattattatcaataaatgggtcaattccctttcttctgaacgattcgaggatgtgactaagaatggtttttcgaacatctgccccgtggaagctcgggaagacgtggtgtttccagattcgagacactgaagttggaggagatggaagagataaagcagaagatttagtatatttgttgtcttgttggaatctgaattttgtaaaagctgcggctgccactgaaccaaggaaaataagaataatttattagtaaaaagtgaatcaagatttaagatggatgaaggattaacaaagaggaagaggcctctgtgtgagtgtcatggatacagaccgttgacacataaactccatggatgtttccaagatgactcatcctgaatgaatctgcaattctcagcatcgtttgttgagcatatctttcgtcttttacgagattcggaatcaacatcctgactcgttgctttcctcttggaacagcccaagctcattacagaacccatgagaactttgattatcgatgaatcaagaaattaatataaaatcaagaacacataatcaagaaatgagctcaaaacactaatcaaagcatcaatatcagcataatcatcaagagccagtccaatcaattcgattccacagtgataaaaccttaagcaaaacttaaaaatagttggaaaatctcaccgatacatgaaaggatgagaaatctctagagagttgaagaatcacacgggtttagtgtaatttttgtagttgaaacgatttgtgtgactgaagatatagatcgttgacgactctaaactccatggatgtttcctggaaaatatagtgagattttgtggaaaatattgcaaacgacaaaattactgtccctatgctccaccattcactgtctcaaacaaagttacgtccacacaatatatatttttttctttctatttctctcctaataataataatgataaaacaaaagagttaatatcattcaatcttgtaaagagttcatatcattcaatcgtgtaaagagttcagtttaacaagatttatatcagcaagtttcaagcttcacatcatttttctgttataatactgtccagcaaagactcacaagcatcttctagcaagtccagtacctatgaaagaaacaactagacaagtaacagatcaagattcaactttccaagtgacttttgtcctaacaaaatagatcaaacaggaaatataagcattcccccttgcaaaattctcgaacggaaggcaatttgggagtgacaacaatg

SEQ ID NO: 29427 - DNA, 3003 bp, Unknown
  misc_feature (1)..( 3003): 2750-1469P.txt file - cDNA_ID_3017155; gDNA_ID_2684119; Annot_ID_190901
ttctcacaattaaaaaaaaaaaataataaaaatgaaggaaaaagagtgtagaaagtttctcacttgagaaactctgagatactctttacaacccatcatgataattctcttctcattattggttcaactttttaacaaaaatatttttttaatcaaaaaatcaaattataatataatattaattttttgtttgtttgagaaactttgtgggtttctcatggataaaaaggcccttaacttgtcatagaagttacaacacaacatgaaagttaaacatcgccggccaaaacaaaaatatttctgtgaatttacacaaaattatttgcattaccgaccataatgttctcctcagtaccttcaacacaatacaacaatacattaacaaaattggtcttctagcattagcctcgtctctaaaatctaacatcttcttctactcctaatccaacaattgtttatgtatattcccaattatacccctctattactttgcttattacggaaaaggagttcaaagagcagaagaagaaaactcgtatatcccaaatctccaacttttcaggggaatgatgatgtactgtcccaacctcacggcttctctaacaatcccttcatatttaccattttgccactacactagacaatttcgtccttctcatttccgatcatctgataaaaacccgaatctcgtttctatcatccgagcaaaacccagaatttctcattcgcttaggtgctttgtatcatcttcaatggcgactcctcctccgacgcagagcagcgaaaccaaaccttactctgttctttttgtctgtctcggaaacatttgtcgcagcccagcggctgaaggtgtctttagagatatcgtgaagaagagaggtctcgattccaaattcaacattgattccgctggaacaattgattatcacgaggtatgataattagttccaaaacaattaatctaattttagggtttatgagagatgcttgattcatggttgatttgaaatattggtgaatgatggttttgtatgtagaaaggtttggttttggttttaggtttttttggtggatgtaatttggtaggaatacagagttatagagactttgaaattcatgtttctgaatcaattttgatgtgaaattgctcttcttactagggaagagcaaaaacagtaatctatttttatggtgattgatgctttgattggaacaattaggcaatggtgctttcagattttggtggatgtaatgtggttgtaaattaggagcagtggagactttggaatttatgtttctgatttgtgaaaatgttggttttttaaaaggggaatatggcggatccaagaatgagaagtgctgcgaaacgtcgcgggattgagataacatcactatccagaccgatcaaggcatctgatttcagagaatttgatctcattcttgcaatggatgaccagaacaaaggtagctgatagagtaatttattcaacctttgtagggtctgatcgatttctatgcaaatgggattcaacataggatagagacttttgcaagttgggatctgattagagttatatatgtagaattgaaataagtatgagtttgaatgtttgatgtttgcagaggatatattgaaggcttataatgtgtggaaagccagagggaatttcccgcccgatgcagataagaaggtaccgttggtgtgtgtttgctggactttggaactctatttagttgatagattttcgttgaattttcaggttaagctaatgtgttcttattgcaagaaacacaatgacaagtttgttcctgatccatattatggtggagcccaaggttttgagaaggtaattaccattagactctaaagaagctgaatgcagatatttaatttggttcataccattagaggttgtctatcaaaatggttgagtcagtctataagactttaaaatggcattaccagtgtcactcccaagtaacttttccattcccgaattttagtgttttatgtggacaaaactcacttggaaacatgaatcttgatctcttacttgttctttcacaggtactggacttgcttgaagatgcttgtgagtctttgctggatagtatcactgcgcaaagttgatgatactacaagtacaaagtcccaatcctagaacctttgttgtttttgcacatagaactgaaaagttctcttattatatttaagtgtcatcagtgatgacaatagagtgagaactgatgtgaagcttggatcttgatcttgttggtgttttccttgaaaaaccctttgttaaatgatctactgatggatcattattattgagattgatagcttcagtgatgtcaatagtttgtgaggaatgatcttcctgattcttaagaatcatagagagtggcactctttacacgcttgaataatacgaattcttttgttcgatcattattattaggaaagaaatagatttaaaaaaaaaagaatgtgtggacgtgaagtgttgttgtttgagatgataacagaatattttctcttatcattatgtggcttccgagaaattaagtgaatggtggtggagcatatggacaatgattttgtcgtttgcaatattttccacgaaatctcactatattttccatgaaacatcaatggagtttttctgtgccaatagactcgtcaacggtctatatcctcattcacacaaattgtttgaactaccaaaattccattaaacccgtgtgattcttcaactctctggagatttctcatcgttttatgcatcggtgagattttcatttttttactcctcactgtctgaactaagttccaactatttttaagttttgcttaaggttttatcactgtggatttgaattgatttgatgataatgctttatttgttttcgattagtgttttgagcccatttcttgattatgtgttcttgatggtgggaattaatggttgcagcagtgaatcatcaataatctaagttctcatg

SEQ ID NO: 29428 - DNA, 3003 bp, Unknown
  misc_feature (1)..( 3003): 2750-1469P.txt file - cDNA_ID_3017159; gDNA_ID_2684119; Annot_ID_190900
ttaaaaactatatattataaataaatcgccactttatagttttaattaataactaaattacactttctagtcccttttcatgtggcgtatatagacttttctagtctatctaaaaatacactacactatcgtgcacatcaatcaataaaaacatatattccaataacaaatctggaaaaattcatttcaattatataagttaaggttactgaaaactgccaaaaattcagaagaaattacggaaactaaatctcgttactataattacgatgtaattaccgttaaaaaggcaataaatctagtactagtgattaattaacggtgccattaaattcagttatgtgtgttttaagtgttaactacgagacaattcgccagctggcgagtcccacttccctgatttcatcaggcttttatatttattcactgcttcatagtaataattacttcccaaaagatttttttttgaattagaaactgaatatttaaaaaaataaataacttaacggaaactgttacctgacggcggattcatggaaacgtttatgagtctgtttttgacggagaacgtgaaggtcaccgccgggacaaaactccgttaataaacagagccatttcggagaatcaatggcggcgtaaagcgtcggaagaaacggatgatcaagagattcgagaatctctctctccgtcttagctctaccttctttgcttctgctcgcgagctcctttttatccataactttcgctgctaacagaggtaatttaacggcggtggtttctgttacggcggttagggatttgaattcggctaagaaaacagagccgatgtcgccggaaccgagacggagacggaatctgagatcggagagtgagagagatgatcggagtgaaggagggagtttcgaagatgagaatgaaccgtgagctgatggtgctggtgttaaagctgcggcggaggaggaagagcgagaaccggagcttgtgcttcgattcacggtggttccggctgatgtaaagcttacactctgtaagtcgtcggttaattcgtcaatccatggctccattttccgatctactgagagtgacgacgagagagagaagaagaagaagaagaagagagggagagaaagagagaagtaactgtgagattttgcctttttggggaagagaaaaaatagaatcaaaagaagatggcaaagttgtaatttaagggttgagatatggtgcgtttcgtaatttaaggtaatagttcgattgttaaggagatgatgatacagtattctataattgagatgttttatttatgtaaatagacaataattagggaattatttgagagggatttttgatttctctatgaatttttaagatctttggtataggatttgtttcaaaagagagaaacaaagagacatataaatctaggcccctacagaattaagataatgacatatacatatcttgtgtttgttctatttcagttgtgattactagtattttcttcgtatggtacaattataaataaatatctaatcactgtcttttgaatattatgtcaccaagtacaaggatggtgttattggtgaacaatttgtatcgtgaactcaaatccctattgcacgaacctcaggttagtggtcgactggtcgctcggcctcgttttcatttcctttgaaaccattatggtttagatattggtttaactcaattgcatatacctaaccggtttgactcgggtgaatatgttagataaggaaagtgtatataacccttgtattttctcattaatgaaatcagcagaaacattttaggttggataaggaaagtgtctataaccatatcattgaaagacaaattgcttgggtcgaaaccggttttgttaagtccggccctggatatattaccaatttgtaacactcgtcttaaaccggatattttctagtcagaccgaaaaaatacaagtgaaagaggttcaaataaattgataacttagaacattcataacaatgaccaaaacaaatcttttcaatgaggtttgtaaattgtaactatatatccgaattaaaaaataatcgtcataagtactaactgtttttcggagaatgaaatgggctatctgttgaaaaccttaggcctgagtttaaagaccatctgtacaattgggccaataagtaacgcattatccatcaacaaagtactgaaacatgagacacttagaccatctccatcgggggtttcttgtaagaatttctcacaattaaaaaaaaaaaataataaaaatgaaggaaaaagagtgtagaaagtttctcacttgagaaactctgagatactctttacaacccatcatgataattctcttctcattattggttcaactttttaacaaaaatatttttttaatcaaaaaatcaaattataatataatattaattttttgtttgtttgagaaactttgtgggtttctcatggataaaaaggcccttaacttgtcatagaagttacaacacaacatgaaagttaaacatcgccggccaaaacaaaaatatttctgtgaatttacacaaaattatttgcattaccgaccataatgttctcctcagtaccttcaacacaatacaacaatacattaacaaaattggtcttctagcattagcctcgtctctaaaatctaacatcttcttctactcctaatccaacaattgtttatgtatattcccaattatacccctctattactttgcttattacggaaaaggagttcaaagagcagaagaagaaaactcgtatatcccaaatctccaacttttcaggggaatgatgatgtactgtcccaacctcacggcttctctaacaatcccttcatatttaccattttgccactacactagacaatttcgtccttctcatttccgatcatctgataaaaacccgaatctcgtttctatcatccgagcaaaacccagaatttctcattcgcttaggtgctttgtatcatcttcaatg

SEQ ID NO: 29429 - DNA, 3000 bp, Unknown
  misc_feature (1)..( 3000): 2750-1469P.txt file - cDNA_ID_3017166; gDNA_ID_2684119; Annot_ID_190898
aataaattactctatcagctacctttgttctggtcatccattgcaagaatgagatcaaattctctgaaatcagatgccttgatcggtctggatagtgatgttatctcaatcccgcgacgtttcgcagcacttctcattcttggatccgccatattccccttttaaaaaaccaacattttcacaaatcagaaacataaattccaaagtctccactgctcctaatttacaaccacattacatccaccaaaatctgaaagcaccattgcctaattgttccaatcaaagcatcaatcaccataaaaatagattactgtttttgctcttccctagtaagaagagcaatttcacatcaaaattgattcagaaacatgaatttcaaagtctctataactctgtattcctaccaaattacatccaccaaaaaaacctaaaaccaaaaccaaacctttctacatacaaaaccatcattcaccaatatttcaaatcaaccatgaatcaagcatctctcataaaccctaaaattagattaattgttttggaactaattatcatacctcgtgataatcaattgttccagcggaatcaatgttgaatttggaatcgagacctctcttcttcacgatatctctaaagacaccttcagccgctgggctgcgacaaatgtttccgagacagacaaaaagaacagagtaaggtttggtttcgctgctctgcgtcggaggaggagtcgccattgaagatgatacaaagcacctaagcgaatgagaaattctgggttttgctcggatgatagaaacgagattcgggtttttatcagatgatcggaaatgagaaggacgaaattgtctagtgtagtggcaaaatggtaaatatgaagggattgttagagaagccgtgaggttgggacagtacatcatcattcccctgaaaagttggagatttgggatatacgagttttcttcttctgctctttgaactccttttccgtaataagcaaagtaatagaggggtataattgggaatatacataaacaattgttggattaggagtagaagaagatgttagattttagagacgaggctaatgctagaagaccaattttgttaatgtattgttgtattgtgttgaaggtactgaggagaacattatggtcggtaatgcaaataattttgtgtaaattcacagaaatatttttgttttggccggcgatgtttaactttcatgttgtgttgtaacttctatgacaagttaagggcctttttatccatgagaaacccacaaagtttctcaaacaaacaaaaaattaatattatattataatttgattttttgattaaaaaaatatttttgttaaaaagttgaaccaataatgagaagagaattatcatgatgggttgtaaagagtatctcagagtttctcaagtgagaaactttctacactctttttccttcatttttattattttttttttttaattgtgagaaattcttacaagaaacccccgatggagatggtctaagtgtctcatgtttcagtactttgttgatggataatgcgttacttattggcccaattgtacagatggtctttaaactcaggcctaaggttttcaacagatagcccatttcattctccgaaaaacagttagtacttatgacgattattttttaattcggatatatagttacaatttacaaacctcattgaaaagatttgttttggtcattgttatgaatgttctaagttatcaatttatttgaacctctttcacttgtattttttcggtctgactagaaaatatccggtttaagacgagtgttacaaattggtaatatatccagggccggacttaacaaaaccggtttcgacccaagcaatttgtctttcaatgatatggttatagacactttccttatccaacctaaaatgtttctgctgatttcattaatgagaaaatacaagggttatatacactttccttatctaacatattcacccgagtcaaaccggttaggtatatgcaattgagttaaaccaatatctaaaccataatggtttcaaaggaaatgaaaacgaggccgagcgaccagtcgaccactaacctgaggttcgtgcaatagggatttgagttcacgatacaaattgttcaccaataacaccatccttgtacttggtgacataatattcaaaagacagtgattagatatttatttataattgtaccatacgaagaaaatactagtaatcacaactgaaatagaacaaacacaagatatgtatatgtcattatcttaattctgtaggggcctagatttatatgtctctttgtttctctcttttgaaacaaatcctataccaaagatcttaaaaattcatagagaaatcaaaaatccctctcaaataattccctaattattgtctatttacataaataaaacatctcaattatagaatactgtatcatcatctccttaacaatcgaactattaccttaaattacgaaacgcaccatatctcaacccttaaattacaactttgccatcttcttttgattctattttttctcttccccaaaaaggcaaaatctcacagttacttctctctttctctccctctcttcttcttcttcttcttctctctctcgtcgtcactctcagtagatcggaaaatggagccatggattgacgaattaaccgacgacttacagagtgtaagctttacatcagccggaaccaccgtgaatcgaagcacaagctccggttctcgctcttcctcctccgccgcagctttaacaccagcaccatcagctcacggttcattctcatcttcgaaactccctccttcactccgatcatctctctcactctccgatctcagattccgtctccgtctcggttccggcgacatcggctctgttttcttagccgaattcaaatccctaaccgccgtaacagaaaccaccgccgttaaattacctctgttagcagcgaaagttatg

SEQ ID NO: 29430 - DNA, 880 bp, Unknown; identical to SEQ ID NO: 14462
  misc_feature (1)..( 880): 2750-1469P.txt file - cDNA_ID_3017198; gDNA_ID_2684120; Annot_ID_190949

SEQ ID NO: 29431 - DNA, 3000 bp, Unknown; identical to SEQ ID NO: 14463
  misc_feature (1)..( 3000): 2750-1469P.txt file - cDNA_ID_3017202; gDNA_ID_2684120; Annot_ID_190948

SEQ ID NO: 29432 - DNA, 3003 bp, Unknown
  misc_feature (1)..( 3003): 2750-1469P.txt file - cDNA_ID_3017205; gDNA_ID_2684120; Annot_ID_190947
acaaatcttaatacgtttttttattttgctggctctgaggcaacaaactttttttacaattacttctttgtcatccccacttaatctggccttaccgtttttatttggcttcccgggttatgcataagaagatgtcaagtaggtgagaggttggtgtgcgtagggaatttgcaattaacacgtgtttattttaactctcttcaattttaaatggtgagagtagacgtagcaaactagtctaatcgcgaactaaaccactttatattttttgaacgaaatagaaattgttgtagttttctataaattattttttaataatctccaaatagagcaacgtatccacttatatatataaccttatctctttttttattggagaaaaaaaaagtacactgtgataatttgaactcatatatatacacactagttgtgtgtgcttgtcttaagaaaaaacaatgggatcaatggctcagaaatcggttttgatgttatgcggagagttcatggaagcctacgagactatagtacctctctacgtcctccaagcgtttggtgttagcgtccactgcgtttctcctggtcgcaaaactggcgacaagtgcgtcatggccgctcacgatctccttggcctcgaggcatttctcgaatctttcactttttcttcatttcagtttttttcccttgcaatcgttctttgcatatttagtaaaacaatgcgatcaaatgctcataattgggtggactttcccctttattatctttatccaaaaagtttagataattgggtggtctcaacccaaaatgcatgggcctactcttaacagtaaaaaagaagagtttcaatttgacttttacctttttacagatatacaccgaactggtggttgaccatctaacactaaacgctaacttcgatggcgtcatccccgaccaatacgacgccatcatcattcccggtggacgtttcacggaacttttgagcgccgacgagaaatgcgtgagtcttgttgctagattcgccgaactcaagaagctcatcttcacgagctgccacagccagctgtttcttgcggcggcaggtctgctcaccggtggaatgaagtgcacggcgttcgaaagcatgaaaccgtttatcgagctctccggcggcgcatggtggcaacagcctggagtccagacccttttcgaaatcactgattgtgtcaaggacggcagtttcatgtccactatggggtggccaacgcttggccatagtctcaaagttttgttagaatcacttggctccaagatttctagctctaaagagaatcatcagacttctttgcttttcttgattggggtaagtagcttattttcataagactctcttttagactttatatattggaattaaaaaaatggtctgactaatacgtaattttggtatatttaggattgtgttgaagattatagtatcaacgtaccatttaaagcgtttcaagctttgggatgtaaagtggatgcagtgacgccaaccaagaagagaggtgagaaatgcgctacaatcgtacacgaccttgaagacggacggcaacttcctactgagaagtttggtcacaacttctatgtgaccgttgcgtgggatgatgtctctgtggatgattacgactgcattgtggttcccggaggaagatctccggagctcttggtgatgaaccccaaggccgtcgaattggtcagaaagtttgttgagaaaggcaagtttgttgctgccattggaatgggaaattggctacttgccgccacaggcgcccttaaggtaatatacaccgttttacaaaaattcgttttactattctaaagacttaaaagttaaaactgaagccgaaccaaaccatattttaatttaaacgaaacaaaaatgtcaagataagttgctctaagcacataggaatctcctatggttatggttatgactaatattattccagcatattgttgaaggttagtaagatataattcatcacatttatggcaccacttccttagcatagattataatttttgccagcttgttataactcatctaattcccattgtggcatgctatattattacattgcagaagaagagatgtgcaagtagttatgggacaaaggtggctgtgaaggttgctggtggtgagatcgtggaatctgaacggtgcgtgaccgacgacaagctggtcacagccgcatcaacttccgatcttcctgcctttttgtatgcattgtcgactgcacttggtctctctgttgtattctaatgtcaagtggtgctttaacgtctaatgcctaaaaaaataaaaacatatctttgtatgtcgaaatataaggtcgtccctctaattatttatgtacaagcttggatttgcatatatatatgggaagaagagttgccacacttgcttacacctcttctaattgtgtttttttataagaaattaccactatcaagttgtcattctcctcgttttacatttggtaaacaagctctattgaccatttatgttgtaacactacttcaagactaaagttgattagagatagcaaaatctgtcaccagcaaattgtgtttccttgttaaatactagtaacagattccaaacacattaaattttgtgaagttaaatttaacaacatactataaaataaaacaacacataaacggattaaagacgttaatgttcatccaaaaagtatactgaacttttaaataatttaccgacgaattgtactgtttatatccgaccaatatagttaatcacattttaatcactgcataaatttactcataggaattacaattaccgaattagtttcggtttaaaatttgttggatcaataaaacaaaaaaaaaaaaacgatgccagaatattccgttcgtcggcgtagtctttcccgcccccaaattatctgagcaaaaaccctagactctcgatttcgtcacgattttctcaatcaccttcactatactgcttcgatg

SEQ ID NO: 29433 - DNA, 3003 bp, Unknown
  misc_feature (1)..( 3003): 2750-1469P.txt file - cDNA_ID_3017209; gDNA_ID_2684120; Annot_ID_190946
gttctcccccaccaccgtactactctccttcacctaaagtgtactacaagtctccaccaccaccatatgtctacagctctccaccaccaccatattactccccttcccctaaggtgtactacaagtctccaccaccaccttattactcaccttcccctaaggtatactacaaatccccaccacatcctcatgtatgtgtttgtccaccaccacctccatgttattctccatcccctaaggttgtgtacaagtctcctccaccaccatatgtctacaattccccaccaccaccatactactcaccttctccaaaagtttactacaagtctcctccaccaccatcttattattctccctctccaaaggttgaatacaaatctccacctccaccatcgtattcaccttctccaaaaactgagtactaaatttctcggctgcctctatatgagtgaaactaaaaaatgtaattcttaaataagttatcgaatattattcgattttatctttccttttgttctcgttttttaatttctcttatctaatcaatttttaattttcttgggatttggctacaaaattttcttttatttgtgtaacgattgcttgcgatctatataaactcctttgcaaattcttgactttgtatcgtttaaataactatatgatcctctaacatggatcttgtctttggacagcacacctaaaagcatgaattattttaattctagtatgtcttcaaccttaacgatccacaatttttaactcttggaggtttcattttcctacctaaatctggtatggattaaaaaagaaaactcaaactaaaaaacaattatgagacgacaattcccaaagatatcaagaagacaagaactacattttactccacaactatattctatcgcattatttttattaaaagattttcattgatataaaaggaattaaaaaggaactctaatcgaaccattacatccaaccacaaaagggaaaaaaaaaggtgaaagtttaaaacatgaaatagctaattcaagattttatatctttatttttccgaaatatttttgtcccttacgattaaattcaataaaccaaagaactaaaagagtggttgtctagtggtagtacaagggaattggtttctttgtacaccgggttcaattctgtttagaaacagagaaatattctttaaatgaaaatggactaaagactagctccggatatagaagaagattatagatccaaattccaaaactttcgcgagcccgaactttcttagctaaacaaaaagaaatctaatataaaaataagaagaagaaacaaccaaggaacgataagaggtaattatgctataaaaagcggtcacttgtcttggttctcgaggatagaaatcaagtttgcacaatcggaagcgaaaataccaaacatcttgccggtagagatcatgcattaattccattgcccataacagataatcaaattctgcatggagcgacaataaactccgacggctacttctgagaccttgatgaagaactaagttttgtttcactagaacccaactatatccgctcagagccatcttcatgccaaggcgcattaaacagagatcaagatagggggatctagattaaacgttggaggtgtgacagaaattatggactcttcttttagggaagcttgtttccaagctgcaagatgttcaacgctcacaaatatgttagcatatgatatgattaggtttttgaattctatatttttatatgtcgcaagcgcactacaattaataaatcttcttagggtagaatttcaatccataagcaggctactaattataccatgaatactaccattttcccctcttttttttatttatgataaggtttctacgttagtaactcttatatatatgttttgactgttacacacttgtggaatcatgatggctggattggtgattcgaccattttgacattgaaaaccggtctccctccaattaccttgaagcgttatgcaataagtgtaaatgtctgctttcgaatggttttagcagtccatgaggctaatcgacccaacccaactcatagactatagagttacatcatttccgttgcatgtctcttgtgacacaaagaactaaacaagataagagagaattagagaagctataaaacataaaatcactacatgtcacatttatcatttactatgttgaatatttttaccgttcaatttaaagaaatccaacaatatgcttaaaataatttttttgattaatgtttccaaattctatatgttcttttaatcatatggtaattgattattttcgaccattctgataaagtttggagtacactgtatttttttttaaaaatagaagaaatgtatatataaattaactaagaatatattaagttttattgttttaataaagtagtttcattgctgcatgcactctgccatttacataaaatgcaagccttgtaatttacttttcttcattaattgtttaagatttgttttcaattttaattttgttaagaaaacaaatcttaatacgtttttttattttgctggctctgaggcaacaaactttttttacaattacttctttgtcatccccacttaatctggccttaccgtttttatttggcttcccgggttatgcataagaagatgtcaagtaggtgagaggttggtgtgcgtagggaatttgcaattaacacgtgtttattttaactctcttcaattttaaatggtgagagtagacgtagcaaactagtctaatcgcgaactaaaccactttatattttttgaacgaaatagaaattgttgtagttttctataaattattttttaataatctccaaatagagcaacgtatccacttatatatataaccttatctctttttttattggagaaaaaaaaagtacactgtgataatttgaactcatatatatacacactagttgtgtgtgcttgtcttaagaaaaaacaatg

SEQ ID NO: 29434 - DNA, 3000 bp, Unknown; identical to SEQ ID NO: 14461
  misc_feature (1)..( 3000): 2750-1469P.txt file - cDNA_ID_3017239; gDNA_ID_2684120; Annot_ID_190935

SEQ ID NO: 29435 - DNA, 3000 bp, Unknown
  misc_feature (1)..( 3000): 2750-1469P.txt file - cDNA_ID_3017247; gDNA_ID_2684120; Annot_ID_190933
gaagaatccagatataggtaagcaaatttatgcgtattattcaatatggttaacttcgtacttagacaatgtaaactagtaaaactacaagcatactttttcgtaaatgggggttaacctttttaataaatgctaccgagttcatcatcactatcaatcaaattgtggtttacataactagcttttgtatttgatatttacagatatgctgggatgccagatacagaagcagtgaccaaccccacagacagaactgtggctcatttgctctttcataggccttttgatatgttggcggcaaagcgaatggaaggaccagaatcacccgcttcttcgaagatgggaactgaagaaaaagggaattttcctaaatgcagcatacgagagactcacttaactaagcagaaagctcaaaaggaagaaggacctgcagattcacttgctttggggaatgcacccaactctggatctagtagtactgttggtgagagggttgttgaagcatcccaaggaaacaaaagaaaattgtgaaatttagaaggttgttatttccatactataactctataaatcgtttccatgcccttttgtatacgtgcatagagcttgtatacagattgtaactaatacgcaggtgttgcttttgctttcaatcagtttaggttgccgtgttagagaggagctttgggtatttctgcagactagacagcatctttctgcgtctcttgaaacaatctcctgactgctcctttcttgtgaagctcttattcttgtaattagatttttttttttttgttacttttcgaaaacctcttttgttatacgtatctccatgacaactacattttggaaaacgtgtagtttgcaatgtttttcccccattcgaaaccagattcaatctcttaatacaattgtaagcacacaccaaggacacataaagtactgttttgaggagaagaaataggtaacaggagtgtcttagttaatcatagagtagctgcaacgaatttgcctttcttcagagttcagatgatgcatcggtatgtcacaaaatccccaacaggctctttactgtatgtaatcttcaccacctgttttttctttaacccatagtacctcacaaagctgtccttctcctgcaaataaggaagctgaaatggaaaagaaacatccattaaaacatagcatacacaaataggcaaagaagctttgtgcagaatataaacagacctgtttgtcctcaagtgcatgcttcctcagcagttgttctttctcctctttgtttaaaatctcaatctttggctgctgaatgtgctttgtgatgttgaccaacaaatcttcaatctgttggcatattcaataagtataaacatgtaactgttcagttaacgtatttccaattcaggtctcaatttcatgatcctcaatagatatcatgcaagacaatccaaatccagagctataatgtttcatcatgtaggaaaacagataagtgctgaccgggaaagtttcaactgtaaaagggaaggtagtcaatgccttctgggcaaagtggttcattttgctctgtaaaaccagaatcatagcatgcaagcctacattgttggaaatctgaatatgaagagcacgaactgacttcacggtgattggttcagttcccatgaacacaacaaggatctgcataaaaccatttcaataagcttaatgaaaaacaggtaaaagcatgagaatatgtctggttacattctcatctcaactagctgttcaaacataacattttaatgacaccttaatatgatcccatcctttcccattataaagttaaagcaatatgccattcgttacaacacaagtaccatgcgaggaaccttactgctacaacaaattttcttggttcccaagaaaaaaatgggtatgtattagttcttcagcttttccaaaacatataccaaaagctataaattaaacagaacaagaccaaacgcaaaccacacatcattggaaagaagaagataaacccatatacttctcagttctcactagtcttatcctaaaaataccctataattaaaagttgaaatctttttgttgtattaaggcaaatttaaaccaaggttaaaccctaaatctaaaaagtcgacgcatttctcaaattttcttctgttttaacgcaaacccaagctggaagctcaaaatcgataaaagtttaagcgttttacacattttttttctctttgaaggcgttaaaccaaaatgcaaacccaaaatctaaaaaaggtgatgcctttttcacattttcatctgttaaaaacaaaaagtaacacccaaatcgaaaaatagcggtggaacaaagaaaagctgaaacctttttcttgggatctgagcgaagaggaacgcagatacggaggcgttcaagctcaggcttctcaccaaaaacagaacgaaactcagaaagagtgagagagagctcagcttcattaacttcgtagcctctatcgcgaagcatctcaaaagctgtcgtgcgagccaagtaaaacctcttgctttcgattcctccggtgtcctcagtcttcgaaatacagttggtaccgtcgtcaaacgtcgactcaacattttcacagcacccttcttcggccattgtctcctccatttttctcctctgtcaatttcagagttttgctgttggaagagagaaaggttttatgagtttgttttgtcacaagagagagtgttgtttgtgcttgagacttctcggctggccccttactaaaatacatctggactgtccattgcattaatcaaccaacggttacgattcctctcttttttattcaattttacttttaagaaaactccaaaaaagcataaccataatgtcataaagacatgtttttgttggaccggacataaccaatgtcgagatgacgtcaatggatagttgagtcggctgttattaacgacggcgacgagttagggttcatacttcctaaagcggccatg

SEQ ID NO: 29436 - DNA, 3000 bp, Unknown; identical to SEQ ID NO: 14466
  misc_feature (1)..( 3000): 2750-1469P.txt file - cDNA_ID_3017251; gDNA_ID_2684120; Annot_ID_190931

SEQ ID NO: 29437 - DNA, 3000 bp, Unknown; identical to SEQ ID NO: 14458
  misc_feature (1)..( 3000): 2750-1469P.txt file - cDNA_ID_3017261; gDNA_ID_2684120; Annot_ID_190928

SEQ ID NO: 29438 - DNA, 3000 bp, Unknown; identical to SEQ ID NO: 14456
  misc_feature (1)..( 3000): 2750-1469P.txt file - cDNA_ID_3017265; gDNA_ID_2684120; Annot_ID_190922

SEQ ID NO: 29439 - DNA, 3000 bp, Unknown; identical to SEQ ID NO: 14456
  misc_feature (1)..( 3000): 2750-1469P.txt file - cDNA_ID_3017265; gDNA_ID_2926250; Annot_ID_204344

SEQ ID NO: 29440 - DNA, 3003 bp, Unknown
  misc_feature (1)..( 3003): 2750-1469P.txt file - cDNA_ID_3017301; gDNA_ID_2684121; Annot_ID_190991
ttaattgatttataaatacataatatattgatgtgttcgtgtctgacggtgccacaaaacaataagaatataatatccaataactcgtgaataatgccgtaagcgtaaatgatgtaagttatcaaaccatacatcaacgtgacaacgtccatgggttcttataagttacaagttttgcatattcgacttttatttagttttctttctccacgtttaacgttttagaccacaaaaccaaattgatttttcttatagatttctgatattattgtgttttttttctttccttttgatgaaagaagttttggatgaacaaaagtgaaatgttttatgtctgtatatatatattgacccctaatttggtaatactactaggtatagccattcattttattgtatccaatgtcattaaggaatcttgaactaatttttttcccttttatatcgtaaacctttatgcactctcttttacaaatacgtgttattcacttatagtatttggcatttaatgaataacttcgacctataagcaaaagctattgaaacgtttctttggtgttagataattttggattcaaacatgtcccgtacctatcatgttttaataagtgcggatcagatccgaacgaaatatttagagtagttgagttgatatgaatgcatattattgcagtggtctagaagaaaatgggagtagattagtattgactaagagcctttagttaattgtttaatgctttgcatgcttcaattaagaaagcccattcagtttagacataacattatgtctacttggttttgtttaaacaattacttagtttgaaaacttcaaagttctttatgacatactccctccatttctatgtaaatattaaatgtatttaataatttttgatcaatcatataatacattatactccctctgttcctttttgtttgattgtttagaaaaaatacacatattaagaaaacatattaaatgttgattataaatgtattattttcagtgttttacaattttctatacctctaaaccaatgataattaactatttttcttgaaaaattacaattcaccaatactaaccaataaatattacatggaaaacttcaaaaatcaatcttttagaaacaaattttttttctaaacaatcaaacaaaaaggaatagagggagtagtttttattggttgcattcattctatttaatgatatttttataaaaaaagagaaaaattatatatttttttaatctgtttgtaacaactttaaacatcacttaaaaagaaacggaaggaatatatgagagttagtgagatttaggcatgtgcttgcttcatcattgggcttattaatttataaagtttaaatttatcaagcataatataatatgaagtcagctttgccgccacagttgatgcatggcctctaattattggagcattgtacgtgatataggtgttaatggagatggtttgtaggtctttatcaatacggaatctttatcttaccaagtcatttctaagtgttgcatctatgtataaactaatattggagacttcaacaaaaagtagtatatatatacatggtttgcacattgtgctatatatatgtttagatatataactcaaaaacacctttattgcttaacagtctttggtcggaggggggtttggtgaggaagacaatgaaaattattattattaagagaaaagggaatctttctggtttcaacacaaactaatctcccaaaaaaaataaaaaataaagctagcaatatttagaagacctaaaagagttaattagtgactttaatgtgaaactttttcataaaaaatgaatgcagcgatttgttggaggccaggattgcaaattgtttttaaacttcgaaagcaacaaagataaaacatcttagaaccctaaagtaaatccttgacgttagagaaacaagcttacttaaaatctaacttggagatgaaaataaagatttactgatttatgtaggaatacgaaaccctaatttcttgatttaaatcaaaatggaagataaatgtgcatcaaaactctgttttgtgtgtaagattcttcttacaggtttcatcttccatgggatataaaagaatttgtgaacgtcaatgtagcaaatgaattcacatcaagtagtatttccattgatgtctcaggacgtcctttcaatatctcatctcttactacatcaagaagattttctggaagctgcacaacaccattcaatatctgcataaccacactcatatccggtcttattgactcagattgatgtgaacacaacacacctagcttcaaaaccagctcaatctctcccctgttttgttcttgacgtatacattcctctgccgcatcgaaaatgttcccatttacccaaagctctaagatccaatccactagaacttcttcattttccgcttcacgtcgctcaatcaaccttctaccacaaacaacttcaagcataaccaacccaaaggcgaaaacatctgtgcttgtagttgctcttgttgaaagttaaacttgattttgaatcaagtttaattattggatcaattatccaataattaattatggccaaatccaagttctagagttttctctagaaatatcatcatttccacctccttaaaggattctagaaattttctagaatcatcttccacctccttaaacataaaaatctagatactctaatagaataatctagataatttgaataatgtaatctagatcttatgtaagaactctctagacttaagattaaaatattttagatattttgtagtttggaggctataaatacctcctccccctctcaaatgttgtaatgttgtgaagttgtattcaagtttaaagcaaagtaataaaagttctatttcctaaaaaactctctcaaaacacttaaacactttctccattacctctaaaagaattttactctaacaaagtggtatcagagcttgaagatcctaaagatg

SEQ ID NO: 29441 - DNA, 3003 bp, Unknown
  misc_feature (1)..( 3003): 2750-1469P.txt file - cDNA_ID_3017305; gDNA_ID_2926279; Annot_ID_143594
ttcccatcaagaactcatctttctcattcaacatcatcttcgggatcgtccctgaacataagcagcaaggttcacacggtatggctttcgttttctctcctacaagaggccttcccggagcttcccccgatcaatacctgggaatctttaacgagacaaacaacggtaaagcctcgaataacgttatagctatcgagttagatatacgaaaagacgaagagtttggagatattgatgataatcatgttgggattaacattaatggtttgacatctgttgcctctgcttctgctggttactatgatgatgaagatggaaacttcaaaaagctttctttgatcagcacaaaggtaatgaggctttccatcgtttatagtcacaccgataaacagctcaatgttactttattacctgctgaaatctctgttccgccacaaaaatcgctcttgtctttgaaccgagatctctcgccctattttttggaggagacgtacttgggtttcacggcatcgaccgggtcgatcggagcactctattatgtgatgcaattttcctatgaagaaggagttatatatccagcatgggaccttggcgtaatcccaacccttcctccatatccaaagaagtcgtatgatagaacacggaggattttagcggtctgcttaacgttggccgtgttcactgcattagtcgcttccggaataggttttgtcttttatgtgaggcataagaaggttaaggaggttcttgaagaatgggagattcagaatggacctcataggttttcttataaggagcttttcaatgccacaaagggtttcaaagagaaacaacttcttgggaaaggaggctttggtcaagtctacaaaggaatgcttccgggttccgatgcagagatcgctgtaaaacggacttctcatgattcaagacaagggatgagcgaatttctagccgagatatcgaccattggtcgtctcagacatccaaatctagtcaggcttttgggatattgtaagcataaagagaatctctacttagtttatgactttatgcctaatggaagccttgacaggtgtctaacccgtagcaacacgaatgaaaatcaagaacggcttacttgggaacaacgtttcaagatcatcaaagacgttgcaactgctctactacacctgcatcaagaatgggtacaagtcatcgttcatcgagatataaaaccggctaatgttctactcgaccacggcatgaatgcgaggctcggggatttcggattggcgaagctgtatgatcagggatttgatcctcagacatctagagtagcgggaacattaggttatattgcacctgagctcttaagaacaggaagagcaaccacaagcacagatgtttacgcctttgggttggttatgcttgaagtcgtttgtggtagaagattgattgagagacgtgcagcagaaaatgaagcggttcttgttgattggattttagagctttgggaaagtgggaaacttttcgatgcagctgagggaagtattcgtcaagaacaaaacagaggagaaattgagcttgttttgaagctaggtctgttgtgtgcacatcacactgaattgattagaccgaacatgagtgcggttttgcagatcttgaatggcgtttcgcatcttcccaataatcttcttgatgttgttagggctgagagattgagaggaattcctgagacatcaatggaagtactacttggtcttgatctgaattcttttggtacaatgacgttgacgaattcttttgtgtcccatggacgctgaaaccataaaaataagttagttttgatcaaacatttatattccatcgggagcttctgtatccgtctatttgataaatgagtacatgtttctgtatctttgaatcatgaatgccttccaattcatccctaaatttctagggtttacttttagggttataatatgtttgtttcattcttgctttcaaagtaatcttgttcgaatttgtttataaaaccaaattttcaagagcaatgacttataacttaattaacttttttttttctgtagaccaatacaaaatctgttaaactttacattaaaacatgtcaaaaaacttattttttttacattttatggtcaacacgttggttgttaaacttacattgtttatccatttctacgctccgtaatgttcgacggattaggttgtagaaaagataagagaagcttttttgacctttttatttctttggtagagatctgagaagaaaagtttttttgattattgcttattatgctttccactataatcgctatttaatcttagcaggattagaagatttgttttcttataattgatttacgactttatcttggccatgcacagtgcgtaattactaaatagtgaacatgtgttttttctctcttaagtttgcttacttatcttagttcgttggccgcatataacatgaatattcattagataaataattaacagcaataggtaaacagcaacaataacaatagtttaagtcctaagactaatcaacacattaatggaacgataagaagagattcaagagaataattaacaataatgttttgtaaaaagaagaaaaaaaatacaaaaagcaaataggatgtcataatctcataaccaatatagcaaaatttcagtagtaaaataggtttgcaaacctaacatgggtccgcttctacactctgacaatcccacaataattgctattattaattgaaaaatgatcagaagattatttgtttattgtgttgcggtttgatcatctaggccatgtgggtaattaaatacaaactacatatgtttatgacatgaccagtttcgttcacattatattggcttgatcatattcatacagttttacttatttttatgttgtatcttcttacataattcttctgataaatatcacattacgatcaaaaccttcccataagccaaaaaaaaaaaacgaacaagaacatg

SEQ ID NO: 29442 - DNA, 3003 bp, Unknown
  misc_feature (1)..( 3003): 2750-1469P.txt file - cDNA_ID_3017315; gDNA_ID_2684121; Annot_ID_190987
aatttgtgtatccagatttctgtaactatataccattaacaaaaatctacaaacagatccgatatttaaaagttataaagatataatactttattcgaaagaaaaaaaaaaagttctaatacttatgttcaataattatatcatgatatcttggagatatagacttcgttgtggttcctttttcccaactagttaagtatattttttttgctaaacttggtaaatattataaaatgaaagttaaggtatgacataagcattacctagagctagggagagtcaccttggtaaaaaagaaaattaaaataaacaaggctacaataaatttacacttgtgaaaaattgctaactaagtaatttaagtgactaaatgtagaagaaaataatcatagttaatagaggacgtgaccatatttctcacgaatgcattcaaatgtacggaatgcactaaacaaaatgatgcttgcatgattacatatttacatctattgtcaggataaatatttgttaattgtatttatttattatatttttaattacgaatgtacaaactttttagtatatgtttcaacaattcaatggttttttgttgttgtttaaatcgtagtacattcaaaagtcaacaataaaatttaaagtgtattattgacgttctgctatattacaattacaaaaccacaccttttctttttgttgaagttatatttgaactcgtcatatggctgctgactgctgaatttttctatttccaccagttaattcatatgtcccatgtatctgtagttgatcgtataaaaagacacacgcacgcgactgaggtggcgtgtcagcagtatatgaagaagaaggaatgttgggaaggagacttgtcagttgtcactttgggttaattgttttattttttcaatcttcttgcttgaattgtattccaagctcatatcatttcattatttttcttacttcctttctaacatccacaccgtgatttctcttctttatattactgataaaactctaaaatatcaattacacttttatatgaaaacatcaatgtcaagctggttgagttttagttttgtaaatatatgtttagtactcatctttgggctaccagataatgacacaacttttcaatcctaattagtataactctattttcaaaaatttaaatagtacttaaaacaattataccccgcttaaacagaatttaactctattttcataaaaaattagaatttaattccagtacatatttcaaatatagttgatcactagttaacattttacataataatcttttacgtattttgaagatgtataatttcagcaggtttgaagtctttcactcataaaccctacttttcttttaaaaagtattatttcttaaatgcataattagttatgcgttaaaatactaaatttaaaattctggtactattattttaaaattttcgtaagtaaagcttgtgaatataaccgttgtcgagtgaaaataatttgatttttttaatgaaaaaaaaaaaaaaaaaaaaaaaagagggggacaaaattttgacttaactgacataagagatctagaaggtgaaaccacgcgcgtgtggtagtcagaaacgaccaaagaatcaacctcgtccttgataataaaattcttgagattggtcacaccaaaacaaaaaaaaaacgttttatcattgcttcttcaatagtatcaactgacgtaatcatgataagtctacgacaatatccctccaccaaacctaaccgttttggttcaacatttaacaattatgatgagtttaatttttttattggagactgttaccactcttagctttcattatctataacctaagtctggttaattcatgattatgtcaacagtttctttggtcgaattttgatatcgagtttggtttctaggttttagtttccttaaatgtttgtctttacaatgaagtaaagttaaaacaacattgagtgagaaagtggccaactaattctctctgtaccatcaatccaaaattaaattgatttgatttgattaatcaaaaaggtggtcagagaaaaacaaaagaaaaaaaggttttaaatttcttcccgtaccagctagacccagaatcaaagtagcatacttttgctacatattcaaagtaatttaacccccaaaaaccaaaaagaatgtgttagaaaagcaacaagaagaagaagaaagcaaattaatagacaaataatctttcttctctggttgcttctttttatttctttctctggaacagcttttctctgttactttacttctttgagaaactccataatcaaagaggtaagtgattcatgttgcttgtgattatcccaatggttttgttcttttaggttttcggaaataaataattattcttaattaccgagttgtgtataatttgtttttgttagtttctctgatctatcccttgtctaagttatcttttagggtagtttgttttcagggaacaatttttatcagtataatatagggaaaattttccaaacaaaatcgataataatactaatatctgcataaatacaattctagccagtatgtgttatgatcagtttacctaattgggttagaaagatggagttcgatttaagatatcttaaaagttcaaaaaaaaactttcctttttcatgaaaagctcaacaacttcaaaatctttgttttctggctgtttcctcttgtcttcgattgttcttgttctttggatttttttgttttaactttttttttgtctgaaactgctgtttcaatttggaatatgttgcaggagtttttgaggttgaagctgttcctccttggtaaaacagagcaattatgctaacttgcgccgtcttttcaaatcttgaccatcatcaaaatcatcagtaagctataaccatctgtttataaccatttgcttgaatcaagaaaaaaagtttatcttctgtttcttgttatgaacagttgaaaggaatgttcaagaaatg

SEQ ID NO: 29443 - DNA, 3003 bp, Unknown
  misc_feature (1)..( 3003): 2750-1469P.txt file - cDNA_ID_3017325; gDNA_ID_2684121; Annot_ID_190984
ccctctgcctcatattcccatgagagtctaaacaactttaaggtgaaataagtttcctaaagcagtaaatgatatttaaccttagcaggaagttcatctgtgggaaaattgaactcttcaccccacattggatttctcgagccagggaccatagaactgtaacaagcacagagctactacattaacattagaccatcaaatgtgtaagcactcaacaaccaaaccaccaattatatgttttcactttttttagatggatagaggttgttgttggtaagaagctaaaagacagcggaaaagagcaggaaagaaacatgacatcgaaaaagttgctcacatgttcctttgaaaagttataacactaattgaaaaggatatgtaacaacctgaatcgcttttctgatccacaattaacaatagcataaggatctgatgttccatttaagttagcaccaattagattcttagcagccaagagttccacctggaagaagatcctcacattgatgcaatgttagtatcctatctatgcacagatgaatcataagaatcaggagaagcatttaccttgactatataagcagcattagtttgagtgtctcctctcaagtgtcctatctacaaaaataagtgcagaaactgcaagtcaaaaaatttggaaaattacccaattagagaaggggaaagctaaaattcattaagaacccacgagatttctccggctaagtaaactgagaaaccgatcaatttagagaaatgaagaagatgatataaaaaccttgtctttgtcaaaggcgtcaccggaatcgagattctgcatgagacgagaccgatcaaatccaacaccgacgacatcgtcatctccgcctcctctgtaagcgaatagccaataggaagcgattaaaaacacagaagcgaccaccgcgacctcaatctcccacgccgacggtaatagaacttccaccgctgactgtaccatctcgatcaacggagttaaaaagtttaaatttttcgaaacgaaaagcgcgatcaagaggattgtctagggatttatcctatggaggatcacaacacagagaatcaacattattctggagagaagaaacttcgccttctttagaagaagaacaagtgagtcaaaaaaggacaatcgctgagaaagaaaggattttggaaagaaaagtagaaactgagaaattagttgtaaggacggagttacggaaatacccttggaactgtaaacagttactggctgtgggactcgaggactgtgaggagaattcgagggtagttctggtaattaagaaacttcgaacgtaaatagtaaccgtagaaaagtcgtacgaagactttttataaactgaaaaatgaaaaatcttgtcgtgatgtatattaaccaaattttcttactggttgaataaaaagggaggccaaaaacaaaaatcgaactagtcaaattgaaccaaaccacactaattacgttaagtttggtttaaaatttcaataaaaactggtatatgactcaaatccgtgaatcaaattagagtttcttacttttctattgactcaatggtttttatttgttttacttagaacaaatttgtaaaactatattaaaaaacattaaacaaaagaaacaagtgtaaatatataccttagatcatttaattaaaagctctatttatagaaatgtatattcatattattttttttgcatatctaattaacaattaaaaaatccaaggatacaatagatttgatttctaaaacctagtaaaccggataatgatccataataagattaattcagttaatttatcggttcggtcttaataaagtggttttaattgtagaaaaggcgaatggaaagaggccacgtggaaaacaaaggagacagatagagagggaaggacccgttttaggttttttgattgaggtataaatagatttcgatcagtagacgtttttttaagttgcctttacacattctcttttgctcctcctccttctctcttactctcttctcgccgcaaaacctcacttgctctctctttctctctggtatatctcattatctctctatcttctgtgttgttgtatatatgtatagctctaacttcgattctttacgagctcaatttctttgtttagatggttccaaatgttttacctttttactttttttaatacctttttgtctttgttgctgccatgtgagctcaagctctgttcttgttagtgggttaaattcctttcttttatggatattctgattctttgagcataattgttgagaattgaagtcagttttgtctcggttactcaaaagtttcgagctttgtatattgctagtgatagaggcagcttcaaatccgaacaataggaatacttagagtggactttgattgtggtgcccctgagatttactctgtttatttggttgcaaatattgtacctttgcttttacctgccatgtgagctccaactccgttctttgtcgtttgctagcttcccttttttaaatagttttcagattccttgagtataattgttctgaattgaagtagggtttttcttggctgctcaaactttgtagattgctactttgctagtgatagaggcaacttcaaatccgaacaaaaaagatacttagattgtgcttctcctgagattactttaaagattttactttggctatgaacaaaagcctatagctttgtcttttatagtctaatttaagtaatgaaatcccagattcttagttaatttagagaggaaaatgggtagtttgaaaggaaagtgatgagatttcaagaattctactaagattttatattgcttgatgcattctactttcaacctgaatgttagtagcagaggtactgacagtcttttatccgcaggatctttatcggggagcattacccgcgttttaacttacggtttccaatgtgaactaagagtgtgttatcagttgtgatgactgtggctgaaccacacatg

SEQ ID NO: 29444 - DNA, 3000 bp, Unknown; identical to SEQ ID NO: 14474
  misc_feature (1)..( 3000): 2750-1469P.txt file - cDNA_ID_3017331; gDNA_ID_2684121; Annot_ID_190982

SEQ ID NO: 29445 - DNA, 3003 bp, Unknown
  misc_feature (1)..( 3003): 2750-1469P.txt file - cDNA_ID_3017335; gDNA_ID_2684121; Annot_ID_190981
gtataacgagtactggctaaagattaagcgatcatcaacaagtctacctggtctggtaacccgggcaaatacaaacgcatcttgagatcttatgttgattcaaatgaaatgaagatagtgatcggttttcttactggtttaagtagtttcccttagacccttacccgtgtttttgtttttgtttaagttacttttgccagtagtaaatattgatgctcatcgtcacaagtattgactctgtcgtgtttacgtaaatgaaaagttaccctgaatggctgaatcatattatatagaaaaagtaatcgaaatcgataacaagagcagagcatgtaaagaagaataccgaggagatgacataaggtgttagttagggaaccggaatgagagtttggaagtaagaagaagcaacaacacgagcgtatgcagacttgtctatatcaccaaggctactggaggatgagtgtgacttaagatacgacaatgcaacttctagcatcacttccacttctttaaagaaagtgtcaaaaacaaatgcatcagacaaaccgaaaaatgacggccttttagtttatcgattgaactaagggcaccaaactaacctcgtcaattgcccctgctttaatcttcgattgcatcaaacaccatttcttgaaatgtacacctattgaggaagccaaagagatcattccacactatgtgctttgcaaaatttcacacggaaaagtagaaatcattactttggtttacttaccgactcttatatctataacagatgaaattatctgggaggagatcaaatatcgtttgcagaggccctggcttttgatgtacaatggttgggccttactgagccaatgacccctagatatcttttcagagacctacctcatgattccagctctgcgtcttcctttgaaagtcaaactacttttgtggtaatagcagccagtagtaaatgtaaaccaaggccaaatagacaaacttttttcgtaacttttttgtattgatattaaaaatattctgagatattacagactccagaaacatttcccgtatctcgagtccgacttaacacatatagtaacacctttacttaaactaactggtaaaatggatctttaaaagtgttccactggttttcccactgcagctttgcgaccatctgctcaaataaaaggatccattttaggatctacacaaattaaataattaactggtgtagatcctatatagtttgagcatatactttgaatcttaacaaattgtttcagatccaatttgtaaaagcttgcaagagcacatatccacttagaaatcgacaagcatctatgtatctacatcacataaagcatttgttggaaacatttacaccaccaaagagtgttccaacaaataatgtcctacgactaacctcaaacaacgttttttttgcttgaacaatgctgaattttctgcagtagattctggttttctcgcagatcttcacgcgaaaatcaaacatccttcgatactaaacttcaacatttgaaactagtagcatctcttctggtactctgacgagggagcagacactatgggaatgtaagggcagttccaacctcccagacatattttaataccaaatgaactaagattagaaagggtaagagatgcgtgtacataccagttattactataatagttagtttttataatttcaaaactaaagaatgtaaaaaataagttaaattttttaaaatataaaaatttaaattaaaaccagaaaaatcttattaagaacaattaagtaaaggaacttttttttgtcttatcaattaaaaaatattaacttcttattttcatagaaaaaaaattattacaattaaacccaatacacatgactatatgagttttataagaaagtaatatgaaaaacaattgagtatataactttttagtctaacttttgcacggtaatttttaaattcaaaatcaaaattttaataaatatttaatcaaataaaaattaatatttttaattgataatataagaaacaaactaactattgattaaaaatatttagtaaattaaaaaaattaacttcttaagaaactaactattaatattatgaatagttcatatcttaaaattgtttattctttgcacacaaaaaaaaatgtttattctcttaatttagttttgaaattgaaaaaagctaactattataataattatctagacgaaaaaattgtttaaaaacaatacagtttttagattttctatgcaatattattaattactattgataaactgtaaacttgaagaaaaaataattgactatcattggtttagaattgtagaaaaactgtaaatcacaaaagcatcatatacatttataattaacttttaatatattttttgtatatgtgtgaaaactctaaaagatcgattatttacacaaagagtaaatttaaacataaataaaactgaataattaatattaccccacatgtttataaaaacaataataataaaatactacatcacaagattgttttgtatgtagactctaaaacaaaataaaaattaatttaaaaatattcgggttacgccaggtatattttttaaattttatcaattaaaatataatttaataaatataaaatttatggtttaacataaaaattatttgaaataattaatatgaacttgaattagggttttattttttgagtgacgttaattattaaagaaagaaacaggaatatcataaaaatagtttctagtaacctttaaaaaacgttgtaattcagaaaaacgtgaaaccaaacgggctacaaaatatattaaaacacagagtacaacaggcttttggtttgagcccaaacaagcccatttaaatctatttagtctgtaacataagtcacgtgcacctatcacgtgatcatcttctttcttccttttttcttgtcatctgttacacatcggttagggttttagtttctcttaccgagattcaaatg

SEQ ID NO: 29446 - DNA, 480 bp, Unknown; identical to SEQ ID NO: 122
  misc_feature (1)..( 480): 2750-1469P.txt file - cDNA_ID_3017335; gDNA_ID_2862; Annot_ID_145993

SEQ ID NO: 29447 - DNA, 3000 bp, Unknown; identical to SEQ ID NO: 14477
  misc_feature (1)..( 3000): 2750-1469P.txt file - cDNA_ID_3017338; gDNA_ID_2684121; Annot_ID_190979

SEQ ID NO: 29448 - DNA, 3000 bp, Unknown; identical to SEQ ID NO: 14470
  misc_feature (1)..( 3000): 2750-1469P.txt file - cDNA_ID_3017359; gDNA_ID_2684121; Annot_ID_190973

SEQ ID NO: 29449 - DNA, 3003 bp, Unknown
  misc_feature (1)..( 3003): 2750-1469P.txt file - cDNA_ID_3017363; gDNA_ID_2684121; Annot_ID_190972
gatttcataaagagacaggaaatttgtatattgcagacgcttactatggtctacttgtggttggtcctgaaggagggattgctacgcctttagctactcatgtggaaggaaagcctatactctttgccaatgaccttgacatccatagaaatggctccatcttcttcactgacaccagcaaaagatatgacagagcgtaagacaactctcttattcttgctttgtatgtcaattcctaccgtaaattgtatgatatagaaattatacttgtattttgtaggaatcatttctttatattactggaaggagaatcaacaggaaggcttctaagatatgacccacctaccaaaacaacacacattgtgctggagggtttggcttttcccaatggaattcaactctctaaagaccaatctttcctcctcttcaccgaaacaaccaattgcaggtatgaccctcaactttgtgtttatatagctgtatctatcattcatttctcttcatcattatgtgtatgacagattggtgaagtactggctggagggtccaaagatgggtgaagtcgaggtggtggcagatctcccgggattcccagacaatgtaagaataaatgaagagggtcagttttgggttgcaattgattgttgcagaacaccggcacaagaggttcttacaaacaacccttggataagaagcatctactttcggttgccaataccgatgaagctgcttgcgaaaacgatggggatgagaatgtacactgtgatatcgagattcgacgaggaaggtaaagtcctggaggtgctcgaggatagacaagggaaggtaatgaagctttggattggaacagtggctcataaccacattgccactctaccttatcctttgacaatgaatcaatgaaggactttgttgtgtagttcctgaactaaatcatctctctgtaacttaattatcttcgttttgattcaagttcctttggaccggtttgtcttttgttgatattatgtgtgaccttagattcctcatgaaattctctttctttctttcttgagtctctttttttttttgtttggttcacgtcctatggaaggcttcataacttgagccatcgcccagtcttcttcgactcccgcgaaatagaaaacaagagtatgcaatgaagaattgccttggaaaacaagagtatgcaatagagaaagtctcgaaagtgttggaaggttgaagataaagagaatacagagaggtaacggaaaaataacgactgctttttctccaaaatgatgacgttacaatcatctccattacgacgttttactcttttttcagtaactttttctgtagtttgtttggcatcacatagcaatgaacattttatgaaatctgtggtgtctgctttcttctcaaagcacaactatccaaaactccaaactgttggggccatatatattactaaccaagttgatagcaaaaaaaaatacaaatccaactcataatttagtcttgaagttataagaaagaaactcaacggaagtctgaatcatagtcattcaaaagacagcagaaagggaaaaaacaaaatcatctaagacaagggtatataaaaccatgatagatcctgatttcataagatcttcaaaggtcttgcacactcaaacctgaaataaacaattggcaaattcaacttagatagagatagacgcatgcgttcatggaccaaccaaaaataacttgtgacctaaacatgccaattaaaagtgtctgaattaaagtagattaaccacaagactattcgaattcaaaaaccaaaatccaacaatattatgacactagaactttcaagtgatgaattactcaaagctaggaacatctatccaatctaacaaatgttatgagataagaggtttcaagtgtgtaatgtttgggctgagtcacagagagagagagagagagatagtgaacctggaggaagagactgcttcaacttatcggccttctcttggtcgaagacacatagtgtgtagaggtaccttgagcacctgaccttgaacttcacaatgtccttgcttctcttgatcttcacagaccttgcatccttccttctcgccgtcaaaaggaagtccttgatctcatggatttgcttcggctgcagattatccaaaccaacatccattttcaatcaatacaaaacaaaacagaacacacaacaagacttcgacccaaatgttactgcatgatgaacacttcatacatttcaagatgaaacttaaaccaatgggtcaattacgaggaagactctaatctactagattatcagtaaccaaacaagaaacccacaataagagattgattactttcagctcaatcatgcaaactttactaaaatcctagtcgtgagaacagataatcaaacaaataatatttagcttcaataatcctcctgagaataataaaactgagaggcgaagaaaactttaccattgtcggatctgatttagtggctgcaactttcttccactcaagagaacaaacagcaaaagcaagaacccagcgtctgaaagaaatagagaaacctaaatatgaagaaaaccctagactctcatatacgcgaatttccaaatgtaccccttaggcccattaatccgaaaagttggccattgggtttagtggcccaagttgttttgtttggcaaatttcaaaaaactcggatccaataagaaaagggtatttaagtcattgcgtctatttgcctatgatttcaacattagcgccacaaaatgttttttcccgctccactaaaaaaacacttcttcctctctccaaaagcacacaaaaccctaccgcttcgtctctctctctttcgctctgcagtttcctattcaaaattgattggtttctctaaataatgtaacaccttcgattcgataatccttctctctcaaatcaacttcagtatctccatctctgcttctttagggctccttgttcgaaggaattaaaatg

SEQ ID NO: 29450 - DNA, 3000 bp, Unknown; identical to SEQ ID NO: 14468
  misc_feature (1)..( 3000): 2750-1469P.txt file - cDNA_ID_3017391; gDNA_ID_2684121; Annot_ID_190963

SEQ ID NO: 29451 - DNA, 3000 bp, Unknown; identical to SEQ ID NO: 14483
  misc_feature (1)..( 3000): 2750-1469P.txt file - cDNA_ID_3017401; gDNA_ID_2684122; Annot_ID_191011

SEQ ID NO: 29452 - DNA, 3000 bp, Unknown; identical to SEQ ID NO: 14482
  misc_feature (1)..( 3000): 2750-1469P.txt file - cDNA_ID_3017409; gDNA_ID_2684122; Annot_ID_191009

SEQ ID NO: 29453 - DNA, 3000 bp, Unknown; identical to SEQ ID NO: 14481
  misc_feature (1)..( 3000): 2750-1469P.txt file - cDNA_ID_3017419; gDNA_ID_2684122; Annot_ID_191006

SEQ ID NO: 29454 - DNA, 3003 bp, Unknown
  misc_feature (1)..( 3003): 2750-1469P.txt file - cDNA_ID_3017437; gDNA_ID_2684122; Annot_ID_191021
ggatgttactatatatattggtaattcttggcgtttgttagtttccaaaccaaacattaataaataaataaataaaagagttgaggttagatttagtctgtaaatgttcgaaatattacgtaagagtttgactgtaacaaaatattatagtctatatgtatatactagttacgattaaaacataactattaaaaaattgcaaaagtttgtacttggtaatatgattacttatacggttataccattaaacatttctcttgaaaccgcttcaaaacagtgccatataaacttaagcagcacctattttagtatatcttaaaattaattcttaaaaacataattcgtgttggtaaatattaataactgaacaagtttctggatattctaaaaagtataagccattatgaacagttttgggcttgggccatgttagaaaagccactcaaaaatatcatatactaattcgtcagctaaaacaagaaatttcatacgcagaaatttgtgttgaaaataccatagttcaaatgtttaataaaaatatgtaaaattagtttgattgttttgactttttcgcgtctaattagtttgattgatttgattgcttctgttcccagtacatgcaatatagtgatatattagaggtaaaacatccgtgttgacaacagattaaaaaaaaaaaagtaagacagtgcatagttcaatttctagtagttgttctcatcttgtttttggcaactggacgtgtcataaaatttgtttcttaaacatgaattgtattttcgtagggaaattaattcaacgtttagtgaaaagaatcaaaatcaatccagaactagtataatacatttttctaaaactattatgatttttttataaaaaacatttttttaatagcataaagtttttggccaaagcccataatccttttagatctgaaatcatagcatgtaatattagttttgtcccaaacgttaaaccggtgacctttaaactttgcttaagatcttttaccaattgagctaataatactcgattaaaaagatattttttgactttctcacgaaggatatttttccttttcatataaatgataagttcttttgtattaatctttttgtttcctgcattatttttttcgttttcgttgttagacattgtttcgttcttgaaaatgatagtaggtaacaaatgaaaaaaataaaaaatacaccttttctcctaatttcttatatgttttattaaattttattattaaatcataaatatagaaatgtataatttactaaaagggagggacaagacaaaaaaaagaagaagaagaatatataagcccatctccttgtgttggaaaattagttgctcctttacaatatacaatttcttaataggaaaacatgtcactgccagttgattgttctcatctctttttttccttagtggaatccgataaggacaattgctcatatctgtttttttttttttaattgaagatgtacattttctcttctctgattatcttccatacaaaatctgcactcagtaaaaagaaattatgtattgctgttttaataccactagatgatcacccgtactacgccgcagtttttttggattattttatattatttaatttaaatttaatttttatttgtctaatcattcactcatacaataagcaattactttagtattaaaaatatttttttctaacaatattctcaacaatgcatcatacatataattcataaacaacatttatcttaaattaatttaacagagggtagtattggattctagaaacctaagaatatgatgataaagctccttacgtattcttcagcgtcagtgatttattctataaatatcataagagaatataaatatcaatttaagagaataacttactcaaatcattaagtaatctacgactattatacattcatactttgaatttggattacaaaaaaaaatcttcgagtatgagaaaactattaaaatagttttattgaaaaatcatataaaataaaaataaatttagtaatagtataattaaatatgtaaaataaaattaaataagaaatatatcattaacctataaattagaagttgaagagcttacattaattatttaatagacacatgtcaaatgctaaagtgatgatgtgtcaatcatatgaagagagttggccaactttcatatatatgattcttagtttcgtaccaattagtttctcaattcagtgcatgtgtagtcaaatgtccaaaagattgtttctaagcaattaaaatcttatcaaaacttcattgcccaaaatattacgaaagcttgtttctgtgtatgatatacccggtaaaattaaaatgatcattatacagaacaaatcagcatgattttcggataaagatgacacacatttgaaatcgtagccgtactacgcgaaatacatgcactcttcgttatgttaacactttaacagtgaacgtagccataatgttgaccacattcaacagtcaacacaaacattactttacacacaaatatatgattatatatacatatgtacatgtaagtgaatgtgagcaataatgacgggaatattcagagaagacgatggtgaatgttagcagtgatcacgggcacattcaaaactgactgtggacaaaaaaagctcctggccttaaatatgattgtgccaaaaatagtacaaaactaagaacccaaaatggaattcgagacctatataataatatatatgtatatagtctttccttggaaagaaatcttatgttattaagaaaaatactataagttatctctctatctagatatgatatatatgtccaaacatttccacgtagatgacgtatattaccgaggataatcctctatataaggaagagaagctcgagtaataaatctcatcactttgaaatctcaaaagacaccaagcaaaaaaacaaagacagacaaaaaaaaaagagagagagagagagagaaaaatg

SEQ ID NO: 29455 - DNA, 3003 bp, Unknown
  misc_feature (1)..( 3003): 2750-1469P.txt file - cDNA_ID_3017441; gDNA_ID_2684122; Annot_ID_191020
gccctatttcgacattttaaagaacacctaggtcatcattccagaaatggatattataggatttagataatttcccacgtttggtttatttatctattttttgacgttgaccaacataatcgtgcccaaccgtttcacgcaacgaatttatatacgaaatatatatatttttcaaattaagataccacaatcaaaacagctgttgattaacaaagagattttttttttttggttttgagttacaataacgttagaggataaggtttcttgcaacgattaggaaatcgtataaaataaaatatgttataattaagtgttttattttataatgagtattaatataaataaaacctgcaaaaggatagggatattgaataataaagagaaacgaaagagcaattttacttctttataattgaaattatgtgaatgttatgtttacaatgaatgattcatcgttctatatattgaagtaaagaatgagtttattgtgcttgcataatgacgttaacttcacatatacacttattacataacatttatcacatgtgcgtctttttttttttttactttgtaaaatttcctcactttaaagacttttataacaattactagtaaaataaagttgcttggggctacaccctttctccctccaacaactctatttatagataacattatatcaaaatcaaaacatagtccctttcttctataaaggttttttcacaaccaaatttccattataaatcaaaaaataaaaacttaattagtttttacagaagaaaagaaaacaatgagaggtaaatttctaagtttactgttgctcattactttggcctgcattggagtttccgccaagaagcattccacaaggcctagattaagaagaaatgatttcccacaagatttcgtttttggatctgctacttctgcttatcaggtttagttcttattcttttgtccattggttcttttttgtatgtatgttaacatttttcgattttgcagtgtgaaggagctgcacatgaagatggtagaggtccaagtatctgggactccttctctgaaaaattcccaggtttttttcctaattagaaaccccaaaagctttagatctctataaagatttaagcctcaaaatgttggagtttggttcatatatgtgaatctggttttgtcttgtgttcataacaaaaatgggttgatgatgatgaaccttcttgatacttctttctttttcttggtattaaatttaaagataaatatttttgtcattttcattttcagaaaagataatggatggtagtaatgggtccattgcagatgattcttacaatctttacaaggtcttatttgctttcttcacccaaaaaagaaataaagtcaattatacatcaagcattacattttgcttcatgatttttttttggaaaatcaggaagatgtgaatttgctgcatcaaattggcttcgatgcttaccgattttcgatctcatggtcacggattttgcctcgtaagatatcgatattatcggattagatctttgtaacttgtaagcgttgttatatattcttgatgtaactcttctcaattgtttattaggtgggactctaaagggaggaatcaaccaggctggaattgaatattataacaacttgattaatcaacttatatctaaaggtaatgtttctctgtttctcagtctatttgattttaatgcacatagaggaaatcttggtgatgtttaggatattgccaaaacccttgtaatttttttttttttttcttgtaatgttgtaaatgtgtcaggagtgaagccatttgtcacactctttcactgggacttaccagatgcactcgaaaatgcttacggtggcctccttggagatgaatttgtgtaagttcattcataagatctctatatggtaagattacgacactgcgaagatttgttgttgatattttggtaatgaaacaggaacgatttccgagactatgcagaactttgtttccagaagtttggagatagagtgaagcagtggacgacactaaacgagccatatacaatggtacatgaaggttatataacaggtcaaaaggcacctggaagatgttccaatttctataaacctgattgcttaggtggcgatgcagccacggagccttacatcgtcggccataacctcctccttgctcatggagttgccgtaaaagtatatagagaaaagtaccaggtatgtttgttctatttttttatctagagtagaattgtttgtttgtgtttgaacttagatttgatgtgtactctttccaaatgatctcatagtaattttttatcatactaataaaatccttttgtttgtaaaataaaaatgtttacattgtcctttagagtcccttactctgtttttgctttaactctgttttactcttgtttccggtctgctctgttttcgctctgtttcttgtctgctctgtttttactctgcttaccatttgctctgttttactttatttccgctctactctagttctactatgctctgtttatgctctagtatgtttctttaccgtaacagtactgggattggcttgatcaatctcgtatcgaatcttaattttggttaccaaatcctcataaaaggtagactgttgtaaattgtgacaacattttcctcctaatatgatgtccataggcaactcagaaaggtgaaattggtattgccttaaacacagcatggcactacccttattcagattcatatgctgaccggttagctgcgactcgagcgactgccttcaccttcgactacttcatggagccaatcgtgtacggtagatatccaattgaaatggtcagccacgttaaagacggtcgtcttcctaccttcacaccagaagagtccgaaatgctcaaaggatcatatgatttcataggcgttaactattactcatctctttacgcaaaagacgtgccgtgtgcaactgaaaacatcaccatg

SEQ ID NO: 29456 - DNA, 3003 bp, Unknown
  misc_feature (1)..( 3003): 2750-1469P.txt file - cDNA_ID_3017444; gDNA_ID_2684122; Annot_ID_191018
gggtcacactaaacgaaccatgggtgtacagtattggtggctatgacacgggaagaaaagcccccggacgtgcctccaaatacatgaacgaagcagccgtggcaggagaatctggtctcgaggtttacactgttagtcacaatctacttctggctcacgccgaagctgttgaggtcttcaggaacaatcccaaagtacggaaaaggataattaatttcactttaacgagcatttttgtctttaaaaacatacttattgagatatacgacgtttattgtttggattacagtgtaaagatggcaagatcggtatcgctcattgtcccgtatggttcgagccttatgactcgaactgccctaaagacatagaagcatgcgaacgagctatggagtttatgtttggatggtgagtggttttatatcttaattaaaggttacatatttcaaaataaaactagtacatatgttttgttaagtttctaattatttttgtttgggtgctttctttaattaacaggcacatggatcctacggtgtatggagattaccctgcagtcatgaaaaaatcgatcggaaaaagattaccatcatttaccgcagcacaatccaagaagcttagaggatcttttgatttcgttggggtgaattattacagtgctttctacgtcaaaaatattgatgaagtgaatcatgacaagcccaattggagatcagacgcacgcatcgaatggagaagtaagtggagttgtatataatatttatatcattttagggtttcttggctccaagctttttgttactgttttcttgtctcacaagttttcaatttctattggtacagaagaaaacaacgcagggcaaacattaggtgtaagaggtggttcggaatgggactttctatatccacaaggccttagaaagtttctaaattatgccaagaataaatatgaaagcccgaaatttatgattaccgaaaacggtaataattttataagaagttctttaattagtcttactcaatttaatccgggatatagtttactaactcttgttttgttaaaattgttcaggacactgtgatatagattatgagaaaaagcctaaactttctaacttgatggatctccaaaggacagagtaccacaagaaacatctccaaagcatccaacaagccatccagtaagtgtctcttctaaacatctccattataagtttcttgtgggacaagaaactttactgtgttgaaaccatatactttgtttcatactgacgatgaaaattgttttggtcagggaggatggggttgtagttgaaggatactttgcgtggtcattactagacaattgtgaatggaacgccggttatggagttcgatatggactattctacgtcgattataacaatggactaaaacgtttcccgaaaatgtcggcgatgtggttcaaagaattcttgaagagagaagaagaaattgaagattcagaagaagaagagtacgtgttgaagtcaacaatgaacaagaagagattcttattagcaactggttcatcagcttcatgctttattcctaagatgtctgaatcttctaaagccctcgaactattattctaggtttaattttgttttccttattaaaatttgatttgtcaaaaaaaatttgatttgtcaaaaagcaaagcaaagtacttcaataaagaaggcttaatgcagggtgctttgcggctttaaactttcttccttttttggtctcctttgtacactatcagttgttgatttcaaaatttcaaatcaatcattaaaataagataatcgttcgttggtttataaaaagcatcacgcgccggagttagcacacacgatctacgcgcgattgatgcgcgtgggttaaaaagtagaagagtgtcccgatgataacgtgtgggctcaaaatcatttatttggactttgacggacccaatcccatagcccataaacccgtgatggagtattgtcattcaattaaaaacattaatatgtagtaactatgggcgtatgctttactttttaaaatgggcctatgctataattgaatgacaaggattaaacaactaataaaagtgtagatgggttaagatgacttatttttttacttaccaatttataaatgggcttcgatgtactgaaatatatcgcgcctattaacgaggccattcaacgaatgttttaagggccctatttcgacattttaaagaacacctaggtcatcattccagaaatggatattataggatttagataatttcccacgtttggtttatttatctattttttgacgttgaccaacataatcgtgcccaaccgtttcacgcaacgaatttatatacgaaatatatatatttttcaaattaagataccacaatcaaaacagctgttgattaacaaagagattttttttttttggttttgagttacaataacgttagaggataaggtttcttgcaacgattaggaaatcgtataaaataaaatatgttataattaagtgttttattttataatgagtattaatataaataaaacctgcaaaaggatagggatattgaataataaagagaaacgaaagagcaattttacttctttataattgaaattatgtgaatgttatgtttacaatgaatgattcatcgttctatatattgaagtaaagaatgagtttattgtgcttgcataatgacgttaacttcacatatacacttattacataacatttatcacatgtgcgtctttttttttttttactttgtaaaatttcctcactttaaagacttttataacaattactagtaaaataaagttgcttggggctacaccctttctccctccaacaactctatttatagataacattatatcaaaatcaaaacatagtccctttcttctataaaggttttttcacaaccaaatttccattataaatcaaaaaataaaaacttaattagtttttacagaagaaaagaaaacaatg

SEQ ID NO: 29457 - DNA, 3003 bp, Unknown
  misc_feature (1)..( 3003): 2750-1469P.txt file - cDNA_ID_3017460; gDNA_ID_2684122; Annot_ID_191014
gattagtggccgctttttttttggataattaattaatctttttttttgggtcaaacaattttggatttttgatccaaggaatcaaaacatcaaaacaaaaagctttgcacgtgtacagatgagtcacatatcacgtccgacgagtatctgtcgtgtttattaagttattagtatagggcacacggaatttgtttttctttttgtcggtttatctaatctcttaattccgaaacaaatgtaatttttttactattaacgatgtttaccatagacaataaataattacatttcacatatgctccgtgaaaattactaagacgaatttcacatatgtagtgaaagattgttttaaaatatatgtacaactccaagaaaccctatctccataagccatgtaacaaattattattattattattttggtaaaggacattttaacaaattcgtaaataaaacaaagtcaaattcacctccaaaggttaagtcgacgacctatattatatagtcaaccacatatattaaataaaacatcgctcacgccatctactcatatgtatgtttttacttaattatatagctaattgattatatgatatatcatcagttggaaaattaaaaaccattttattccgatagcgtaaaagaaacagatcattctttttgtttaaattacaatttatttaactcaagttgttgaaaagtgtgtaatggaaggcaggtccatagctatttcgtcttatatttttaactattttcattttgtttgtctttaagaaatagtattttattaatgtttttttacaaaccaacaataaaactgtatattcacattttgttttttttgtgtatatatatagagacatataatccacaacatatgcatatcatttcccaaaacaatacaagaaacctgaaatccaaaaaagaaaaacccaaaatcttcgcttcttcatcttctttttacgtttatatggtgagaaattctatgaaggctgagtacgatatagatcatcttcctcatcaaaccttttatggtgattattcaaaaactttggttcccatgaacaagaactcccaaataataaccaagatcaagcctaagatccgtatcatccatatatttgctcccgagatcatcaacaccgatgtcaagaacttccgcacactcgtccaaagtctaaccgggaaaccggagatcaccaaaaccggttctaagaaaaagataaccaacacaaattttcctgcgccaccgggtttgcctcaagattccggccaagaacatacggctgaactggacaacagaataatagggagccacgtggtgaaggaagaatggggatcaagttcaaacacaaatacttactttgattttgacggtttgatcgatcttgatgaagacgacaacatattctcaagtcgatggtttgatcttcaacaacaataattagtttggtcacaccttaccctaatatgtagggtttctactaatcgtaagtcctgttggttttgatgatgatttgatcatttattcgatatggagcataacaagacatgggtcaagacaagaccaaggttgagacgatgatcatctatataggtaggaacatacataacttgtatatatgtacaaatgtttggattttttgggcttgggtgccctttgatttaatttgttagactgacttaatttaccaagaaagagtgtagtgatgagtttgtagactgattttgccaagaaaaagtaagtttgtgttttgatctccgatcatgtgaaaactctacttaaaaatggtgtaacgttgtactcacgcgtgcgtgtgcaagttttatatatagaaaagcgagaatgatattgtgattgaattttttagattgttcattttttttcgtcaaattattttgtttgttaattcatatataagtcatgttacttacaacaaattgtttgataaaacaaaaatgaattccattaaactgaattaacgaaatactataatgataaatgattcttacatgactctaaaagagtttcgatttgaatatataaatgaataaagttctgttttattggcgatgttcttgatatataccttcaaaactttatggctaaattacattttaacttctcaaaacgttagattatgaaaggtggactcacatttcataaacattaaaatgatatggtaatatgattataatgagttgtaatggatatatgtcatatttttccaatctcattcattgaaatatcagtttattttttggatgacataacgatcaatagtgtcatataatatgatatccaatgttttaatattaactagctatagctatatccatcattgttaatagttgtgttacatcattaaatagtatttcaaaagaatataaaaatttctgataactaatggagaatgaagaatatcaaaccgcccattcgaccaagaaattataataacgaagtttataactttttttttcaattgtgaaatgtcatttttactttatttatttccaacaaaataaaattatgttttatctaaacccttggactttaccaagaagctacttttttatttagcaacagcaaaagctacataccatttgttctttatttattaatgaccgtttttttaggcattagaatcgttacggctgcttcgaatcttgcgtctcacggaccgacggaactaaccaatctcaaccgaacccgaacataacctgttcgtttggttttctaaatggtaatcaattggttcattataccggtttggtaagaagaatccgtgtgtttggtttacatatgttgtaatttgacgcttgttcatcacgttgcagatatatctcaacatctctcaatttttctctctacgttgaagaaactttcgaatttcccgttagttcttctccacgctttctctttccctttatctcttatctggttaagccaatcttgattgtttggattcgtaaccgatcagtgttgtgaggtttgaaagaatg

SEQ ID NO: 29458 - DNA, 3000 bp, Unknown; identical to SEQ ID NO: 14495
  misc_feature (1)..( 3000): 2750-1469P.txt file - cDNA_ID_3017511; gDNA_ID_2684124; Annot_ID_191036

SEQ ID NO: 29459 - DNA, 3003 bp, Unknown
  misc_feature (1)..( 3003): 2750-1469P.txt file - cDNA_ID_3017649; gDNA_ID_2684226; Annot_ID_191999
ttaaaacccactcattgctagtacacatcaatccacaaacaggaacacaaactccaaacgagtaatctttagggacatccatatgattatcaacaactacaagatttgagttctggtctgaaatcagatactcgggggatgagaagaaagaccacttaccctcagcttgaaaagtgattaggagatgtggccgagccgaggacctcttcaggaacaggttggtgagatatggactgcggagaagagaattccaatcatttgacacgcaacggaacctcgcggccgatttcgcaggcaccctggagagtatttcgaccatgagatcagttggcaacgtacccgagttctctccatattcacccactgaagaagatatggttagggcaacattttccttggagactttcctcttccgttttttcatcatggcggacattgcacatgaaaaagaaatgaaacccttagagttctgagtaccgatagacaaacacaagacgaccttataaatgaaacccttacagatccactagacagacacgattttgccacctttcggattatgtctacctaccacattttttttttttatctttctccctttttctaaccttatctttttttctttaatttcctttttgtagcatccttattagataccattacatatatagataattttatctataatttttcttcttttccttctaaattcattgataccaatcgagattacaaagttattatacaaattatttatctataattaggtagtactttttaatgtatatatacatacatacactatactaattacccaatcataccgttgctttcacgcctttttgtatatttttaaaatgacttactaaaatattgagtgtgattatcttgaaaagatatcaaatttctatttaatcaaattgaataaattttgagttcaatttattatatgcataaaaaatatgaaaaggatatgactatgaggggatcatatagttttatgaaagtagatgaaagagaataacatacagtaaaagtaggttttagattagagaaagaaaagcaatggattaggtcgatgaaccgcgaccaccacggccaaatcgtagtacattgattctcttgatatttttgcgtaggcttgattggccttcctccttgggcttttagagaggagtcacccatctcaaaacaagtatcaccaaatcctgagtttaaggaagcaaaaatattgctttcaaaaacattaactagattttcatttgccaatgaacctcgttgggtaggaataaatagggtgtccacagatgaaggagtatcaaccatagaaagaagcctcagttggtgcagcatttgaaaaggctagtaaatttggcgtttattgacgccagtagagagagagaagctaagtatagtggcagatggcgttgctgggggggcatactcgtttgtccgtgatataacgtgcttaacaatttcattatggtctctacatttttgacgaatgaatgcctatcacctagggttttcttgtgttttaggaaacattcttcctcaaaataattctccgcatatcagatatatatcaacttaactgagaatagcgattagtgcaatagtttcaaattaaagaatgatgtcctacaagtaaacagcctattaatttctcagggacaaatctgtcagtaaacctcggaaacaggcgtttcggtatctaaatacaatccaaacttagtcatatgtagggtttactgtttaggtaagcgagcgaaattaaccgaaaaagtgttatagcccaacattgttgcattgattatagctcaaaactcatgataaaacctgtcccaagtgtttgccaaaaaaagacatgttccaagtaaaattactaggctttcctaagaataaaataaatctcaaaaaattgagtcgactaaacatcaattgccttcaaaagataggttaaatctattagtcaacaatccggatacaaaatcatcgtcactctctcccttcacgtcctcctaaagatgattcatcacaagaacaaattaaaccaagaaattagatatttatattgaatatcaacagtaattacaattatgaatttatgagtatagtatattaattagtaaaagggttcaaggagagaagaatacgataccttatttttctcttcagctactggggcagcttgagtggcacttccagatgaaagtgcagaagaaaaaacggccatgggagaagcagcagatccaccggcaccagcattcatgatgagatcatccatgtttttgttctggcggaagactaggccagtatgattcaatgttcaaattggctgttttcaccaatgttgacatctttctcagcctagtttacaagtaaacaaaatagtttgagtacatgttaattaaaacaaacaacctacaagttaattaaggctccagtaggattgatgtcaagattgagcctagaaagtacatacggtgacatggtcatggaggaggagagctgcgtaagtgcaagctagctcaccggtggccattgtaggctagctcgcgtcccacgaaagatctacaaaaccatcaatagagctcatcgattcataatctgaacttcaagtgaaacataaaaacaaaacgtgtagagtctctgaatcgaacctgtaaccaaacagaagattaggggttaacgtacgaggtcactatttatttcgatagagttattagggtttctagaggattattaatgtttcgaaatgggcacgtgaatatcatgtgcggcccagagaaaatttaggactggaatttcatggcctatatagataaccaaaattgttcttattaagcctcagaagcccaataaaaggcccaattggacaacgacaaagcagaacccgagtcgttaccacacacacagtcgtcactcaccacctcaccgttccttatccatttggctgacgcaaaatcgaatcggaaccctaaaatctctccgaaagccatg

SEQ ID NO: 29460 - DNA, 3003 bp, Unknown; identical to SEQ ID NO: 29459
  misc_feature (1)..( 3003): 2750-1469P.txt file - cDNA_ID_3017649; gDNA_ID_2684126; Annot_ID_191094

SEQ ID NO: 29461 - DNA, 3003 bp, Unknown; identical to SEQ ID NO: 29459
  misc_feature (1)..( 3003): 2750-1469P.txt file - cDNA_ID_3017649; gDNA_ID_2684126; Annot_ID_137187

SEQ ID NO: 29462 - DNA, 3003 bp, Unknown; identical to SEQ ID NO: 29459
  misc_feature (1)..( 3003): 2750-1469P.txt file - cDNA_ID_3017649; gDNA_ID_2684226; Annot_ID_137586

SEQ ID NO: 29463 - DNA, 3003 bp, Unknown
  misc_feature (1)..( 3003): 2750-1469P.txt file - cDNA_ID_3017665; gDNA_ID_2684126; Annot_ID_191116
ccagaggctagacttcacttgtgacgatgtcttggactctctcaaggaagacaacatcatcggtaaaggcggtgctgggattgtctacaaaggcactatgcctaaaggcgacctagtcgcggtcaaacgattggctacaatgtcccatggatcttcccacgatcacgggttcaacgccgagattcagacgctaggtagaatcagacacagacacatcgtgagactgctcggtttttgctccaaccacgaaacgaatctccttgtgtacgagtacatgcctaatggtagccttggagaggttcttcatggaaagaaaggaggtcatttacattggaacacacgttataagatagctcttgaagcagccaagggtctttgctatctccaccatgattgttccccgttgatcgtccatagagatgttaaatccaacaacatcctcctcgattccaacttcgaagctcatgtcgccgactttggtctcgccaagttcctccaagattccggtacttctgaatgtatgtccgcaattgccggctcctacggctacatagctccaggtaacaaatttgcagaaaatggcatttaatcaaacacttggtggtgaaatgtaaaatctctgaacttgtttgttccttgttgagcagagtacgcgtatacattgaaggtagatgagaagagcgatgtgtatagtttcggtgttgttcttctagaactcatcaccgggaaaaaacccgtcggagaatttggcgacggcgttgatattgttcaatgggtgagaagcatgacggattcaaataaagattgtgtgctcaaagtaatcgatcttagactctcttcagttccagttcacgaggtaacacacgtcttctacgttgcgttgctctgcgttgaagaacaagcggtggagaggccgacgatgcgtgaagtcgttcagattctcactgagatcccaaaaattcctctttcgaagcagcaagcggcggaatcagacgtgactgagaaagctccggcgattaatgaatcgtcgccggattcaggaagtccaccggatcttttaagtaattagactttccggcgattgggtttggtcattgaggggcaaatttgtctttctaattttcttgtcaccgacgtctcggtagtggagttaattacttaattagcccgttgttgtctggttccggttaaggcaacaattagtggtttaactcttaaggttgttgcatttcttttttcactgctgccacaattattcgtgtaggaattttgaatatgtacattgcggttgaattttgcatgataagtggttaatttcaggaaatcgaatttcgagaacattatggcttatgcatatcagcatatatatacatgcagttatgtatatgatcaatctgcccccggttcaagtatgtcaattgtgttagaccaaaaaacacttttgccccttatattcttaagaacttcatttagtttcatactcaagcaaaaactaattttttagagttttcgttgtcttaaaatgaaactagtgtctccattatgctggaatcttgcttatgagttgttacattacatattttattctcacctttgcttttacccttttggattgtatctggttgtggtagctgttgtgtcacaacaagacattccatgtgaaaaaaacacagagagggtgaaaccaaggtatgaatgtgtttgtgtgggactgaagatgagtaacgctgagaagagagaaagtgaaagctcactcacaatttgtccaattattgcaaatgtatgggtagtgtgacactagtgtcttaatgaattcagatggtcctaagatcttttttccactctattcccttgtcttgaagcaaaaatctaattttagacgaagcatttatgacatctccctctcattaattacaagccatatattcaactttgattttgactcatcaatatcaaaaaatctttagactttaggtgttgttgctatccttggtatctagtactttcttcgataaccatgactattatattgagataagaaagatataaagaacaataagaatattagttatgatattttagatgtattatgttcaaaatttcttacgttcgaatgtacattgatgatcttgtaaacctaattaaggagtgcctaactctagaattaataagtcaggagttagttatcaagaaactagaaagacttgaagatggattaaagtggtaattaatgtttttcagaggccaagattctaattaagagatgggaaatggcatgttccattctctagcttcatatatacacttatcgggtgaaactaccagattacgaatagccattagatgactaacaattgaattcaatttaaatcatccaaagatatattttatatattgagattctttcttcatctcaaacttctaagttctaacatagtcatgtagttgaactttcgggccgaggcccataacaactccatctacttaaacgaaggttagataaagggacgaacaaaaagaatcagtctggtgtcagaaactagagtatgtacttttgtgtttgaattgtaacgtttgtttctttcttcagctcttcattggtttatcgacacagtacttatgtcactccaattgtgagaaaatcattctgcacagtcgtttcgaaatcaaggaaatcaaacaagagcaacaacaatccaaagagtaccaaaatatatttggctatagagagctatcattgtcttgtacacttgtccatgttgggctatagatccatatttgtgttgggctaggctcagtttttcttaataacacaaacttacttatcaaacacgtgttgtctttttggttatttaagtagttgacaaacaaaagtacaaataagctgttagggcaaaggagcaaaaacgaaaccacagagagaaagcctccgtctcccttatcaaagaagaagaagacgtgtataacaaaacactagacacattgtgaagatagaaaaaaatg

SEQ ID NO: 29464 - DNA, 3000 bp, Unknown; identical to SEQ ID NO: 14522
  misc_feature (1)..( 3000): 2750-1469P.txt file - cDNA_ID_3017673; gDNA_ID_2684126; Annot_ID_191112

SEQ ID NO: 29465 - DNA, 3000 bp, Unknown; identical to SEQ ID NO: 14510
  misc_feature (1)..( 3000): 2750-1469P.txt file - cDNA_ID_3017681; gDNA_ID_2684126; Annot_ID_191109

SEQ ID NO: 29466 - DNA, 3000 bp, Unknown; identical to SEQ ID NO: 14525
  misc_feature (1)..( 3000): 2750-1469P.txt file - cDNA_ID_3017734; gDNA_ID_2684127; Annot_ID_191144

SEQ ID NO: 29467 - DNA, 3000 bp, Unknown; identical to SEQ ID NO: 14523
  misc_feature (1)..( 3000): 2750-1469P.txt file - cDNA_ID_3017791; gDNA_ID_2684127; Annot_ID_191128

SEQ ID NO: 29468 - DNA, 414 bp, Unknown
  misc_feature (1)..( 414): 2750-1469P.txt file - cDNA_ID_3017814; gDNA_ID_1621090; Annot_ID_55499
ttcagttttgttttaacactctttttttttttgtaactgaaaaatttgtgttttcttcttggttttcacacaagaattctagaagattgatagataaaatcaagaatgcttaattaacggtgacttttgacttttataaccttatagtctactgtgatttgaatttgtacatagaatggtcctctttatttacttatcaaaaaaaaaaaaaaaaatcaaaaaaggtgggccaaagaatgtttatttttcaaaattttgatttttaaggtggttccaaaatttggttcaaaattttcaaaacttattcagaaacttcctctgttcaaactcttgtcattttcctctataatatcattaaccccatctctcattatttattccagctagagagacttgcaataattgtaaaacatg

SEQ ID NO: 29469 - DNA, 3003 bp, Unknown
  misc_feature (1)..( 3003): 2750-1469P.txt file - cDNA_ID_3017819; gDNA_ID_2684129; Annot_ID_191169
ctaacccgttatcaagccatttcttaatggatgttctgtcaaatgtctgtcctgaagctactattaccggatccagcatgagttctgttgacaaaggacaccggaaatacgggggtatcgagatacctttagccacttcaagaaactcagttttaagcatgtgttcacggatgcacaagacgagttctatcaactgttcggtttgttccatatcttcttctgacttactggcctgggatcttatcctctctttctccacagtaatgctttcctttaagagatcttggtttgatatcaatccaagcatttgaattatgctttccagatgattgttatccaaagaggtaatatcatctttctgattccgtaaagcattctccatgagttccattaatgtcccctcttgcttaaaactctcagtctcctgcacgcagcgctgaaaccgttccaagagattagtacaagtggctgcatataagacacagagggctaaagaaatgaagaaattctagtttacctcaacactttgtacgcttgaagtaaccggacttgactgtgataactgaagaagtatgcgactaatctccaacgaacaagtctggacctttcccaacaaaacctcgcattgaaacacctgcacaacaacgatgtagtgaataatgctgaaagctgcagaaaaactgaaatggtagcttatatcatcaacttacaccaaacaacttgctcaactttggtgaccagtcctctaagaactcccgagcctggttaacaacagaatcaaggtcttcacatcctttatataaacagtcatcagaaggtatcttgcaatcaacaacttcatcgagcaacggtttcaagagcttcaacaagagaaccatatttccaatacatgtttgaataggattaaatcttatagtctggcacgcaaccagatgaagataccgagatatactgttaagaagacatcgaacaggaacaggatccatttaactatcaagctgaagaacacaaaaaacaaaacacacacatatcaacattataatctttcatgacttttaaaaagagtgttggttccttgatagtgttatcaattggattagtaaaaatattcagacttttctgtgtattatatggaaaaaaagaaaggaacacaaagttttctgatagaacagacatagaaaagcattgactttttgacttattagtctgagaagacagacatgactagattcagtcaattcttgtggaaaactgaagaaaaggaagtaaatttaaacagagacttgacttgagcacattctctcaacagatgtttctgctttctagtttcctttttcccttatatttgattaaactaatttatccagtctaataaagtgtggagaaaacaacagagttactctgaatctgataaacctatcaaatcgaaaaagaatctcaacaaagaaataagacagaacagtgaaaacccacaagtaaggaaccctaacttagtacaaagctaatgtcgaatttggaaaaagattgtaacaaaggaatgtaagaaggtggaggtacccgagaagattgaagtgatactgaggctggaagaagaaaaggattcgaggtatcaagggaacaaggcggcgatcattcgagcttgcaagaggaataatgaagagtttcctaaattatctaaagattggttctttgcttacacaaagagaagagagaagagagagagaaagagactgatgcaagaattcaggcaacgaaacagagcagaaaaaagggaaaaataataaaatagtaatggcgaggggccccaagttggtttttttgcagatatctctactgtttctgtaatgttggagttggtacatcttaaagctgtctcttttttctttctttttatgtttctgatgatatataatattaacacttaagtaattttactcatattgttgccttgacaaaggaataagttaagggttgaaatttgtgaattttaaaaatcattacttttgagattaggaattatgtcaaaggagaagaagattcattggtccttggagattataaggtacaatgattaactttgttatgttctagttttgggtaatatatatgggtttctatctacatcaatatttcagatttgcttttttctttttgtcaacatacagaattcagatttttgggatttccctatttttcctacggcaaataaagtcaaagaaatattaggccgtatgaaacaaattgatgggttaagcccaattgataggctaggcccgttattgttttgtaaagaactgaaatctaatctgtctatggtctttctcagtttagaacaacaaattcttgtttggagatatatgctaacttgtgttaatgtgttgttctcgttggggttacttgtttctccaatagacaatgattactcggtaatgattccactaattggtcagttattcaccgtacgatttaacaacttagcttttgaacctttggaaagcagagtttaaattctataattcgtataaacaataaaaatattgaaggacataacgaatagcagagtttaaaagttctaattatagaatttaaatccggaagacagaagcgccaatcatttaacctttcacaattagcaagcaatttttaaccaacaatgttaaaaatttataaccaaaacgaaacgtaacaacaatcgaaaaaataacaggacaaaataattatttgtttttctctcttgattgagagaaaaacaaaaaaaaaatttgaaaaataattttttctttgtaactgatctttccatacttttgattctctgtttcgcttcggcggaatcagagaatcgtttcaagttacaaattcgcaacaaaaacgtgttgtgatatcgagtatttattcgtttacggggaagaaacatttcaagtggtataagcatttcctgattgtttgaaactttgaatcgtttaataaatttaaaaataagaaaaaaggatttgtagagaaatg

SEQ ID NO: 29470 - DNA, 3000 bp, Unknown; identical to SEQ ID NO: 14535
  misc_feature (1)..( 3000): 2750-1469P.txt file - cDNA_ID_3017823; gDNA_ID_2684129; Annot_ID_191168

SEQ ID NO: 29471 - DNA, 3003 bp, Unknown
  misc_feature (1)..( 3003): 2750-1469P.txt file - cDNA_ID_3017827; gDNA_ID_2684129; Annot_ID_191167
cactacacccttcaatatgtctctattcatttctcttatgcattttctcttgatacgatcgcgactaccaatcccgcaaatgaaaaacttataataacatcaccacaattttttttgcactgtcatggcccatgcatgggtttcagcaatgttgttgattgacttgtcctacagtcctagccgagccaattggtgctttagacgtcaaaatctattacaactacatggacttcattttcttagaaaaatgttttgtggagcagtaatgagatcagcttgattaatgacttcatgagatcttaacccaaattttgaaatttttttttactgttttatacatatgtttataattgatccccaaaactgtatttttgctttaggacccaacaacaccaaatactgtataaactaaaatttagataaatttcagttattctttaacctagctccaattttggtaaattaaattgtcaaaccagataaaacaaatgtctggagtgtaaatagcaaacgaacaaaagaaacgtatggagttggacagttgttgttgaacctggggtctgatttagtaaagagcttaggctgggccaagtttgggcctaacagcaacactaaaaaaagatagattcacttgtttacgtcaactatgtttcgcaaattcacagagcgtattaaatttaaagaacgggataaaaaaaaaaaagagagagaaagaaataaaaaaaaattatatggagcttttgaagttgacttagacccaaaaagtttaagaaatttagcgacactataaaggcctaaaggaatcctatcctccaccttcataaagataaaagattagctaaaagcttcttcttttccatgatgcatgatcaaaagataatttaactagttcatgcaaaaatacggaaatacccattgttgatagaaacttatgtttcataaactaataaaacatttttaaaaataactgaccaaaatgaacattttgaatgctattatccataaagttgatgtcaaaaagatttggggaaaaaggtactccatctgttcctttttgtttgattgtttagaaaaaaaaattgtttcaaaaagattgattttttagattttcaatacaatagttattagttataattgataaattgtaaacttcaatacaaattagtaaatatcattaatttagtataagataagcttaataatgtcaaaaagatttaagaaagtaacaaactttttcctctcttttcctttcttttgattgcctttagtttgtgtcttgactcttgatttttccaagttggataataatgcaggcttcatgataacattcaatattcattgccgtttacattgtacacataaacataacataacacacacaaaagatgtctccatcacatgatagatcaaattgtacgtcacacagtgttgtttactttaattttgtaccaataattataaaagctgatatatactgtatttgattattttaactaattacattttgaaaataaaatttttagaaacgtacgtataagttaagagtatgattaaaaaacaatttttgttaaaatccttttttgtgtgttaaaatatttagaactttttttttaacacatatttagaactttcttaataatgaaatggatgtataaaacgatatatcgaatctagtattaatgtgtacataatataataacacaaatatacccgaatagagggttgaaaattgaagaacacgtcaaaatatagaagccatccgagattatcgagaataatgttgggaagatgttgctaatgacaaagtttgaccgttcgagctcgtcgagcccttcggttacgtcttccaagactttgtctagttgcatggcattttccgacattcctaaaaagtaaaaactcaaacactttgaaaaactccccaacggccgatgcttgtcttatcactttcgagccaatatttgaccattctttgttttgttttgcttagtttacaagattgattgaacacagtatacaaatgataatagcgtagaagtaacaaattgtaaagaaaaatactcaaatagcatgccatcaacgaaacaaacaaaagatcatctttaagaaagaaagaaaataaaaggaaaggaaagaagattgactttttaaattttaaacttctgagggttatgacatatgccggaagaaggtgataaagtgcaccgtgcatatcatcatctcaatgtagaaatcaaagtttacatatcaatttttttctccaagaaaatataaaatgtaatccattaatttggactcatgatgccactttctcataactagcagagctcatcattccttttcatcatttacttcccttcccaacttttcttcaccaaactatgattttgcagaagaaaactcgaaagtcattgttaattaataccatttttattttactgtagacaatatttcccttataactatttatagaaatactccaaaatactactagtgtattaaaaacagataaaattcaaaagcaaaattttaccaaaaaaaagaacttaaaaagcaaatagtatcattattgtttaacaataaagtttacatttccatagaaatttcaaaaaatcggatacccataattttcgaggtggactatcataatcaactctaattattttatttttctagcattgattagtgttcacaataatggcataaagcagacgcattaacttttgtaattggggttttacctttcgttttcactttaattattttaactaatcctttttacaagacccataaagaacaaaagtcaaaataatcgatagtctcaaaaagtcaagaatctctcacacactcattatgaacacgcaccaccaaacaacacttccattgatcctcataataatctccaccaatactcatttccctcttggattcttcaaactcctctctgaaagttctcatttttggtttacatttcctttgagtccactgttacttactaaaatg

SEQ ID NO: 29472 - DNA, 3000 bp, Unknown; identical to SEQ ID NO: 14536
  misc_feature (1)..( 3000): 2750-1469P.txt file - cDNA_ID_3017835; gDNA_ID_2684129; Annot_ID_191165

SEQ ID NO: 29473 - DNA, 3000 bp, Unknown; identical to SEQ ID NO: 14537
  misc_feature (1)..( 3000): 2750-1469P.txt file - cDNA_ID_3017851; gDNA_ID_2684129; Annot_ID_191161

SEQ ID NO: 29474 - DNA, 3003 bp, Unknown
  misc_feature (1)..( 3003): 2750-1469P.txt file - cDNA_ID_3017863; gDNA_ID_2684129; Annot_ID_191158
ttgtacatgcgtctattttattggcataatatctgagaactcgttggagatgtatttttggctgcagttgctcaagtacaatgtcatttgaccttaggaactaccaagaatcgtgattggttcaacaaccctcgggggattagggtttaggtaagtataagaaccctaactttgtaagtatagcaagtactgaatgatgtttgattgttaggtttgtaatttttgtgtcacaatgttaaaaggtatttcacagtggtaaggtgctttatttgcgatttgatttggcataggaccttataagttctgacactgtagagaacctatggaaccttttcttatgtgatactataagaaactcgtgattttagctgcatctgattgacgttttatgttttgataatagtttttggagacatgttgtcaaagtagaagtaaagacaaatgtttctttaattcgtcggactagaaatcaaatcttcaaaagccatttttgtcgtcccaatcgactttcaaaaaagctttaaattagaacgacacaacaatgaatgatttaacccacaaaaagcttgaatccaaaaggtttgacttttcagaatttagtcttaaaattccgtaatcctatatattaacggataagatccaacagagcttcagaatttgtccttaactcatattcttcttattttctatattataattcgagggttacgtgtcatatgcctactactgacatcacttgcgtcttccttttctcttgtcctctttcgtaatcattaaagtaagtaccttttaaaaaaaataaagaaaccaacggtgggagaggaagcagagagagagaaaataaaaaaaacagaaaacgagaaaaccagagattcatcaattcattgattctttagttcttcttcgtccgtctaaccttagaaacttatagctacagcgagagaagacgaagaagaataagaataagaagaaagaaaattgaatggcggcaagagccaacaacaaatacacctctatcaacttcaaccacatccttcacaaagatcctccttcatcttcttcatcttcctcctctgcttcttattcctccgtcgctcgttccaatggccgtatgctcgtcctcaccaaatcttcccccaaacctctaagatctccctccgctgctcccaccaccactacgaccgcacctcctatctctacagctccgaggattccttcaaatcaagccatctctgatccagatccgagtcagatctctcttcgtcccttaggtcatacaggatctagttcctcgctttcttttccaattcggactcctgaaatcaacaaggctccggaggtaaatgctccaactccggtttcattgtccccgaaacctgatcggttcgtgccgccgcatcttaggccaggttttgttcggaaagacgagaaacctggactcaactcttctcgagttagagatccgaatccgaatctgaatcagagattgcctaaccaggaacagccacggcaggaatatttcggttatggacagcccggacggcccaaatcgggcgggtatgagaggatccgtacggatccgagaataaccggaaaccgacccggcacctccggatggtatgttcatccctctcgtaataatcgttgttctagcattactagagagtgtctaggcttcttagctctgcctcaacggaattatcttgagatttattctacgttattgatagtttttgcctttcatgctgataattaagtaaaattggaaatgagattattctggttgtttggatttttgctgaagaagtagtcatgggagccgaatccaccatgtgtctgaacattaggattcgtttgaccatagagaatgtcatcttcacgtggattcgattttgagatgagaaagtaatatgaaggtgttttttgtgtggagaagctactcttgtttgtcctttactctttttttgtgtgtttgatccaaggttgtgtacttaaagctatatatattatatgatggaatcatatctgttcattgctcatctcaactctattctgtataattttctgggggaagttgtaactaaagttcatttgtctgtgcagatgagcttgctgggatgatgcctagttaactcactcgatgatggaggtggaactttacttacttctgaacgttgaaaacagtgacttgtcatttctcacttcttttgatcaaaccagagattatcaaagaccaacccccaagattcagtagatttgtagaagaatgttgttttgggatcaggctgggtgatactatgacacaaataacacttgttctcttacttgtctcactcatgtttcaaaaactttgtttatgtaactataattctgttatagcacgtgttgtttaggtattaatctatagattctattaccatttggtttataagaaaaacatttgtttctggatgtatgtttcagcaaaagaaatttccacttttgtttatttcaccatttgcaattgcaagaaaatctaactaacaatagcaaaaatatagacaaaataagcaaaatggaaaatatgtacatacttttttgggagagatccacttgtaaaagacaaaaggtgactataattgactaattgaggactgagaacatattgggaaggattttgtggccattggtttgaagaccaatacgttatttttttttatgtcattttttcgaacgtatttgaaaacccaatttaaaatgtattttttcgtgtaaaaaatgatgctaacatacttgtttgattttcatctaaacaaattgcaaagcagttttcataagcatcacgctaataataccattgatgcaattaatgaccaccgatcgctgaatcaccgcgaaaacgaaataacccgttaaattacccatttgcccctccgtctccattaatacacactctctgctttttttgagatctctctcagcacaaagcaatcacaaatcaaagctttcagagatccaaaaatg

SEQ ID NO: 29475 - DNA, 3003 bp, Unknown
  misc_feature (1)..( 3003): 2750-1469P.txt file - cDNA_ID_3017867; gDNA_ID_2684129; Annot_ID_191157
gtctgctcgacatcttgcgtaaatgtatggttatgctacgtctgaatctaattcagaaagaaactcatatcatgataaactgcttgaggctgacagatggttgatgtaaaagttcagtatgattaattctgtagcgctgctattctcttctttgcttttgcttgtataagcataagttacagaaccatatactttgattataaccttacctgtctaatgttctttgcctagcaagaatctgcactggtatcttctttcttagagactatctaatgctcctgcttgcagagtgcaaacaaaagtcggaggagtatgagaaggaaatcctggattggaaaaagcaggcttctcaagcgacaacaagcataaccaagctcaatcgtcaaatacattcgaaggtacaatgaagattcatcaaaccctttcctaaagatctgatatgtttgagtatagatacactaaagcttccatatgctatcaggaaacacaaattgagcagctgatctcacagaaacaggaaataactgagaagtgtgagctcgaacatattacccttcctgtcttatcagatgctatggaggaagatgattcagatgggccacagtttgactttagtgagctgggtagagcttatctccaagaacggagaccatctgctcgtgaaaaagtggaggcagaatttaggcagaaaatagaatctaaaacatccgagattgaaagaacggctccaaatttgagagcgcttgaccagtatgaggctatacaagagaaagaaaaacaagttagccaggagtttgaagcggccaggaaagaggagaagcaagtagcggatgcctttaatactgttaagcagaagaggtaactcgaaatttctcttgtgaaatgatatctagagctttgaagacaattgttaccaaatatcaacgactatatggtattatggtgaaaccaaataccgaacaagtaaaagtctgaagattctagttctggggaaattacctgtcaaagttactgtttggatacaatgcacacacatgcacatgtacaaagaacatattcagttttttcccaactaatatattccattatagttttttctgctcatttcaaattgttgtgcaggtatgagctatttatggaagctttcaaccacattgctagcaacattgacaagatctataagcaactaaccaagagtaatacgcacccactgggtgggactgcttatctaaacctagaaaatgaggatgatccgtttctacatggtataaagtatactacaatgcccccaacaaagcgatttcgtgacatggaacagctctctggaggagagaaaacagttgcggccttggcgttgctcttctccatacataggtatcctcaacgacctagatatcccatttgtttcaatgttaaaagtgattttgtaggttcatattgatttatctgtggtgtttagtttcactctttgaaattggactagaagatggtgatcttgccagatgaaatttgttatttgtgtctggaaccatcagatttgtttgactccttagcattggttttaccagtctggcatcgtcttaggttttctgttcctagtaaaatacccatcttcaaaatcgctttttgtttctttacgatctgaaatttggcctacgctctcgtgtaaatatagcatggttgttctgcaaaagaagtttccatggtcagttgttatgaggatttgatgaagtttgtggtgttgattacctttccatttttcagctataggccttcaccctttttcatacttgatgaagtggatgctgcgcttgataatctaaacgtggcaaaagttgctaaattcattcgtagcaagtcatgccaagccgcacgtgacaatcaggatgcagaggatgggaatggcttccaaagcattgtaatatctctcaaggacagcttctatgacaaggcggaggctctggttggagtttacagagacaccgagaggaggtaagcagaatatccacataaatcttttgtacatgcgtctattttattggcataatatctgagaactcgttggagatgtatttttggctgcagttgctcaagtacaatgtcatttgaccttaggaactaccaagaatcgtgattggttcaacaaccctcgggggattagggtttaggtaagtataagaaccctaactttgtaagtatagcaagtactgaatgatgtttgattgttaggtttgtaatttttgtgtcacaatgttaaaaggtatttcacagtggtaaggtgctttatttgcgatttgatttggcataggaccttataagttctgacactgtagagaacctatggaaccttttcttatgtgatactataagaaactcgtgattttagctgcatctgattgacgttttatgttttgataatagtttttggagacatgttgtcaaagtagaagtaaagacaaatgtttctttaattcgtcggactagaaatcaaatcttcaaaagccatttttgtcgtcccaatcgactttcaaaaaagctttaaattagaacgacacaacaatgaatgatttaacccacaaaaagcttgaatccaaaaggtttgacttttcagaatttagtcttaaaattccgtaatcctatatattaacggataagatccaacagagcttcagaatttgtccttaactcatattcttcttattttctatattataattcgagggttacgtgtcatatgcctactactgacatcacttgcgtcttccttttctcttgtcctctttcgtaatcattaaagtaagtaccttttaaaaaaaataaagaaaccaacggtgggagaggaagcagagagagagaaaataaaaaaaacagaaaacgagaaaaccagagattcatcaattcattgattctttagttcttcttcgtccgtctaaccttagaaacttatagctacagcgagagaagacgaagaagaataagaataagaagaaagaaaattgaatg

SEQ ID NO: 29476 - DNA, 3003 bp, Unknown
  misc_feature (1)..( 3003): 2750-1469P.txt file - cDNA_ID_3017870; gDNA_ID_2684129; Annot_ID_191156
caccgatagtgaagagatcaaaatcgtagtggcggtctgattcagctccattatcggtactggcacaaacagaaaaccggcgagagtggtaatagcggtggtttgagagtagggcgatacggggacggagagaatagagagaggttagggttttaggaagcgagagaaagctagaggaagaagatgatggtagatgaattgcgattgggagttttttgcagaggaattgaagagatggagaagatgatgaaattgtactggtaagcttcggggtcgaagccatctccacgattcttcttctctctctctctttcttttttttttcttttttagtttgggtgtgtgtatttatgtaaaagctttatttcgataattctacttgtggcatttagatttatgacatgtcttattgttttttaacaatttataaacatgtttttatgtgtggtcgtaaaacgctaccaaactgacaataactccacctacgcccggtttatgacacgaatacaaacttcatcaaatctaaatgatgacttagtaataccattttgatgtaatcacttatacatacaagtggaaccaaaatcttttaatttgtactattagttttatacttctacatcttacccttttttattatttttgtacggtttactattttctgtaccgttagaaagttatacgatttgtgttatcaacgtatgtacctgtaaactataaagggaaaaatatcaattaatctcctaactttcaaaaaatggtcattttatacatcaatttcgtatgcggctgtttaaaacatgaattaaatgttgactaacttttaaaacatgattattcgttgatcatgccaaaatagacatgtcgttatcagtcattaacggaacttctaacgtccgttatcatccgttaacgactttattagtcaagttttaaattgtggtcaatttaaacatcgactttatatgtggcaattttaaacatgaactaagcgttgactaccatttaaaacatgagaaattcgttgaccaagccaaaataaacatgttgtcatcattcattaaaagaacttataacattcattatcacttgttaacgactctattagtatccctaaaacgactttgttttgagaataatcaaaagaaaatcaggattgttttctaaatgaaaccccagttccccaaatctatttctacaaccgctcaaacaagacgaacaatcttataatgagtcttcaatttgcttccatgattcaatttcaaatttaaaacaaatatataaacgaaaatacctttatttgcttccaattactgacactgcgattatctctttatcaaactatgttcttgggttctacttaaaactttttgatatggagatttcatatgggaaaaatctttatgttctttcgattattctcaaacgacgttgttttggacagattaacagttattaacgggtttctaggttctactgataaagacatgtctattttggtctggtcaacgatatttttatgtcttaaatggtagtcaacgtttagttcatgttttaaatggccacataaaaagttgatgtttaaaatggccacaatttaaaacttgactaataaagttaacggatgataacggacgttagaaattccgttaatgactgataacggcatgtctattttggcctggtcaacgaaagatcatgttttaaaatttaatcaacgtttagttcatgttttaaacggccatatacgaagttgatgtataaaatggctattttttaaaagttggaggattaaatgacatttttcccaaactataaattagcaagactttttaaccacacttttgtggagcatccaccacgacttttaaactccatgaatcgttgtacaaagaccatttggctatggagaatcttcatggaagaaccagaaataactagctcaacttcccttgattcctataactcatgggataccgacttgagtgattaaactagaaaatcgtgaaaataatgtaattggctgcataatagtttttttcacactattaaaaaaaaacttgcaagtttatagtttgatccgtgcatggacgagattggatgtcattcgtggtctttttccggctatatttgactaccttcaagtttaagctacaaaatgatcatagaactaaagaatggttagcaatagcaatgatttaataaccctttgacattccttttttagttcaatggattctaagcacactatgaaacaatatttttcctaaatctttaacacgactattttttttttcttaataggatttcattgataaaaagatttaaggtgaattacaaaaagccgataagtatatgaacacttccgaaaacattagtcggcgagtacaaaaacattatgcagacaaaaaccaagcaaggtaaacaaaggggaaaaatgaacaaacatactacacaaacatccatcaatattttctggatcagaatctagaaacccataaaaagatgaacaaaacctaaactttaccaatttaacaaatcatttagaaaacacacaaacaggttacaatacaaaaatcttctttacaaagttaaaaccgaatgaaaacttgacactactaatctataaacatgagtatatatagtttttcttgcaaaatatcataaaaacttgattattttttttaaaaacataagatagaacaatttagtcgagcccatacgaaactacgccgtatcattcggcccagccctttgattaaaaaattaaacgcactgtgagtctgtgaaatctcctcggcttcaacttccggattaaggggaagagatgaaattctgaaatcccttgagagaaagatttgtttcgcctctcaaaacattttcaattcccgccaattttcttctccgagaatacccccaaccttctagaaaccctaatttggtttaatttcattctccactactttctctgaaaccaaactcgagatctctcccccaatcatg

SEQ ID NO: 29477 - DNA, 3000 bp, Unknown; identical to SEQ ID NO: 14526
  misc_feature (1)..( 3000): 2750-1469P.txt file - cDNA_ID_3017874; gDNA_ID_2684129; Annot_ID_191155

SEQ ID NO: 29478 - DNA, 3003 bp, Unknown
  misc_feature (1)..( 3003): 2750-1469P.txt file - cDNA_ID_3017899; gDNA_ID_2684130; Annot_ID_191219
caagcctcctcataagatctcctctatcccacggcctgcaaagaccagaaggcgatgttccagcaggaaccttcaaagctgaagacctatcaatggtagctaatacaatctttggctcaaccaatgctaacgcagatgaaggattttgacgcttcttgcctcttgattgttgctctacagaagaactacacaaaccaaaggatatatacataagctgacgcagaatcataacatgaacacaagctctgatgcaaatatcacaaaatcaactaacatctgaaatcaatccaaagagcaatgtatatgaacacaaatacaaaatcatctctgagattaagcaatttatccacacttcaatcagcgaaacaatggaactcagataatggagatgaatcgatgcacagtgtaaaacagtaaccagcaagaagagactgacctggtggaggaagaaggaagctgagatttcgatggggtaaagagtttatccatgatttggtggaatctcttctctgaatcttgtgccattgtttatcttccagaaaaatcgcagcttcctctagctcgtctttctgatttcgtcctcctataatcgtataaaccctaatctaatagattcgcttccaccttcttcgccgcggctcaggtgaaggagtggtgtttagatggcggtgacggaacaacacgaaaacgacgggatctgctgtcgtttagtcctcttcatatttattccgcaaatcggaagtctcgaatattttatctattttacgaatagatccctttattctcacttcatcccatgtatcacccaaacatttcaaatatgtaaaaagaatccaaaaacacaaaaaaaaatcatcaaattatttaacgctttatgatattagtcaaaattaatacgaaaaatactcacaaaaacagattttcctcaactagtcgtatttctttgaaaacaaaaattcaaatttcaaagtagcaaataataagtcaaaacaatatctattagatatccctcaagttgtggacaagcaaagccaaactagtaacaaacctagctgcactctcacactacttaaattcaaaccttaagcaccacaaagcagaaaaactaaacattttcttcgagaacaatccctcgatatcagaaattaaacaaaagaggattcaaatgggtggacaaaagattgttctgctttcgatcttcgtatgtttttacgtgttttcacttgtgtcatgtactgaatttgaagctggaggagaaaatggttggatcattccacaatctagtaaccaaagtgacatctttaaccaatgggcttccaagaaccggtttaaagttggcgacactatccgtaagtttttcttttgcttctattatgaatttatgatcatcgtaatgcatatattgagttttgttttgatttggtggaaaggtttcaagtacaagaaagactctgttttggtggtaacagaagacgaatacaagaaatgtcagacgaccaaaccggaactttactccaaccacgatgatacggttttcaaattggaccgtcccggtttgttttatttcattagtggtgtctcaggccactgtgaacaaggtcagaaaatgattattaaagtcatggaggtggaatctacgccgcaatctcctccaccttcctcgtctctacccgcttcagctcacaagaaaaaccacgccgtgaggaaaacgagtcggttcttaggtgccggtttagttacaatttcgattctggttattacggtttttagtcttgtgtagtatggaaaacaataccactcggttatggcggttcagccgtcgagttttattccggtttaggttttgttgcttagtttatttaaggtttttttattcatttgataggttgatttgattttggtttttggtcacttcagagctttaaaataattgaactcatgtcttattttataagtttagtatccattttaattctattaaattctaggtttattgaaatacaatgttttttacctttatctaattataaacaaacaactttcaattttctataacaaaacaaaatcaaatattttgacaaattttctaaatatacactttttagaaacatctaatattttttttagaaattcaataaccctactcaaagaatcaaatccaataatggaacacgaaattattttgttatataaatttttataacaaattatgaaatttataactcattcaaccgagattgggtcaaccctataaccttataaaatttccaattagcattttgctctagctataaaaacattgtcaaaacatgatcaagtgatgcatcaaaatacatagtttgtagtccggtctaatcgcccgaacctagtttacctatacatggactttctgttaaaataaaccgacaaaagaaaactataagttatggtcttatggacatatcagaacacaaatcaatcgagcgacaaatgaattttttttgcaagaagtggataccacgaatggattacttgtccgttcacaccttatcaaaaatcaaccaaatattattctttgtaccatttttaaaattttaaaacaagatacattcatctgtttctatcaaatgcattagtcaataacgcttccatccaacggcgaataagaggtatacacgtggtgaggcatagttgattcagcttttatacacaaaagtctcgaggaacaacgtgagaagctctaacaaaacgtgaaggccacaactattatcaaaggcacataaaacacacgaacacaaaaaaagacaaagacaatgattattcagacaagtttcgtacctatttgattctctacattcctctctctcacacaccaaactcacatacacaatctctctctctttctcaacatgtctatataaatacacccacgtctatactaactcacatcatagattcacaattttgaacaaagaaaatttctttggagagaaaacttagaacttagattgacatagagaaatg

SEQ ID NO: 29479 - DNA, 3000 bp, Unknown; identical to SEQ ID NO: 14544
  misc_feature (1)..( 3000): 2750-1469P.txt file - cDNA_ID_3017905; gDNA_ID_2684130; Annot_ID_191217

SEQ ID NO: 29480 - DNA, 3003 bp, Unknown
  misc_feature (1)..( 3003): 2750-1469P.txt file - cDNA_ID_3017938; gDNA_ID_2684130; Annot_ID_191207
agatattccgtaacagaatcacaaattgttaacggagaatgatatttacccgaaaactatatctgactcggctagtgatccgttatggagtttgagatgaaacttatctttggtgagaactcccatggagtagctatgatcagcatattcaatctcgtagtcacattgatgacaattttcacaatgttctgtcagttgattcctttggacttctacacaaaaggcctctgaagatctcactaagttatcttttctaggcttatatagttgatttgctccctaaaaccaaaatccagaaagttcatcactaaattcacagagagattctcctaaaatctaaaaaaacttgatctttattctttaccttagcacaactagtacaaggagcatcacattggatccaagtcaattcacttcccgtatcaatatcaagatgatagtattgtccatcttcaggctttccaacaagaatgcgtgtataatacagcctgcaacaaaagcaaaaaaagacaatctttgtttacttgtgctttaagaaacaaaccacacattcagattacagagtattagatacaatgcatacatacccatctggatacacattaccaccgacgggaaaaatcgtagtggaggagtcaatagaaccggcacttgtagataaaacatcgttgacttttacagggttgaccagctctaaatccattgattccacaaagttttcattctctaaacctaaatcttcctctaagatccgctcgtggaactctcgagctctcaatttgtgatatacagggaaaacaaacgacgccgtttcacggagattatcgtcgtcgtcacggttcctctcatcaggagaaaccctaaacatttgaacagagttgggaaaaacagaggcgtagaaagcaaccgcgagaagcgagattccgagaagacccagaactaatctcggcgaattcattgagagatccgagaacaagaggcgagattgttggtttcggtgaagtgggtcgggttgaaaactcgggtttgggttatcctcgggtgggatttcgagtgggtaatcgtggtcagtgagagtgaaagcagagattgttttgccttgtgaaggatcatcagatggtgggagagtgattatgactacgctgtggactcgttgttgttgttgctggtcatgaagatctggttccattctgtgatgtctccgatcgaattgggctggttttgatcggagagagaatggaaacaggacgagaaagaaaaatggcagactaggagtggtcaagagtcaagaggctttcgttatacgagacggaagctgcgaggaaggagagggttattttatttgaagtaaatgtttgaaaaatatgaattacacttaccaaaaaaaaaaaaaaaaaaaaatgaattttacttacacataaaattcatttttattaaaccctccctataaatgttctttttaaaaaaaaaagtatatatggaggacaataaaaatagcttttagtaaaaaactttaatagttttaacaaattttataatttcttgctttacatttatttttcctttttcctgtcaatttgatttcttttatttaactcaataaaaatatatgatacaactttaatttacatgataaaaatttagaaataaataaatatgtaatcataaaataactatacaacatacatttcaaaaacattatgtcaaacaagatatgttaggaaaaacaaaattttttacatgctatacaaaaatatatataaattagaaaagaaacataaaataaaacttgtgtgttcatgtatttattaactattgtaatgttaattttatgtgtgttaaatttctaaatataatattattgctgtataaaattgtttttaaatgtaatgtttttttattttaataatttcaattttgatgttaatgtatttaaatttatatgaatataattgaaataattgaatttaatagaattattgtgagatatatgcaagctataaggactcaatgaaaatatgtgaaagattttaagggtgttatgcaccctcaaaaataaaggttttaaggtttgttggagttaaaaaacttcaaaatttaaaagtttgaggtttgatggagatgttctaatcctctcgtttttttctcttcgatatatgaactgaaaaagtatgaggaccccgaaaaaatcttggactttctttcttgtcatataatataaacaacaacctgcattactatttactagtttgaagaatatctgagatgtagtatttatactatggggttaatgctaataaagagatggatcagtggcaagagcaaagaagcaccacccttgtagtttcaaatatttgttgagttttgctttataatttggtcatcttagtaacaaataaaattgaatatcagaattcaaaagttaagaaaaacatattaattgacgaaaataatatatatatatatatatatatatatattaattagttcgtaaagttccaaaaaataactgtaaaaacaagaaattaagaagataaagtataaaagaccgaaatgggtgcaattttagttagttttagagtttggttattggttttactattttttcagttttaatttttgttatatattaaaagcttaaataaaattaaacatatgaacacatttaaaaaaatgtaacctaaaaaataaagttaatagtattattattttttaactctaaaattaatattattagtttgctactttgcaaactttaaaataaaataaaatctacaaaaatttgattgttgtaatttgtgtgaaatggaaaacaaattgcgttcgacccgtaggattattttcccacgaacgacttggccaaaaaaacaaaggaggccgaattgaagcaactacttttctccatcatcatcaccatcggcgaaatccgccaaaaattgatctccatttggaaatccagatcatgctctagagccctagtttagatctcgaaggaagacaatg

SEQ ID NO: 29481 - DNA, 3003 bp, Unknown
  misc_feature (1)..( 3003): 2750-1469P.txt file - cDNA_ID_3017958; gDNA_ID_2684130; Annot_ID_191201
aaaaaaaatagaaagtattttctaatggtaattgggatttacattatataaagcactaattgctgagataaaaccattcatcaggtatatatgtaaaactattctcgagataaaacaagaaagtgaatacacaattttcttgcctctattcataagaaataaacctgttttcattgtgtttatttaacaccaaaagcactcaaaattgaggcttaacattcagacaaaccgtaactatagaacataagaaaaacctaactattgaagaggttgcattatatcacaagtttaaaacaccaaagctcaagctgagtagcaaaaataggtctcttcttccgccaccaaaacctcaacaggaacgtctacaaaagccttgaccgccacaacgaccaccggaaaaacgaccaccgacgaaaagaccacgaccaccaccaggaccaaagacaggagtaccaaaacggctataaggttcctcatcagaagatgatccatccacagacatgctctctgcctgggctttacagagccaattttaacttcattatttgacctaaacaatgagatcaacagatccatcttctcttccattttatgaagacgaataccaaatccttccaacatctccatcgcatcagatattttcatctcagtcgtcatgtctttcttatctttctccaaattgtctgtaggcgtcgtgtccttaatcacagaaggagatgcttcagctttggttgcggatttattgtccatggagaagatgattagtagaacaacgcactagagctaggttaaaagagagaaattggagatcggcaaaaacccctaatcagctgcttaggaagaaaggtatttataagagtcttttatattctggcttggggcacaagagtcctttccttttattttatttacttttcccgttgttcattttttcaactaagcaagctttatctgggccgaggtgaggcccattaattgaattaaaagcccaaaataacaacaaaacattacctgattgtcggaaaatcagacggaaacaaaagaaatcaaaaatccgatggggaggaagaagggattgccggagttcgaagagtcggcgccggatggattcgatcctgagaatccgtacaaggatccggttgcgatggtggagatgagagaacacattgttcgtgagaaatggatccatatcgagaaggctaagatcttacgtgagaaggtcaaatggtgttaccgcgtcgaaggcgttaaccattaccagaagtgtcgtcatcttgttcagcagtatctcgatgccactcgcggcgttggttggggcaaagaccaccgtcctatctctcttcacggtgagtttttttcccggcgttctctctcacactggtgaaaatgcttagattgaaattcttagggtttcgtgtttttttccttagcctttgaattttgaattcagttactctttagtgtgtttgattgaatttgatttgaatttgatgtagagtggtctcaaaattcttcatgaatacctttgtgaaattgattcttcctttagatatatgtattgaattttttttgtttgtattgattttgtcaaaccaggtcctaagccagtagctgttgaagaagctgaatgatgttgtgtgcgtgattgatctttggtaagtaactggtgttgattagttatatagtgtgtattgcttagaagaggagaaaggttagactttctagcatgctttgtgtagacactatcttataactggacatgttatgtgaatctgtttgtggtaggagaaaattggaatatggatgtttggatagttatatgtatgaactgatcaggtcttagagtgacttagttttgcggaagttgtggatacactggttaattattgatatcaatctgactgcaatcacaaaggttaaagcttagtcatggactttcttcggtggttttagaaacaggacatgttttggaatgtatagaaatgaaattgatagatcttggagtgactcaattttggagacatatgggccgatattatagataccaatccgcttgcaattgcgtccatctttaatctgcaacagagctaaacctagtcacagaatttcattgatgaattaattatttgagatatgagatgttgtggactgtatgaagaaggatagagctccaacatttaggttttgattggtttaaacaatagttccaatagggttaaggcatatagtcaaaatctcaagttcaaattggattgatgatttttgtatttggttcaaagattttaaaggttttttcttgctccaatgacacaggtgagtgagagctttgattaccatacatgaatggagtctctgttgcaagttaatgctccacatcaaggttgttacttgatttatgcttttctgtttcgtaaaacatatattactaattggacttgggagttccaattggttaagctcagcttcgtttttcaaatgatttatatatatttttggcttgttgtacattgcgtccctgtttgtcgaaataatgaaattcccaagtacctttttgcatgcttgcaacttagtatatgtttttaagactttatctgataaaactaagaaagagttaactctaaaaacatcatactttccctttatttcaaaactgtaggaacatctttacttctttagtgttgtctaaatggattcatttctgaaatagttcatgaaatttttattaacctttaagtagtagttcaaacatctacggagtctattaccatatgttaaatggtgacaaagacaggtaaggaccacagacaaaatgagtcagaaaacaaaagactaacaaacaaaaagataaaacttagagatgggtaaggaaaagaagccataaaagacccaaaaacataatccaagtctaaccaataagatcgcaaagatatggatcaacttcggtacatgatgccaaatcatcactacagtgtcttttttccttgtacaacccaaccaaaaatg

SEQ ID NO: 29482 - DNA, 3003 bp, Unknown
  misc_feature (1)..( 3003): 2750-1469P.txt file - cDNA_ID_3017966; gDNA_ID_2684130; Annot_ID_191198
ctccaatgatatatattcacactgttaacttcaaaatggtaaatcaggttttagaagcaagaactggtttctacgagccaattgctactctggattttgcttcgttgtactcgtaaatcatgatagcatataatctatggtactgcagcttagtattccatcaaacgcttttttttcttcttatatttattttccaacgtttgttgatgttatccatctattgttcaaagagcttattactgccatcttctcgtctttgaaggtgaaacctgaggatgcaaaaaaataaattcgacttacaccaaaattatgctaatcttaagaattattcactttttcattccaaagcccaaaccaaacccaaaagggccttttatcaaaagcctatttacaacatataaacccaaaaaggcctttcgtcgagaaaactaaaatggctccgacgaagaaaggaaagaagaccaaatcggcggcggaatcaacgacggtcacagaatcttcaagctttccgacgtgtttgcgtctccttacaccttcctccgtcgctatcaccatccatgcgaagccaggttccaaagccgcctccatcaccggtatatctcctcttccattcatcggttttgattttgtgtaaagtctcggattttattgattttggtttcctctctatgatctggagatgtgagcgacgaagcggtaggcgttcaaatcgacgcgccggctagagatggtgaagctaacgcagctcttctcgagtacatgagctctgtaaagtttctctttcttcgcagataaattttcacttttcaagttctttgaaattgtttatactctgttttgctctcatatctggatttggttctcagatagtttgataatgtcatgtagaattgtgtctctgtaatctttgatgaatttgattagctcttgttgagccactagtcataaaaaatatgcacttgtgagcttccgtggactaaaggaatcaaaccttaacttggaggatctttgttaagatatatgtaacatagttgttgctctgatttggattgctatggtttatatgctgctttaagtagtgagaattgtttgctgctgattttgagagataagattaagagatgaattctatcatcatattcatatcctgacttctaaaatgttatctttgataggtattgggggtgaaaagaagacaagtctctctcggttcgggatcgaagtctcgagataaagttgtgattgttgaggatatgacccaacagagtgtttttcaagctttgtcccaagcatcaaaacctacctaaagatctccaagcctgtaactaactatatggagaaactaaatcatcaaaagctaaatggttcatgttcacttaaggtacgaatggtttgaagagtttcaggatttgtgatagagatcattggtctgatattactatgagtccatgattaatgtcatgtaaatctatagactattgcttattatataacaaagctgtgtttagtctagtccccaattgatctgaagtcatggatggttttttgatgtgtttgttaatccttattttcatgtaaagtatttaggatggttttcttttctctcttgatccttatttgtctttgtatatttcaaccgtttttgacttttgaaccaatcaaaagagaagaaacaataatgggccaaaagaagataaaaatgggctatggagaatcacaagtccaatttctctgctcacaacttgaacaacaatattttttttttcctaaaaaacttgtacaacaaacttaaaaaacaataatatgagaattggaacaaaatccttttaagtttgtaagtctaatttcaagaaccaaaatacaaaagtaatatcaatttctcaatacagttataaaactacttgatttgtggattttatacgttttaaataataatggttggatattccttacgatttttttaattgattagttatgcgacgacccgtgccatgcaggttgaagtcactttcaatgatcgttgtctcataaattacaaagaacacagctattttgtttctatttcataatgaaaagcgaatatttgtctgttcagataccgatcaggtaagcgatgcttaaagccaccaaaagggattctaaagtaatcaatgatttgattaagaaaaaagtcagaaaacaatatccatttgagtatttccatgtcaccaattggtttataacttccaatgatcacatgccgcttgtaatatacatcacctaaccaagcgatcgactccaaaaacgaaaccgtatttattattatcttaagactatagtctatacaatatacattacataatcaagatgcccaattagatgttttaaaacaacaaaaagatcaataggcccaattatatcttatcttaataaaatgaaaaagcaattgcatgaggaattatggatatatataaattacatgggctaggttttttttatatacatataaatagtttggagagataaatcaggtggaaccaagtttgttgtttgtgtttcgattgaacaacactttaattatttaatctttccattgtctttgcgtcttcttcgatcaatttatcaaattagggttccaaccttttttcttttttttccccgttgtgtgttaagtcggcggaaaaacttagaacagaacaaaccatcatttttccaggtaaattatattctaatctcatgttcttgttaatatctgatttttgatgatcttcctatgcatgtttgtcattgcgtctttctcttacgtgatagatgttcgttgacgcgatttgaggtttatttaggttccttaatagatttaacaaaaagaaattctcggtcaataatatttatttgagctgatcaatcatttgctggagttagtttgtgttgtcgtcttcatatgaatctaaagggtatatatatgttttgcattctttgttatagaaatttgaagaatagataaaaaaagattaataagatatg

SEQ ID NO: 29483 - DNA, 3003 bp, Unknown
  misc_feature (1)..( 3003): 2750-1469P.txt file - cDNA_ID_3017970; gDNA_ID_2684130; Annot_ID_191197
ttgatgattacatagcgaaatcgaagctcagtgagagtttaacctctacggtttggttagcgaagcacaagttaaccggcgaagaagcagtgatgaagtgtttcgacctctcgaagctcaatcgcaatctccgagactgtttaaacaacgaactggagtttctatcttctgttgatcatcccaatatcattcgtctcctccatgtttctcaagtactaacccaaaactgagtttttcaatatttcttgagtctatgaagaatatgattgatttgttttcttcaattttgcaggatgatgattttctcgttatggttttggaatattgtgatggaggaactttatcatcgtatattcaacgttatggtagagttgaagaagatatcgccaagagatttatgaagcaaattggtatctattgttatataggagaatgatttcactgcatttgcttcttcttgacttaatagtgtcatcaatgttttgatgaaggagctggtttggaaattattcatgataatcacattatccatagagacttgaaacctgaggtacttctagaattatagatactctggattcaagtttggttgtgaattgtgacaatagtatttgattggaacagaatattttaattgacggatctggtgatgatttggtgttgaagattgccgattttagtcttgcaaggtaaagttttttgaggaggaaagacatgcttatagtataaagatctttatatgtttcatgttcgtaagcagaaaactacatccgggcaagtatcttgaaacagtgtgtggttctccgttttacatggctcctgaagttcttcagtttcagagatacaatgaaaaggtgtgatattgtttttatgcagctccattgaatgataaggttttccagttttaaattcactgagaaacattgcaggctgatatgtggagtgtaggagcaatccttttcgagctacttcacgggtatccaccattccgtggtaataacaatgttcaggtgagatcttgaattagttagtagtattcttttatcaaaaagctccaatgcctttaacttaaaaaccttttaccactaaccataggttctaaggaacatcaaatctagtacagctcttccattctctcggcttattcttcaacagatgcatcctgattgcatcgacgtctgctcaagattgctttctattaacccaggtacagaaaaatctcatctgtttgcggctacactatgtacacatatcgctatatatattcagttcttggttaccattttctgcagttactcgtctctctttcgatgaattctacaaacacaagttcttgaggctatgattgatttgtccttgaggtaaaaagatgaagtcgtcttaaaacttctgttgaatccttgtatagattctcgtgcctgtatccatgtatataatttagttgaagcatgcattatatttgtatttcagctgagctagactgacatttaacctagcaaatatgtttttgattctcagagagctgccacactgggcatagaagattttccttttcttggccgtataaagaacagtagggtttgggtcaaggacacaacattttcttcaaggtatcttgaaatttatgtttccattatatccatagaagtggtggctcatatctaaattatactgcctttttttttttttttttctttcagatttgcggatctagttaattgattgtattattcatcagtattgggatacatccaataatattgagtcgtcttgtttcagacaacatggaacaagggaaagaaaagtggctacaattaacggaagacttcaatttgacctttcacaggttttttttgtccctaaccagtttaaatattgttggagtcatcattatattagatgctttattttcaaattaattgcaaaaccatcagccttcttcttcttttatatttttaggcaatgctaagagatcaatagttaagttcatactattgagtgtagaagattatagtttacaccattatgtttccatggtttctcagaattttgattttgttctattggtcacttctttcttgcagtaattgttctgtttctatttggtttcaactgttctttttctctgtttctagtccagtattagaatcttataaaaagataaaaacttaaattgcattcgtatttgctgttacaggatgcatacctcccacagaggcttcttgaaaacctgatgtatatttacaatactattgaaatggctcgtgtaactggagtccctacctcctaccttatttcaagaggagagagcatcaaggtaggtttcactaaattctgtcgcagcacactttctttgactaaggctgtctgagaagttatatatcttgggtctaggttctatctcaactacttaggaaagctaaacagaaaacctggttcttccaaatgctgagaagttggaacctgaacaaggaacttatgaaggtgcaactgtacgttggtggttttatatcccctacttacagttttacttattcttcgatcacttctaatattttgataaacatctccaatgatatatattcacactgttaacttcaaaatggtaaatcaggttttagaagcaagaactggtttctacgagccaattgctactctggattttgcttcgttgtactcgtaaatcatgatagcatataatctatggtactgcagcttagtattccatcaaacgcttttttttcttcttatatttattttccaacgtttgttgatgttatccatctattgttcaaagagcttattactgccatcttctcgtctttgaaggtgaaacctgaggatgcaaaaaaataaattcgacttacaccaaaattatgctaatcttaagaattattcactttttcattccaaagcccaaaccaaacccaaaagggccttttatcaaaagcctatttacaacatataaacccaaaaaggcctttcgtcgagaaaactaaaatg

SEQ ID NO: 29484 - DNA, 3000 bp, Unknown; identical to SEQ ID NO: 14538
  misc_feature (1)..( 3000): 2750-1469P.txt file - cDNA_ID_3018002; gDNA_ID_2684130; Annot_ID_191188

SEQ ID NO: 29485 - DNA, 3003 bp, Unknown
  misc_feature (1)..( 3003): 2750-1469P.txt file - cDNA_ID_3018027; gDNA_ID_2684202; Annot_ID_191233
gctgagttcggtaattctgcctaaacctctctacctagttagatgttattgttaatatggcctttgaccaagaacaacttcagccgtgttaaaaaacattgaaaccaaaatcaatggttatataagattaacttgcactactaggatttgatcacagaagaaagaaaggggtttattaatttggttactgtatcttactctttttactttcggataacttcaattggcaatggcggttcgtaaagagaaagtccaaccattccgcgaatgtggaattgcgatcgccgtcctggttggaatctttatcgggtgcgtctgcactattttgatacccaatgatttcgtcaacttcagatcatcaaaggtaaacttagttcttatactctaatcatgtacagtcggtttgttttttgaaattctgtggtctagagctctagagttgtgttctgaattataagatgtcctctggaagctagccattatggcatttgagttgatttataatgctggacatggtgttgttctctttgttgtagattatatatgtcaaaatgttgatgaatgaagtttgaatactatagtaaattttagaaccaaatttggcgggagatggattttagaatttaagtctcttactgagttcgtttgttttgaggttcataatttttgagtaagaaacactacatgtttaatcatcatcatcgtggatcttactcaagactgataatttggacatcaaaaccaaagtttaaatggtgaacttcatcctttctctgtttatctttttcaggttgcatcggcttcatgtgaatcgcctgaacgggtcaagatgttcaaagcagaattcgcaatcatctccgaaaagaatggcgagttaaggaagcaggtcagtgacctaacagaaaaggtacggttggcggaacaaaaagaagtgatcaaggcagggccttttggcactgtcacgggtctgcaaactaatccaactgtggctcccgacgagtctgctaaccccagattagctaagcttttagagaaagtagctgtcaataaagagatcattgtagttcttgcaaataacaatgtgaaaccaatgttggaggtgcagattgctagcgtaaagagagtgggtattcaaaactacttggtcgtcccgttggatgattccttagaaagcttttgtaaatcgaatgaagtcgcatattacaagagagatccagataacgcgatagatgtggttgggaaaagcagaaggagttctgatgtatctggactgaaattccgcgtcttaagggagttcttgcagcttggttatggtgttcttctatcggatgtggacattgtattcttgcagaacccttttggtcatctgtacagagactctgatgtggagtccatgagcgatggtcatgacaataacacagcttatggcttcaacgatgtgtttgatgacccaaccatgacacggtctcggactgtctacacaaacaggatatgggttttcaattcagggtttttctatctaagaccaactcttccttcaatcgagctactagatcgggtgacagatacactctctaagtcggggggatgggaccaagcagttttcaatcagcacctcttttacccttcgcatcctggatacactggcttatacgcttccaagagagtcatggatgtgtacgagttcatgaacagtagggtcctcttcaaaacggtgagaaaggatgaggaaatgaagaagctgaagccggtgattattcatatgaattaccattcagataaactcgaaagaatgcaagctgcagtggagttctacgttaatggcaagcaagatgcgcttgataggttccgtgatggttcatagaggagtatatgcttgttaagcaagatatcgaaagaaccaaacttcttcttcttctgatgtttaggttattaaaccgcttttttgttttgtcaaacttggaagttggttgaggaaaattggaaccatttcttttcgtttcgatcgaaaaattaaacaacttctctctttctctgtcagtatgttatgggcttgatcacagaagacgaaagtgttcactaataagatgatgtttgttatttaagtttgaatactatagccgaatctagaaatacttggcgggagatggaattgattggggcgaacaagcacattatatttttaagggtttccttcgacttctcttttatattttagggctaaacgaaagctctgattccttaaggccgtcagccaccgccgaagaggagcttcgttggtctcttaagaaagaaaagaaggggagaatatggcttatcaagaagcaatgaagcccaatcccacgaaggctggtttggaagaagtgatggcatctctgacatcagttcgatacttgtaaaaagtgtgaagctatccaaatccattacaaaactgtttcattacggcgatttttggagatagcttttctcgttttttgcatgttgatctgactgatctcagatatctcatcggaaccgtagtaaatacatcatcatctacttgcaagaagtgcatttatcctgtttgtatgaatccatgtctttcccctacttgtgatggtgtctagctcaacttaattactctttagccttaataatgaacagtcttatcgatcctgcttaattaaatattgaatggaagtttggtttgtggtaggttcggcaaattttgcctaactagtacataaatgattgatcaagtccactctttatagactgtagtatataaattattataattttgttaaccttgtaacatgattttaaaaattagaacccacttatttatttctctatcaggatggtatgttaatagaatgaactatagaacagatcaacagacagtaaatgaaacttaaagaaaaaaatacaaatggctcatataaaatgaacttgcagaaatacagtttgatcacagaataagagagggtttatcaatttggcttctgcgtcatttcggcaatg

SEQ ID NO: 29486 - DNA, 3003 bp, Unknown; identical to SEQ ID NO: 29485
  misc_feature (1)..( 3003): 2750-1469P.txt file - cDNA_ID_3018027; gDNA_ID_2684202; Annot_ID_137209

SEQ ID NO: 29487 - DNA, 2427 bp, Unknown; identical to SEQ ID NO: 27107
  misc_feature (1)..( 2427): 2750-1469P.txt file - cDNA_ID_3018032; gDNA_ID_2684202; Annot_ID_191263

SEQ ID NO: 29488 - DNA, 3003 bp, Unknown; identical to SEQ ID NO: 27113
  misc_feature (1)..( 3003): 2750-1469P.txt file - cDNA_ID_3018048; gDNA_ID_2684202; Annot_ID_191234

SEQ ID NO: 29489 - DNA, 3003 bp, Unknown; identical to SEQ ID NO: 27116
  misc_feature (1)..( 3003): 2750-1469P.txt file - cDNA_ID_3018077; gDNA_ID_2684203; Annot_ID_191312

SEQ ID NO: 29490 - DNA, 3003 bp, Unknown; identical to SEQ ID NO: 27117
  misc_feature (1)..( 3003): 2750-1469P.txt file - cDNA_ID_3018081; gDNA_ID_2684203; Annot_ID_191311

SEQ ID NO: 29491 - DNA, 3000 bp, Unknown; identical to SEQ ID NO: 24881
  misc_feature (1)..( 3000): 2750-1469P.txt file - cDNA_ID_3018095; gDNA_ID_2684203; Annot_ID_191302

SEQ ID NO: 29492 - DNA, 3000 bp, Unknown; identical to SEQ ID NO: 14580
  misc_feature (1)..( 3000): 2750-1469P.txt file - cDNA_ID_3018101; gDNA_ID_2684203; Annot_ID_191296

SEQ ID NO: 29493 - DNA, 627 bp, Unknown; identical to SEQ ID NO: 14620
  misc_feature (1)..( 627): 2750-1469P.txt file - cDNA_ID_3018164; gDNA_ID_2684204; Annot_ID_191364

SEQ ID NO: 29494 - DNA, 3003 bp, Unknown; identical to SEQ ID NO: 27132
  misc_feature (1)..( 3003): 2750-1469P.txt file - cDNA_ID_3018168; gDNA_ID_2684204; Annot_ID_191361

SEQ ID NO: 29495 - DNA, 3000 bp, Unknown; identical to SEQ ID NO: 14615
  misc_feature (1)..( 3000): 2750-1469P.txt file - cDNA_ID_3018172; gDNA_ID_2684204; Annot_ID_191358

SEQ ID NO: 29496 - DNA, 3003 bp, Unknown; identical to SEQ ID NO: 27143
  misc_feature (1)..( 3003): 2750-1469P.txt file - cDNA_ID_3018192; gDNA_ID_2684204; Annot_ID_191346

SEQ ID NO: 29497 - DNA, 3000 bp, Unknown; identical to SEQ ID NO: 14609
  misc_feature (1)..( 3000): 2750-1469P.txt file - cDNA_ID_3018196; gDNA_ID_2684204; Annot_ID_191345

SEQ ID NO: 29498 - DNA, 3000 bp, Unknown; identical to SEQ ID NO: 14609
  misc_feature (1)..( 3000): 2750-1469P.txt file - cDNA_ID_3018196; gDNA_ID_2684204; Annot_ID_137284

SEQ ID NO: 29499 - DNA, 3003 bp, Unknown; identical to SEQ ID NO: 27772
  misc_feature (1)..( 3003): 2750-1469P.txt file - cDNA_ID_3018200; gDNA_ID_2684204; Annot_ID_191341

SEQ ID NO: 29500 - DNA, 3003 bp, Unknown; identical to SEQ ID NO: 27150
  misc_feature (1)..( 3003): 2750-1469P.txt file - cDNA_ID_3018210; gDNA_ID_2684204; Annot_ID_191336

SEQ ID NO: 29501 - DNA, 3000 bp, Unknown; identical to SEQ ID NO: 9936
  misc_feature (1)..( 3000): 2750-1469P.txt file - cDNA_ID_3018217; gDNA_ID_2684204; Annot_ID_191331

SEQ ID NO: 29502 - DNA, 3000 bp, Unknown; identical to SEQ ID NO: 14644
  misc_feature (1)..( 3000): 2750-1469P.txt file - cDNA_ID_3018282; gDNA_ID_2684206; Annot_ID_191399

SEQ ID NO: 29503 - DNA, 3003 bp, Unknown
  misc_feature (1)..( 3003): 2750-1469P.txt file - cDNA_ID_3018389; gDNA_ID_2684208; Annot_ID_191479
ctgtaattacattgaaatcgtagtggcagaaccggggtcacaaaaaaaccaacagtaaccacctgtattacattacatattgtaaatagtaagtgtactagttttataattatgttctgtaaacgtactactttgcaaacaaactcatagaaatatctcaaaaatttcaaacttacaatttgttctcctcgcgtgtaatggctcgttccacccaagttgtgcgtagctattcctttcctgcctcgatcgcttttgcgatttttggagttagtcttggatattgcttgggtctccggtttcacccaatgtagttgcaacccttcaaaaactttatcattcacccctctaggttttttatctttgacccacctttgcttccactcattgattgtgccacgataacgagaagatatgtctttgtcaaacgctttacgaacctctagcgtcaaattccgatcccaattaaactcttgctacaaaataaaaaaagtacgttgagtaatacataattaaagaacaaaaatacaagcatcatcttcaaaaaaataactaaccgcgaattgtttcaaccacaaatcttgttctttcgccggcattgacgagtaagttggatatggatccttgagtagtccttgcatcatcttcaaaacagatttgcttatcccgtttcccgaactctcaaacctacaaaagtttgaattttataaatttatattaataattcaaaaagatagaaaatgtgaattaaaattccaacacttaccatgtttcatgatcgattctatcgggatggagctttgtgagtcgttctcttcctggttgagagatgaagtcctcaatgctcatcaccatgggagtctctgacgttggcgactccggactaagactaggggttcgtgaatttgaacgggacggttcttcacaatcttgagtagatcttgattggttatgacgacggtagttaccataattcctaaaacaaatgtaaaaagaacattggttatttatgaattaagtcatcaaatttatgaaaaagaaaagtagataaataaaactcctcacaataaaccaaaacaagaaataaaaataacgtttatacttaggaaaatatagctttcaacaattcaacaattgattcacaaaatcaatagattcacaaaaattggaaaactaattcaacaattccacatcactaacacatatatgactaaattcaacaaaatctaacacatatgtgtttaacccataactatccaccgaagcatataaaaatccaattgaaaaagctttaatctaaagaacaactgtatatagaaaaagataaactaattacacaaggtccatttgaacaagaagattacacgatgacatggtacccacggtattgacaattacaattcatgccaataattgaaacagctttgtacgcttggaattttattttattagttaaaaagtaattagagaaatcacttacatgttagatgtgacgaaggtgctgctctaagggaaataggaggagagaattggcggaaagaagaaggagggtttgagagagatgaagttaaaaaagaaaatggagaagagggattaaataaggaccactggttttcccattattatgatataaccgacagattttttgtcggtttacgagaaaactaaataaaatattaaagggcgcgctattcgatagttttgggaaaactttatttggcgggttcaattttgagatgcgttggtaatccatcggttaaaacaacggtttatcaattaatttcgaaatttttatgctcttcttataatgatcaattaaacgattacaattctgaatttattcttccgtcaggaaaccgtcggtttatattatgtattaaccggttccggttaggataagtttagggtcaagagttaaaatttcatataaacaaaatgaaatgatcaatacaattaatgataacattaaaataaaactatattaagtgtatatatgtctctattttactctcatttacaaaaaaaatgtataatgaaaaaataaaaatgtcatctacttaagacaattacataagttaccttagaagtttaagagtacttgtgttaaaacaatttcgaatctagaaaatcaacaaataggaatcaattgaaaatagtttctagactctaagttatttagaaatcatcaatgaacatttgcaagcatgttaggctaattaatttgtactttcgataccctaaaacaaaagtcgttgggtaaccgtcggtaatccgtcggctaaaactaacggttaaccgacggaatttttggataatctacttaacatttttgaagtacaacttaacccatcaatcttgggtcggtttttttttatgggtttaaccctcttttttttggattttcggccaaacacatgatttgagatgatatttggcccgtaaagaaatcttaccaaaatttacaaatcgctttaaatactaatcaattacaattaatgatttcccttattatcgaccaaattgaattcgtaatatatgagaatatttcaaaaatctcgctaaacaattccctaatatctcgctaatcaaatcatggatagagattgtgattattttgatttgttaccaaaaatctctcaaaacaattccataaaatctcgataatcattatatattatctatttaaagtaaagaatttgaattgaatttctatgctaaactatttgccatataaatctccacagaatattgaaactatattattgtattacaaacggatttggtgcatattccttaaaaatttgattacaaatatttgattctcatttagttaagactggaataaattttattggccaccaacctaatcggaactcgcctatatatactttctacctctcatcacaatatcaaacacacaaacaaatttcatcacatatctttggattcgagacaaaaaatgaaagaaatgattcatgttaagagattagctgaattcatcatatg

SEQ ID NO: 29504 - DNA, 972 bp, Unknown
  misc_feature (1)..( 972): 2750-1469P.txt file - cDNA_ID_3018467; gDNA_ID_2213627; Annot_ID_195929
ttctttattaatttcttataaaattattgtttataactataactttcttatttataatatctttaaaataaattgatttagaaattccgaaaaacataatcaggaagagttttaaactgttagtattaaatttcattttactattttataaaataatagaaatgaaatctatgaaagtaatatttacagatttattctttatcaaaaaggaaaagaaaaggatattttattaaaaaaacagtgataggacgaaactgttaaatgggctggagagatataaaactgttagccactacctggcccataatatatcacatcgtctctttcgctgcacttggtggttctccaattccgtatcgaaaatcttcttcgggtcagacgatctgaagccgatcgctgtagaatcagtttcgtgctccgcagtttctcgagtttcctctcacttcaggtagtcttcgacaccctaatcatgttagattgatattaatgttgaattttagctgatattcaatggttattgatccagatcttcataagagaattcacttacggagagggactttttcgtagacgattctcactggatatctatcacccggtaagatcgtcttgctcgaaaagaattgaaaagtttttaagtaattgaataaggaactgtgaatcggagaggcttacttttttgaaaagatctaaaccatcgtagaagatcgtcctcaaatatctcacagaagttaccaattttgaaagatcactagagatagctacggattttgagaggcggatctgtccaggtcggcactgtgaaagagaactacactggttttttccagatgatatgaagcttccgtgaacgaatctgattctaaggtactcatcgaagagaatctgggattgtattgatctggtcccttagcttccagtttggctataactctgacaactgttgtaagtgataagttgtgatcaataatg

SEQ ID NO: 29505 - DNA, 3003 bp, Unknown; identical to SEQ ID NO: 27156
  misc_feature (1)..( 3003): 2750-1469P.txt file - cDNA_ID_3018467; gDNA_ID_2684211; Annot_ID_191532

SEQ ID NO: 29506 - DNA, 3003 bp, Unknown; identical to SEQ ID NO: 27159
  misc_feature (1)..( 3003): 2750-1469P.txt file - cDNA_ID_3018473; gDNA_ID_2684211; Annot_ID_191528

SEQ ID NO: 29507 - DNA, 3000 bp, Unknown; identical to SEQ ID NO: 14673
  misc_feature (1)..( 3000): 2750-1469P.txt file - cDNA_ID_3018483; gDNA_ID_2684211; Annot_ID_191524

SEQ ID NO: 29508 - DNA, 3003 bp, Unknown
  misc_feature (1)..( 3003): 2750-1469P.txt file - cDNA_ID_3018489; gDNA_ID_2684211; Annot_ID_191522
cttgatcatactttaattgatcgataaactgtgcttacgctgtaaatggaattttgcgtttcctcccccttttcctctttggtccttctattttgttatatggaatgaccactttgttctttatttatgcaggaaatttactccataaagttgcctggggacccgaaacttggcgaaggcaaacctgagaatcaaaaccacgccattgtgtttactcgcggaaatgctatccaaactattgatatgaatcaggttagtatgcaattcttctttcgtctcttggcatctctttgtttcaaatgtcgtctttcgcgatcttgtgtgggtttgtaatgattaagtttctggggaagttcaatcaagtaaatttgaaatgcataggctttataaaaaatagtaagaataatagtttcaaatttagatcttaagaattaaaaatagggcgtgagaaaaacagtgcttcatagcttatgcacatgtctagtggagacatgtggctgtagattgatttggttagccgagtttcatccaataccttgtccaatctatgtaatttggattaattgactagaattcctcttggtactagaaaaccttaggtgccactatgtagacttttacttgagcataatttgagctcatgcgacattcaaattagatttaacaaatttcgctttccaaaagaataaagtgaaaattttgccaaatctagatacataattttaccaagtacattcaatatgggtttcactgaggaagagtggttcctagctttgtttctatgtttgaagctcaaaattaaacacatgtggagtaggaatggttcttaactgaaaagcacttactgattacatttgagtttggagtgggacatctcattacatgaatgattgtacctgaatcttctgtcatgtgtacatgtgtgctttacatcctttacgtttgagacaagagctaaatgcatccccaacctctagcatcatgttctaatttttttcatttcgttatttgttaggataattattttgaagaagccttaaagatgagaaatcttttggaggaatttgaccgggaccatggaattcgaccacctactattcttggagttagggaacatgtctttactggaaggtctgaaccagacatgcgtatatctatttacttattttctatcattaccttacatacttgttctgcgataatatgcagtgtctcctccttggcatctttcatgtccaatcaagaaaccagctttgtaactctaggtcaacgagtattggcaaaacccttaaagtaagttactaccaataatttttatcttccgtgaacaacttgaactcagatggaatccttattctattatttctgaattctaggatccgcatgcattatggtcatccagatgtctttgacagagtatttcatattacacgtggtggtatcagcaaggcctctcgggtcatcaatattagtgaagatatatttgctggtaaatttgattttttaattgacagttaccttcaaaactgttcgatgttttaagaatataaaaacacatgaataatgaaaagtgcaattctgagccattttttaataccaatttcttccacacatgatggacgttgattatatgcctctacggtttccaggtttcaacacaactctacgtcaagggaatgttactcatcatgagtatattcaggtccgtactttttaactctttacaattaaaataataaaaatatatatatgcattaattctgtttacaggtgggcaaagggcgagatgttgggctcaatcaaatagctctgtttgaagggaaggttgctggtgggaatggtgaacaggttcttagtcgagatgtatacagacttggccagctccttgatttcttccgtatgatgtcattcttctttacaaccgttggcttctatctatgtacaatggtatgtggaccctctttcgaatcacagtgattttatttgcctcttaccattgtattcaagttgatacctgcatccaattcctgaatgtttaccttcatatcaatacttagcagttagcaggcgatattagaaaagaagtttacaacaagtcttgcattactagtttctgtcggtcactttattttttaccttttatctggagctataactgatatgttctaagtttctccaagtatattttccaggaaatcatgctgatttattgacatttacatggccttttgcagttgacggtgcttactgtgtatattttcttatatgggagggcatatctggtaagcctggtgaactaatgttggttgtgacgcatgtgctatcttcatcagtgattattgtacgattaattcttgcatattagtactggattaaggtctttataaccctgcttgtgtttggtttatgctaggcactttctggagttggagctactattcgagaaagagctattcttctggacgatactgcacttagcgccgccttgaatgctcagtttctgtttcagattggtgtcttcactgctgtgccaatggttttgggatttattttggaacagggttttctccaggtactggttcctcaccattttagtcatatcatattgtaatgccatattttctgatatgattgacagggagactgacacgtatactgagttagctctttcatttacttgattatctacagtatacttttattggattataagtcgacttatggtcacccatttacatgttttctttctgatgttttgttgttagttagaaatttgtctctgtttaggccatctttcgtggcgcattgtcacttacagctatgcactgtattctggagatgaacttttgtaatctgaatgatcatatttgtttgttcgattatctgaaggatatccttacatttggtcaaaacgaataatttactttttgtgttttgcttgttaatagaacttaatcttctccatcttccattgtgtaggccatcgtcagtttcataacaatg

SEQ ID NO: 29509 - DNA, 3003 bp, Unknown; identical to SEQ ID NO: 24904
  misc_feature (1)..( 3003): 2750-1469P.txt file - cDNA_ID_3018493; gDNA_ID_2684211; Annot_ID_191521

SEQ ID NO: 29510 - DNA, 859 bp, Unknown; identical to SEQ ID NO: 27168
  misc_feature (1)..( 859): 2750-1469P.txt file - cDNA_ID_3018528; gDNA_ID_2684211; Annot_ID_191500

SEQ ID NO: 29511 - DNA, 3003 bp, Unknown
  misc_feature (1)..( 3003): 2750-1469P.txt file - cDNA_ID_3018551; gDNA_ID_2684212; Annot_ID_191573
aaagacgggcgggctagttgataaaagctcaataaatatgggctggtttagggttaaacagcgaggcccatttgtacaaaatattgacatcgattatttttgttttgcatttgtggatccccaggctgagattacaactcagaaaattacaaaaaaaaaatagataataataaacaacgattataatgatgattctttcaatttgttatgttagagaatcacaatgcttccacacgtgcattttatatcacaatttagattatgataatttgaacaatctgacaaataaggattatttaaataattgacttgttatgttattacaaaataggtactatgagttagacaaaaaaaaagaaatctggtggaatggcactgaatcttagatagcacgtgtcacgtcgaaatattgcgtgcaagtatacatgcgccgttactaacgctgttatagacttatagtacactgaaactgttcatatagtgctgtaatattttcgtgaacttatgaaataggttcaatttcttttgttaaaatttgggtgtcaaagcgggttaatatattttatgaattttaatagatagtgctaaaaattggggtcttaaaatagtaactataatgtcgtcgtaccattgcggagtttgcaagccgatctgcaaactcttcaaatttaaattatttttcaaattttttttcctgcttagttctttatcaaagtactaggattaatgagatcgattattaatacttattagtacagaagtataaactagtactgagtgattaaggagatcgagtgggaattggcggtttatattaataaactagtactgagtgattaaggagatcgagtatacaaattactagtgagctatttttaagatgctagtataactttatagtatatcataactgttttttcatacgaacatcggtttaaatgaagtaagttactcaaggctggcctttcatgtgtttaatagtactaaataagatagtaccagtggccggtaaaattagctagctgttatcaattgttatataatatacatgttcatttattttatgtattattagactatgagatgatatgagtacagaaaaaaaatccaataaatatgtatataaatatctagaaatgggtagataaactatttaaatgagtcactcaacgtgcctgagtttccttttcgatttaattgtcctcattgtgaattggcataaaagtcggtgcgaaggaaagccccaaattatttaacttgaaaacgaaagtttggtccacctctctatattcatttttctgaaatgaaattaatactcaaatcaattttgtcataaaaattgtccaattattaaagtattcagtcgtgtttctatatatatcactgtctttagtcagctagtctaatattgcatatttgcattcacctctatatatgtacacacacatctacgtatggagaaaacattgtacattcactacattcgtgatctcatttatctttagatggctaaaaaaaactcagatagaatatcacacttacccaaaatatactattctttcgtacgaaatcttattactagcacatgacgtgtgtgagaaaaagtacactcattggacattcaaaggtgttaatgttaaaattaacaattgggttttctaactatgagccactaaatcatcttctaaagtcaattataaattatacgtgacgttacttaatattggaaataaatattggagaacaattataagtttgaaatagaaatcataattaactattttactactccaaccatttataactacgaagctaccttaaaaaagagaatgacatgggtatgactttgcccgttttttcttaatgaatttgttactctaaagtcataagtctctaatccgtattaatagcagtaattaatggatacaaaaaaaaatcaaaaagaaagaaaaatagacagggtggcatcataatttatggggacagctgtcgaggtgatgcatttatgaccactaacatgcaatggcacggatgcaaattttaattgttagattcttctacaaaatttacttaattcaatacttctgttttcttcttcttcttcttcgtaatttaatagattctgcatattgtttaatatttattttacatgccagtgatgggttgtcattattctgattcatttttctataaaatcattataaaagtattttcaacttcttgacaaaaataggtgtttaattattactacaaagttcaggtcgattgttatttcgggctacataaaaaaggtttgatttctcgtatgggagtgattacaacatatttattggtattttatgaccccatgtcaactcttatgtagtaatttgtccccacttattgaattgttattagctcaaaggcattaattgcacggtttctaacttttcttctatagtagtatgtttttcacatttgaaaaacactaatcattttcattttgcatggaaataagaccaaatattttcattaatccactaaattgcatttgcaacacaagcccaaatcattatatatataaatataatatattattgtgatgagtaaaatatagacatgcaaagtgactatgaactactgtaattatacactgcaagaaaaacattgccataaatatgaaaacagaagacattgacagatagtaataaaaataatactatatctctaaatataattcagatgttaacgaaagtcttgtggagtaaaaactgggtttcacacacttcacttgcctctcaatacccgggaaaacaaaatgtcggtttcacttgctacttttcccggaaagttacaaagtcattcccttttcaggttgtgaagtcacattaacataagagaagaagcaaaaaggcttggagctttattttttgcttttttttttctttcttctagaaaacatgatcttgagtttccgagtaagattcttttaaaaagagtttgcaaagaacgagaaaaatgatg

SEQ ID NO: 29512 - DNA, 3003 bp, Unknown
  misc_feature (1)..( 3003): 2750-1469P.txt file - cDNA_ID_3018559; gDNA_ID_2684212; Annot_ID_191569
tatatttagaatccacttcttgattatttttatttatcattaacccaagttttcactttgtttcagattggattatcttgctggaataccctagtcgatgcaaccgggcaaactccctttagctacgctgcaatgagagacaaccacagttacaacaccttggtggctcgtaaacttgcagataaaagaaacggtcaaatatctctgaacattgaaaatgggatcgatcagattggcctgagtaagagactaagctcagagctaaagagatcttgcaacacatgtgcaagtgtggctctaaagtatcagaggaaggtttcgggttcacgtcgattgttcccaactccgatcattcactcgatgcttgcggttgcgacagtatgtgtttgcgtctgcgtgtttatgcatgctttcccaatggtcagacaaggctctcacttcagttggggtggtcttgattatggctcaatctaaggtttgttatataactaagtgttgttaattcttttggttcgataccaaaagggaaaaaaaaagtgcgatgaaggaaactgagaatgagaggcatagtgagaaaacccaaagacatgtggatcttggacattgcagagatggaatcactcactggtctttggtgagccagagagtacagagaaactggttcaggtcagagcagacatagcttcaacacaacacccaagtttttatatatttggctaattatgttttattcttgcatatgttaatttcccattctcccttaattacagtttttagttgcttaacacaaaagctgttgctattttactgaagctgttttctcctgtgtgtttattgtatctctgtagagttgtgaacgtagttgaacattgttgtaaaattgtaatgtaatacctttttggttaatcctacgtaaaagtagtattagccactacttgctaaacattttaaagggacatcttaaaaagtgaagatgattcttcacaaataaaccacaacggtcacgtgagtctcgtgctattgactactattgttgaggtcggtcaacagtgcattgccccatctttaccttcttcttcccacatttgtttgggatatttttcaatttactcactttatgaatacaaacaaaacaataaaactaatctcttttgtgtgtagttgaaagagataagatcgcagaaaagaagacgatgattcgtcgacttttctcccaacattttgaacaattagttgttatgtgtaattttctatagatagctactatctgattacgtggatcacacttctctttttattattatctctttaggtttcttatcccatataatatgatatcaggtctctttctcgagtaatacattatatatctatgttgattatttactacttgtcatttaagataagatacttaaaaatacttgttattggattttgccggaagacttaactttcaaactctattatatgtagaagatagcggactgaaaaatacgtcgaagacagatacttctattgcataatttttgggtagggactagaaaacttactcgtagtttcgacatatcatccgcaatctcaaattaattgcaaactttttgatcatatctattgaaactatctttctagcttcattaattcgttaccagcccccaatataagctatcaagtatgaatattaagatggatttaacggtgataatagtagtatgtacagtttcttttgtcaacagctgataaaaaaaatgaaagcttctaacagtttgagcctaaagagatcatatatgtgaacagtttcacacacacataagccgtacaactaatatagatatcactttgaccgtaaaaatctaacagtttagatcacacacacacaatcttgaaactagtttaaagcactttcagcgaaaagtactcactagatgataagaactctttggcacgtaacagacgctttcgaaccctacgatttcaagaggtggcttatgtacggtccactcaacttcttcatccgacggtctaagattggtcatgtgggttgaactaccaaaagggccaaaagcgtgagccacgttacattataaaagattttgtctttttaatccaacggttcacaccagaatctccaattcggttctgtctcctctcgtgtcggtccatctctctggctcttcacctctagccacgtgtttctaattttgaccttttaaaattttaagaaaaaaacaaattatttcttgtagctaaaatttagcatccaaattccaaactcagagttctcttctatggccgtatgatacttccaataatccgtatgtatgtgaatatcataatctatcacaaacataatgaatagtagtagatattaagacaatcaaatttggtagaaaaaatatcttcctacgttgggaattatgtaggaccgaataatatagtcggctaattcgatattttgtcgcgaaccacgacataaaattatttatcatcatttgtgaacaataatgattcaaaattatcaataacaccaccttttttttttaagttcctttacttctggggtctctagagacccacacatgtgcacaaaatatacgtgtgtctctcatagactttaaagcaaaattagagaacacttatttttagccaaaaaaagtaattaaagaaaaaactatataaaaacagtttaaaaaggggatgatattaaatgattttcatgtgaattataaaacgtattgagtattatcgtgaccgacttcaaaaaacaagaaaaacctcaacttctctttttcagctatagccgccgcctcctcccactaaactcaaatcctctcatagtcttttcaatcaaatctgctcttcttcactgttgaagctggctatcaaaactcacaataactatggtgattgattgattctctttcttacttaactctgttttagtttctttgcaaattcttatattaaccatttggaactggtctaaacattcttcagggaccgatg

SEQ ID NO: 29513 - DNA, 3003 bp, Unknown; identical to SEQ ID NO: 29512
  misc_feature (1)..( 3003): 2750-1469P.txt file - cDNA_ID_3018559; gDNA_ID_2684212; Annot_ID_137372

SEQ ID NO: 29514 - DNA, 3003 bp, Unknown; identical to SEQ ID NO: 27169
  misc_feature (1)..( 3003): 2750-1469P.txt file - cDNA_ID_3018563; gDNA_ID_2684212; Annot_ID_191568

SEQ ID NO: 29515 - DNA, 3000 bp, Unknown; identical to SEQ ID NO: 14701
  misc_feature (1)..( 3000): 2750-1469P.txt file - cDNA_ID_3018571; gDNA_ID_2684212; Annot_ID_191565

SEQ ID NO: 29516 - DNA, 3003 bp, Unknown; identical to SEQ ID NO: 27174
  misc_feature (1)..( 3003): 2750-1469P.txt file - cDNA_ID_3018575; gDNA_ID_2684212; Annot_ID_191563

SEQ ID NO: 29517 - DNA, 3000 bp, Unknown; identical to SEQ ID NO: 14690
  misc_feature (1)..( 3000): 2750-1469P.txt file - cDNA_ID_3018579; gDNA_ID_2684212; Annot_ID_191562

SEQ ID NO: 29518 - DNA, 3000 bp, Unknown; identical to SEQ ID NO: 14684
  misc_feature (1)..( 3000): 2750-1469P.txt file - cDNA_ID_3018588; gDNA_ID_2684212; Annot_ID_191556

SEQ ID NO: 29519 - DNA, 3003 bp, Unknown
  misc_feature (1)..( 3003): 2750-1469P.txt file - cDNA_ID_3018634; gDNA_ID_2684215; Annot_ID_191656
gaagctgtggctttagttgaacggatggttgtgaaaggttgtcaaccagatctggttacttatggtgcggtaattaatggattatgtaagagaggtgaacctgatttggctttaaatctgctcaacaagatggagaaagggaaaatagaggctgatgttgtgatctacagcacagtcatagatagtctctgcaaatatagacatgtggatgatgcactcaatctgttcactgaaatggataacaaaggtattagaccagatgtttttacctacagctccctcataagttgcctttgtaattacggaagatggagtgatgcttctcgactactcagtgatatgcttgagaggaaaatcaatccaaatgtagtcactttcaactcattgatcgatgcgtttgcgaaggaggggaagcttatagaggctgagaaattgtttgatgagatgatccaaaggtctatagatcctaatattgtcacttacaattcattgatcaacgggttttgtatgcatgatcgtctagatgaggcccagcagatttttactttgatggttagcaaagattgtctgccagacgtagtaacttataatacacttataaatggattttgtaaggctaagaaagtggtggatggtatggaacttttccgggacatgtctcgaagaggattggttggcaacacagtcacttacaccactcttatccatggattttttcaagctagtgattgtgataatgcccaaatggttttcaaacagatggtttctgatggtgtgcatcccaatattatgacatacaacactctgttagatggactttgtaaaaatgggaagctagagaaagcaatggttgtattcgagtatctgcaaaagagtaaaatggaacctgatatttacacatataatattatgagtgaagggatgtgcaaggcagggaaggtggaagatgggtgggatctattttgtagcctcagccttaaaggagtgaaacctgatgttatagcctacaatacaatgatctcaggattctgtaagaaaggtttaaaggaggaagcatataccttgttcataaagatgaaagaagacgggcctcttccagatagtggtacatataatacgcttatcagggcacatctgagagatggtgacaaagcagcatcagctgaactcatcaaagaaatgaggagttgcaggtttgctggcgatgcttcaacttatggcttggtcacagatatgttgcatgatgggagattggacaaaggatttttggaagtgctttcttaaggtcgatcagcttttcatgttacttttatattggttatttctaaacgcagtcattatgttctcatgttacatgtgtatgtagatttgaatagcagtagctattgtgtataagcttcttgaacatgactgaagttgtttgtcatttacctgctaggttgcaaacatgagttgatctaaacgctcattgatgcaagttcaaggttaattcccggccgggatttgtatttttgtatgttcattgcatttgcacacggaaacatacaagaagacagggatattgtgggtttagtttcattttagaaggttacatatgtgtttccttagctgacagatactatattgcagcaaatttggtgacattccaaagaaaatatgacaaagaatctgtcagttttcggagtaattagtcaatgtttgtctcatttctatgttgttcttgatctacacaaaagaatcaactttcatggatagaagaaagtctttcaaaataatcacggaagtcgggaagaaagagatctagtacagtaactcatcctcggaaattccggtcactggaaaaagtttgggattggtacaatgccttctgaaactttcttcaaagactgaaagttccgagattgggttgctatgttggatctctgtcttctcaacttcatgtgatcattttatacctcacaagcattgagaaatatgaaagatatatacttactattttcttctgttttcatgaaagttattggtttttgtgttgactaagaacattgaggcaaccattgcctgatattaaagacagatagattcttttttctccttttttgaccgaacacgcttcagaagttttagtagcagcaacaacggaggattctttttgatgtagctgacaactttgtttcttttagtattgagctctttcgtttatgtctttgttttcttattgatgggtttttgatggtacagttctcctccctttccttccactattgattgatttcagtatacatacggttgctgttctgtgtaagcttcatgaagatgactaatattgtgcatttgtgtatttcattgtcaggttaacacaagatcagtggtgagcatcataagaagctcttcccttcatgaagatctcagacttggtttgacatatgattattgttctacagtagatttgttttttaaccacagttggttctgtttcttgtacacaaactttttgcatctgtttctagtagtaatataaatgaaacatgtaaaccagctttagttcggtaaaaattagtgaatgacactatttttggacaccttttagtttggtaacaatctaaaagtcgaagcgaggttctaagtaagttggtagcattgatgtcttcatgtagtgttttagatctcatccttaatggtttaatttaggttcaattcacggggcacatagttcatcgatttgttgattaactaactagggtgaaaatgctaccaaaacacagctctggtggtttgatcatagtgctctcgatgtttttttttcccctgaaagtcaatctccggtttatctataaaagagaaaaaagttatgaccggtttaagaaaaccagctgtaaccgaatcgacattgaaccaactgctctcgattatagggtttactggattctgcgattttgctgttagtgtagtagtctcaactcattgcatggggaagccattttcgaagcaaccaagaagatg

SEQ ID NO: 29520 - DNA, 3003 bp, Unknown
  misc_feature (1)..( 3003): 2750-1469P.txt file - cDNA_ID_3018638; gDNA_ID_2684215; Annot_ID_191653
gtatttgatatgatcttgttaaggtttggttccggtttgattttttcggtttatgatccatttataattcggtttgattaatgtaactctatatcggttcggttcggtttttgtttgatgcatttcggtttcgtgtttgtgtgataaacatttttccaatgtaaaatatcatatgaagaataatcatatatttacttttttatcttgttgtaattttgaagagaacactaaatacatatattatgcttcgttaaatacttatgtgcttattaactttttatgtttacttaattacgttggtacgttgtgtgaactgctctctcctgcttcgttctttgctttcttctttacttcctctttccttgcttcttcttcttcctttattgcttcatctctagctttcttcctttcctttgcatcaacaaccgcttttcgcattatgtctagggcagtttttgatttctcaaagacatcatcccccatcttgtctacctcgtcaagatctcgaagaaaattaggatctgaatttgtacttcgtataactcccacgcgatatgcaacatgtttagctgtgttgatgatttcctccatttgtgaaaggatcgggtttgtcacggctttaaacgcttcgtctcccaaatctgtgttagtggctttcatgtaagctgtatagaaatagtctacattcgtccttgctttcttggctttggtgtttatctctgtataaatagattgcatcttaagaaccaaaaacaaaaaagagttattgagttttttatataatacgaataagagctagctagagagaattgtgatgatgcacatcctatatatatacacacgtttaacaacttgattagcaagttcaataactatcgcaaaagtgctttattcgctcataagtcataatcaacctcccaatttttttttaacaaagtatagtttatgtgtacacgcttaattaagccaccctcccaagcttagtgtttttttcttactttttattcatcaaactcaaaggaaatgaatgatctaattcaaaactaattatacaaatggaattccacaatgcacaatgaatggttaacgtgggagggaattatgtacctttatatcgtttaagaacaatccttttaagatacaattattttcttatttgcatttggtttagctttcatgcaaagtttattttctttttttggataacgacttttatgcaaagttctctattaatatagctcttatcctgttatatcatctgtatattgtagcatgatttcttacagagcacatgataacaatccaaaataaatatatgtgtatatttgtgctaagtgtatctatatataattatatattattcattaatatatatgttaatatctacttttatgtgtatagtttagattttgtacatagattcagatttgatttttagtctagtgattaactagattatgttcatactattttagtgtttcctagaaaatcattacaacccaaatacttatctaaacatcttaagatagagttttaagatgttaaacctaaaaggtcctagtgttaatgaatgaaaaatatcaattattagggaaaagatactagaaattatatacatcttgaattaatcattaccattagattaaaatgtatttctaaatagtttccaaatatttaccctatttcttattcttatttatcagtaaaattagacaacattttgatacaaaaagaaacacattttgcccatctttattaataggcttattaaaaaaaggtttattaaaaagcccattatatttgctagtaaagcccattagttttgaaattttgtaagctctttatgtttgtgaaatcttgcttatttgtttcatagctattctttggttgcgaattttgttgaaccttaacctagtgtggaagcaatgccggaacctctaattttttgttaacgcaattcaagaaactctaggaaggccagaaactctaatttcttgtgaatgcaattttacacaagtttcaataaaaaaaaattgatgcttagtttcgatttctggtatgttccatgaatattgggttttttttagacgttataaaatgtaaaacttcaaaaaacattgacatacgacaattgaataaattgaattagtattggggaagtattttgcgtagaaaaatggtacatgtaaattattggtataataaaacaattataaaaagatttaaggggatgcgtaagaaaatcataaacaatcattcttactaatatagagaaggaattagtaaatatatttcacaaaactggcaatatttattaatgacagataaatttagtaccctaaatagttatttggactttgtacaatgatcatttgtttttttactgcgaatgtgtcatagtctaaaaaaaaacaatgtcattttttggtgggtgtattaaaaaaagtcgttgttggctttcccaatcagaagtcattgatgtccgtacacacccaacactctcttctttcttcctctctcccaacggtcatatttctccgacaattcacaaacggtcaccaattttctaccgtttgattttaaagatccaacggctcagatagattcagatccctcgtgtaccactcactctgcccaactctaaaaaacaattactgtaaaaagaaaagtcgccaacttcaattctcgaagacccaacaagaaaacaaactctaaaaagttgcctccactatggtatttgtagaagctgtatagtatctcttaacccctgtagagagttagagagagagagagagagagagaaaccaaaagtgagtgagagaaacagatagaagtgagagtgagagtgagagagagagtgaagaaagtaacaatctttgagagtttttggatcttgatcttgtgtttcagtaatctcctagtgattgtctgatctgggttcttgttgattttgggtttctggatgttctgagagatttttcttgatttggcaaaaccagaatg

SEQ ID NO: 29521 - DNA, 3000 bp, Unknown
  misc_feature (1)..( 3000): 2750-1469P.txt file - cDNA_ID_3018646; gDNA_ID_2684215; Annot_ID_191651
acaatcactaggagattactgaaacacaagatcaagatccaaaaactctcaaagattgttactttcttcactctctctctcactctcactctcacttctatctgtttctctcactcacttttggtttctctctctctctctctctctctaactctctacaggggttaagagatactatacagcttctacaaataccatagtggaggcaactttttagagtttgttttcttgttgggtcttcgagaattgaagttggcgacttttctttttacagtaattgttttttagagttgggcagagtgagtggtacacgagggatctgaatctatctgagccgttggatctttaaaatcaaacggtagaaaattggtgaccgtttgtgaattgtcggagaaatatgaccgttgggagagaggaagaaagaagagagtgttgggtgtgtacggacatcaatgacttctgattgggaaagccaacaacgactttttttaatacacccaccaaaaaatgacattgtttttttttagactatgacacattcgcagtaaaaaaacaaatgatcattgtacaaagtccaaataactatttagggtactaaatttatctgtcattaataaatattgccagttttgtgaaatatatttactaattccttctctatattagtaagaatgattgtttatgattttcttacgcatccccttaaatctttttataattgttttattataccaataatttacatgtaccatttttctacgcaaaatacttccccaatactaattcaatttattcaattgtcgtatgtcaatgttttttgaagttttacattttataacgtctaaaaaaaacccaatattcatggaacataccagaaatcgaaactaagcatcaatttttttttattgaaacttgtgtaaaattgcattcacaagaaattagagtttctggccttcctagagtttcttgaattgcgttaacaaaaaattagaggttccggcattgcttccacactaggttaaggttcaacaaaattcgcaaccaaagaatagctatgaaacaaataagcaagatttcacaaacataaagagcttacaaaatttcaaaactaatgggctttactagcaaatataatgggctttttaataaacctttttttaataagcctattaataaagatgggcaaaatgtgtttctttttgtatcaaaatgttgtctaattttactgataaataagaataagaaatagggtaaatatttggaaactatttagaaatacattttaatctaatggtaatgattaattcaagatgtatataatttctagtatcttttccctaataattgatatttttcattcattaacactaggaccttttaggtttaacatcttaaaactctatcttaagatgtttagataagtatttgggttgtaatgattttctaggaaacactaaaatagtatgaacataatctagttaatcactagactaaaaatcaaatctgaatctatgtacaaaatctaaactatacacataaaagtagatattaacatatatattaatgaataatatataattatatatagatacacttagcacaaatatacacatatatttattttggattgttatcatgtgctctgtaagaaatcatgctacaatatacagatgatataacaggataagagctatattaatagagaactttgcataaaagtcgttatccaaaaaaagaaaataaactttgcatgaaagctaaaccaaatgcaaataagaaaataattgtatcttaaaaggattgttcttaaacgatataaaggtacataattccctcccacgttaaccattcattgtgcattgtggaattccatttgtataattagttttgaattagatcattcatttcctttgagtttgatgaataaaaagtaagaaaaaaacactaagcttgggagggtggcttaattaagcgtgtacacataaactatactttgttaaaaaaaaattgggaggttgattatgacttatgagcgaataaagcacttttgcgatagttattgaacttgctaatcaagttgttaaacgtgtgtatatatataggatgtgcatcatcacaattctctctagctagctcttattcgtattatataaaaaactcaataactcttttttgtttttggttcttaagatgcaatctatttatacagagataaacaccaaagccaagaaagcaaggacgaatgtagactatttctatacagcttacatgaaagccactaacacagatttgggagacgaagcgtttaaagccgtgacaaacccgatcctttcacaaatggaggaaatcatcaacacagctaaacatgttgcatatcgcgtgggagttatacgaagtacaaattcagatcctaattttcttcgagatcttgacgaggtagacaagatgggggatgatgtctttgagaaatcaaaaactgccctagacataatgcgaaaagcggttgttgatgcaaaggaaaggaagaaagctagagatgaagcaataaaggaagaagaagaagcaaggaaagaggaagtaaagaagaaagcaaagaacgaagcaggagagagcagttcacacaacgtaccaacgtaattaagtaaacataaaaagttaataagcacataagtatttaacgaagcataatatatgtatttagtgttctcttcaaaattacaacaagataaaaaagtaaatatatgattattcttcatatgatattttacattggaaaaatgtttatcacacaaacacgaaaccgaaatgcatcaaacaaaaaccgaaccgaaccgatatagagttacattaatcaaaccgaattataaatggatcataaaccgaaaaaatcaaaccggaaccaaaccttaacaagatcatatcaaatacgtcgtcgtttcatctgagtcgtctctcttcactcgccggagagagagaagaagaaaagacgacggagaaatg

SEQ ID NO: 29522 - DNA, 3000 bp, Unknown; identical to SEQ ID NO: 14707
  misc_feature (1)..( 3000): 2750-1469P.txt file - cDNA_ID_3018678; gDNA_ID_2684216; Annot_ID_191688

SEQ ID NO: 29523 - DNA, 3000 bp, Unknown; identical to SEQ ID NO: 27195
  misc_feature (1)..( 3000): 2750-1469P.txt file - cDNA_ID_3018701; gDNA_ID_2684216; Annot_ID_191680

SEQ ID NO: 29524 - DNA, 3000 bp, Unknown; identical to SEQ ID NO: 14715
  misc_feature (1)..( 3000): 2750-1469P.txt file - cDNA_ID_3018719; gDNA_ID_2685560; Annot_ID_193456

SEQ ID NO: 29525 - DNA, 3000 bp, Unknown; identical to SEQ ID NO: 14715
  misc_feature (1)..( 3000): 2750-1469P.txt file - cDNA_ID_3018719; gDNA_ID_2684219; Annot_ID_191770

SEQ ID NO: 29526 - DNA, 3000 bp, Unknown; identical to SEQ ID NO: 14716
  misc_feature (1)..( 3000): 2750-1469P.txt file - cDNA_ID_3018727; gDNA_ID_2684219; Annot_ID_191768

SEQ ID NO: 29527 - DNA, 3000 bp, Unknown; identical to SEQ ID NO: 14717
  misc_feature (1)..( 3000): 2750-1469P.txt file - cDNA_ID_3018731; gDNA_ID_2684219; Annot_ID_191767

SEQ ID NO: 29528 - DNA, 3000 bp, Unknown; identical to SEQ ID NO: 14718
  misc_feature (1)..( 3000): 2750-1469P.txt file - cDNA_ID_3018735; gDNA_ID_2684219; Annot_ID_191766

SEQ ID NO: 29529 - DNA, 3003 bp, Unknown
  misc_feature (1)..( 3003): 2750-1469P.txt file - cDNA_ID_3018739; gDNA_ID_2684219; Annot_ID_191763
ccgactttgattactgggtaattttaaaaccgccattgttgttctctttactacttttgggaattagggtttatgatttctgggtattagattagataaatttgtttcctttttttgttaatcaatttaaaaatctcttatttctgttaaagacttgtaattttggagtttttaatgcatggacggaagagaagcaatggcatttccaggctcgcattctcagtactatcttcaaagaggagcctttactaatctcgcaccttcccaagtcgcgagtgggcttcacgcgccgccgccacatacgggattgaggccaatgtctaaccctaacattcatcaccctcaggctaacaatccaggacctcctttctcggattttggacacaccattcacatgggagtggtctcctctgcttctgatgctgatgtgcaaccgccaccgccaccgccaccaccagaggaaccgatggttaagaggaaacgtggacggccaagaaagtatggagaaccgatggttagtaataagtctagggactcttctccaatgtctgatcctaatgaacctaaacgggccagaggtcgacctcctggaactggaaggaagcaacgcttggctaatcttggtgagatctcgagttttctattctgtgtactttgtcaagttaagtttttgctttagctctgttagctagtcttgaaggacatgagcttgaatcttatggatgctagaagctttgaatgattctatagttaagttaggttttgttactttgtcgttactgatactcaatattgattgttggctattagtttgacggatctatgtgtggtacaatgctaggtgagaggagtaattggttattagtagatgtggacgaaatcgacttcttgatttaagttattgatttaggtttttaagctgtgaaagagtaatcttactaatccattcatgtttaagtaattggtcatcataatgtgattaatcaaactttaagtaatagcaaactcttgactctgataatttctttaggtgagtggatgaatacttcagctggacttgcttttgcacctcatgtgatcagcattggagcaggagaagtaaactgaccaaaactcctttatatattaatgatcatttatgcagcttttcattgtatcaatttccttttatttttctttgcaggacattgctgcgaaagttttgtcattttcacaacaaagacctcgggctctttgtataatgtcaggcactggaaccatttcttcagtcactctgtgcaaacccggttcaaccgatcgtcacttaacatacgaggtttcaaagtcgttcattcagttaatcgaaaaagaaaaacctgaaaagatttcttatttaatcctctttctgtgtttcttagggaccttttgagattataagttttggtggatcttatttggtgaatgaagaaggtggatccagaagtcgaacaggcggattgagtgtctctctttctcgtcccgatggtagtattattgccggtggagttgacatgcttatcgcagccaaccttgttcaggtatattaaattcttcttcttaatggttgtaaagtgaagctaaaacgaggcgaaactaactacgaatgttagcctttgatatgtttgtgctgtcactttctttcctcttcaagatatcatgtggtagtgtttgaaaaacttgtttgttattcaggtggtggcatgtagttttgtatacggagcaagggcaaagactcataataacaataacaagaccatcagacaagaaaaggaaccaaatgaagaggacaacaatagtgaaatggagaccacaccgggtagtgcagctgaaccagcagcatctgcgggtcagcagacgccacagaacttctcttctcagggaataagggggtggcccggttcaggctcaggctctggcagatcacttgacatttgcagaaacccactcactgattttgatttgactcgtggatgatatacactattagtctttgaagcagcagcatacaaaatgtgattgctgtacatatgttattgtagatttctctctgggaatgttgaaatcagacatttaaggattgatactagatctctcagctccttctaacattgttaatgtaacagaaccctcccactttcatgctattttaggagatttttttaactcttttatgatctcattgtggtcatcaagaacttggtttctttactagttcactatttttctttcaggttctttaacatatttagtaaacttgattcctcttatttggtagacaatgtgtaattcaacacacacaagatttaggatccttaatttataggaagatgacaagctcataatttatacatgaaaagcattaaatattaatgaatatatatcctcaaattgacttaaatttctttttcagtcagaaatctaatgagacattagattttgttataaaccattgaagaaagtctatatcctttttaataaaaaaaattcttaaacaacccaatttattttttttgtaaaccaattgaatatttttttttgacaaaattaattaaagaaatagtatataaatagaaacaatggtcttcacttcctttctcttctttttttttctttccttttttttttctgagatttgctttctctaccagagagactgtaacagtagtagtagctacttttgcttgttgtcttcatttcaaatctgcaattttactttctttttgagttctaagtgaactcaacatttagcttctttttcttttctaggtttcataaaaacagtttggatcttaagctcacagctgaaaataacccgactttgattactgggtatataaaagccgccattgttgttcttttcactctttgggttattagggtttacgatttctgggtggtagataaatttgttcttcaaaaaagtttccttttttaaaaaatctcttagattcttaaagaattgtaatttagggttttaaatgcatg

SEQ ID NO: 29530 - DNA, 3003 bp, Unknown
  misc_feature (1)..( 3003): 2750-1469P.txt file - cDNA_ID_3018743; gDNA_ID_2684219; Annot_ID_191762
ggagatattagcttagatcttagatttaaagcttgtttcattctttgatgttttattcaagtttaacacatttaccattgaaatttgtattcttattcaattatagatttatagtatgtatttgttgatatctctcactttttaaactcaacaaactctaccaaaatcaaactaccagcagctattagaattttgaactattgttggaccaccaatgtgtgaagagaatcatatctcttaatccccacaaattcatgagaaggaaaataaaaaagcaacagttgagatcactttccttacaagaatcagaaagagacccacttttgatgacatcatgtttcagagacccacaatcatatctctctatatatgtatgtatcataatgtgtgtatatgtgttgtgaagtaataagtaagggactttcatagaaacagagccttattgtaccttttgagacaccatcctcaagctgaaagcttccttcaacactcttcttccatttttgaaaatctatctagtacatttattgtgaatttcacactgtccatatcttgtttatttattaaagttattaatgttacatgtagatgaaatggactgatttgtgtatgtttatagctatttatgtaagaagaacaagtaaaatattgtataagttcagtaatggtcggcctcaaatttttcctatcatgaaatttctaagtaaaaaaagacaagtcacattactttaggtaaaaagttggcaaaacaaaaagtgaaagaaggaaagtcaaaactctttattttattgtcaaaagtcaaatgtgtgcaaatgtaatattgttgacattaaacaaaacaaattaatgtaaagattattcataatggagtagcaaaacaaatctaattaaacccaaaatatataatatatgatatatctctagaaaacttttatttatatctagcaccaaattttgactatttggattttttggtcgggtactttagccaccggatattaaatgcatcatacaaactttcaaattaggtggaaacaaaatatatgtacgtatatatatatatatatatattaataaatcactttcaaaacttttaaaagaaaataaaaaaaaagaattttagataaaaagtaaaagagaaaaaggggaatataaaaatggaaaacaaataaagttaggagagagggctcactgtccgaagcaaagaaagaaatagcaaagtgagttagacatgtgagagagaagagattcaagtgtgtccccattctctttcctatcctttagtcaacaacacatctctctcatatttggatatttctaatcaagatcaaactttttacaacaagatttgattttttttgttcttttaaaatcttaatttgaattaagatgatatgaagtcatttcatactagtcttgcctcttgtcaaagtgtaactgaatgaaatttcaagattatatatttataagaaaacctaaaatttttagatatattttgaaataatcttataattatctatactaattaaaaataaattataaatatattatagagcagttgaccaaaaaaaattacagataactattgaagatatatagacatgattagttgaggtgtagaaagtttgtaaagccactaaaatagctccaaaattgaaataatcatgttgtagttttttcttttttctagcaagaataatatatttttgattattttaaaaggtttgtacatttttctctttttattttcactttatttttttagtttctttagaaacattattatacttttcatatatatatattgaatttatcttcaaattttgcatacatattttacccactaaacatgattccatataaaaacggaaaaagtgtgtcacagaagaaataatatattacatgatataataatctaaaatgtcaactgttttctttagaatatgttagaaaagattttttttttaaatctttattggtagcaatgtttatgagaataaagcacataattgtctctcaatgactaataaatttcggtttcagtcaaagatctaacgagatattagatttgtaataatcatcaaagaaagtctatcctttttattaaaaacaaatattcttaaacaaactaatactttaaataaactattcttaaacaaactaatacattaaatattcttaaacaaactaatacattaaatattcttaaacaaatattcttaaacaaactatgcttaaatctttcataataatctttctctcaattgaatttatctttcacaaaattaaataacaaatcaattaaagagatatataaatacgaaaaacaatggtcgtcactctcgttcagcttctttagttttcttctaactttcagagaaagacctctctcaattcaaaagttcacaatattaaaagtataaatcagaatcattaaactgttagtctctctctctctctctctctctctctctctctctctctctctctctctctctctctctctctctctctctttttctcttcttctccctgaattgtctcatctgtcttcttcctttgtctctcctctgatatacattgtgttctccttctcagaaaccctagatttctctcaatcaaatctagcttttctcttagggggagatttgatttttttctctgcaagactgtaacagtaggagaagctactttcctctgttttcttaatttcaaatctgcaatcgtactttttcgagttctataagtgaactcagattttagctttttttttttagggttcataagaacaaattggattttgagctcacagtataaataacccgactttgattactgggtaattttaaaaccgccattgttgttctctttactacttttgggaattagggtttatgatttctgggtattagattagataaatttgtttcctttttttgttaatcaatttaaaaatctcttatttctgttaaagacttgtaattttggagtttttaatgcatg

SEQ ID NO: 29531 - DNA, 3000 bp, Unknown; identical to SEQ ID NO: 14713
  misc_feature (1)..( 3000): 2750-1469P.txt file - cDNA_ID_3018751; gDNA_ID_2684219; Annot_ID_191760

SEQ ID NO: 29532 - DNA, 3000 bp, Unknown; identical to SEQ ID NO: 14723
  misc_feature (1)..( 3000): 2750-1469P.txt file - cDNA_ID_3018768; gDNA_ID_2684219; Annot_ID_191755

SEQ ID NO: 29533 - DNA, 3003 bp, Unknown; identical to SEQ ID NO: 24799
  misc_feature (1)..( 3003): 2750-1469P.txt file - cDNA_ID_3018790; gDNA_ID_2684219; Annot_ID_191748

SEQ ID NO: 29534 - DNA, 1696 bp, Unknown; identical to SEQ ID NO: 14712
  misc_feature (1)..( 1696): 2750-1469P.txt file - cDNA_ID_3018798; gDNA_ID_2684219; Annot_ID_191746

SEQ ID NO: 29535 - DNA, 3003 bp, Unknown
  misc_feature (1)..( 3003): 2750-1469P.txt file - cDNA_ID_3018798; gDNA_ID_1974096; Annot_ID_180710
tgattcataaaacataataacctgataaatgaagatttgtacatttatatcaacgtgaacgtctgtgttttcagtaatttcttaaatagtttttctttgctgattatttttttcgttactttcctaaaagatatgtcatctagttacactgtggtcatcgtgaacacacgcaaacattagattctgtagcctatagtctccggctctcagctcaaaaagggtcattttgacttttgcttaatatatataatttgactataaaaatgtagtgaaatactacaattctggacagtacttctaatgcattggacaaaaaacaaaaaaacaaaaaaacaaactaaatatacacctcattttgttacacatatgacatattaaccattagctagtacacaactaataaatctttcattataatatctaacgccgcagatgatgatgcattgttttatcgagactgaaaatataaataaattcttcacacaatagaaataaaaacaaaatattgaaaaagtaaaatgaaagagatgctcgcattaattgcacggaacagagtctactgttgataaaaaaaaaaaagagtgatcgaacagtccattttttggggtccagtttatttaatttagcattaataactttgtcagcgcgagccactctctatgattttgattccatcataaattataaaaccaaccaaaattcatatctaaattaattcctttaacccattcaataagctttgcttataattctgagacctgtataaattcgaattattgaaagtgcctaagaattcagagtcactttgaatgggacctctcacgtaatgcctgtatgttggatcttctgtcattgtcttatatatattgtctttttccatcataaaatagattgtctttttacgtatacgtacacaaacaatagatttccatttgaattcacatattacatatatatatatatatatacgtgtttaacttagattctattcagtagtttcggatttttagctatgttccatcaaccaaacattttgatttacggtagttagataaaattgacacacacacacacaaaaaaaaaacaagaaactgatcaaaatatgaaaatgtaagcacaatgtaactaaaattcgtttatacgtctaaaacaagcaatagatactaaaatacaacttgttcgttatcaaatgttttttttgcataagagatatatgcaactatttaattaactcaatctttttcactagaatgaattaaggatattgaaaaacagctaggtacgtagtcagggttgtttgacaaattgaattccgttaaaattattgaccacgtgtatggtcataaacaaattatgaattcatgattcgatcaatattacgacctactacatatgatatgatgttgtaattaaccacattctcttgctttttatctcattaaaatttatttattttaattcattattttataccaccactattttccacgttctatggatgatcatagtggagccacgcatgaacatggcaaaaatagaaatatgcacatggcaatatatatacactatctacgtatgtgtcaatcagggcaatccaactttgttgtggtataaactctaagctcgaacagatccgaagatattctttcgttctctgacctgattaatgatcacgaagctaaaattgattatcttttatttttgtttataaattattagttatccttaatctgaaatcattttaacaaaaattttactgaatttaatcataaaaataggcttatgtataagctaacacatattttccaatgtccattattatttaatggtggaattcgatgtttaacgatatgattcaagttataaaaaaaccgaattaagtatctatttgtttctataataaaattctgaaatccaacatctctaaactatatactgcattatataataaacagatcatatttatttgaatagagtagctaagattaggcatactagttcaaatgtttgatggacatccgatccagttagtccgggccttcaatatttgggctcaaatgggccgaaactatattgggtcgtatatgaaaagttgaaatatctccaaactgaattttggatgggaaaaagcgggaagtcgagagagtaccttatttctaattttctataacgagggtagggcccaccaagaccatatagcgtaaagcaaaatcaaaatcaaacaattaggaaaaaaacataattttctcttttttcgaaattcgaaccgtaattagccttttgtttttcttggaatctaaaagaaataaaagagaggaaaaaaaggaggaacagtgagcaaaatcgtgcgactgggaaaaatttcgaatttttttctcttccggcgagggattcaaacttccgcctccaatttctcgccgtgaatctgagttttttttttccgtagcatttcaataggagcagtcttcattctccgtcgtctacactatagagaggtttatctacaagcttcttcttctccttatggcgttttaggttcgtatcgttttttttttttttggccttcgtctctgtgttacaaaagcgttgttggcttcttagggtttttgactggatctgcgtgattttggtggaatatagagctgattttatgggttgatttggtcgacattgtggatatttgctaagcgagatgttgaaatgtttgaacaaacttcatcattgtttacaatttaaagcaaattttggctgtttatctctttaattggggaactagtcttatctgaaattgaaagcatttgataggtattttaccatatgaggatttggtgtagaatgatgaagtaaggtctttcatgatttaaccatggattaggaattaggaagtatatgtgaaaccaattaacattgatgctaactttgttgttggctaattggttcatttgctttagggtcttctcgctactataattctgggagtcgcgtaatctctgagttgaaatg

SEQ ID NO: 29536 - DNA, 3003 bp, Unknown
  misc_feature (1)..( 3003): 2750-1469P.txt file - cDNA_ID_3018826; gDNA_ID_2684220; Annot_ID_191825
cttacagaattcagttacgacttagacaggtccaatgcacagacattcgacattgcagactctgctcactcaggacttgtcaacactgtcaggctagacttcaattccaaccatggaagctcttcacacacttgcatctaccgcttcagggttcatggccgtgaactagactcagtctctgttgctcatgcttgatctgaaagtccacgtcaaacttttcttctctttgtaacattccctctaatagatatctctcttctttttttgtgttagtttatgtggtgggaaagcttctcttagtctgtaatcagaatcatttggttgtattcgtgattattagcttcaaatctgttttggttcggtttatttggtcagggtatgtatcctccgaattgaataatatagatcttagtttgatgtccggttttggttttgtaacagagtttcaatttaagctttcacctaaaacaaatcatacaaattctaatagagtatacatatttcattagttgaaacaaatattgaatttggattattaatggttaccttgggtacttggtattacaacgatatgtgatgaataggaagagtgtgtatatagatggaccataacttgttagtgtgaattgcgtaatcgacaaagtgacgacttcttcttctaggctgcaccgtcttgccttgtctaaaagcttcccaacacatcacatgcaaaatctacggtcaaataatagatatgaaaccctcttccaagtcaacacagcttgtttgattataaattaaattaaatacaaattcatctttgacatgtctgattaatgttaattttttacagtgtcaactggcataacaaattgagctaaacaaaattaagctctaaaaatagccattttttacggttaaatcacatgaagaaacctttcctaaccaagtcaacccatgtttggtcgtcgtgacggtggaccaccggctccaaaaaaactcttcatttgaccaaaacgagtataacccttaattattagaccaacatgcattacataaatgataaattcagtttccctcgagcccatgcattcattaaatagcagaaagctcctcgtatagtctatatatatagcagattttagatccaaaataacaaacaccatcaatacacaaacaaaacaaaaaggatgaaaatgcaaacactaaacttcacttcttctctcttgttcttgtcttttatcttcctctcatgtgctctgcttatctcatcacaacaatctccatcacagccacattctgagcctccgtcacagctaccttttgagcctccggtagagtcaccattcttccctccgtcacagccaccaatattcgtgccaccgtcacagccaccttctttgcctccgtcacagtctcagtcaccttctctcgcttgcaagtcaactccataccctaagctttgccgtacgatcctcaacgctgtcaaatcctcaccgtcagatccttaccgttacggcaaattcactataaagcaatgcctcaagcaagcaagccgtctatccaaagtcatcaccagttacgcgcggcgcgtggaaagcaaaccaggctcggccacggccgaggaaataggggcggtggcggactgcggcgagttatcggagctgagtgtgaactaccttgaaaccgtcacgacggagcttaagacggcgcaggtgatgacggcagctctcgtcgagcatgtgaacagtcttctcagtggtgtagtgacgaatcagcagacgtgtcttgacggactcgtggaggctaagagtggtttcgccgccgcgattggttcgccgatggggaatctcactcgcctttacagtatctcgttaggacttgtgagccacgcacttaaccgtaacctgaagaggtttaaagcctccaaagggaagattcttggtggtgggaactcaacctatcgcgaaccgctcgagactttgattaaggtaattaattaaaacttgtttctaattcttttcttttttcgtttttgtttgtttgtttatactagcttttatacattcctttacatattattataaagttgttaataatctagttgtaaagacattacatatttttgaaatggttggcatagagatataagaataggaatttggggaaataccaaaaacattatatatatatatatatatatatgccttcttatcataaatccttagaaaaaatcaaaacagagtttttaaatcgatgatttataataatttttgtatggtcaccactcaccacaattcaaacatgaataatgaaaggttatgcaaaagcctttttggacatacatgtatgaatagataagcatcgtaggaggacatatactaagttaaatatggtatgaatttactactttggacgcacggaatgatttaatattcgtgcatatctaaaattttctagatcgagtcataaatggatgtgctcttgttttgtgtgtgtgagccagaacacgcgtaagagagtaaatggcacatggcctacgcacattttagtacaactcaacaatgatcaaatgagtcctatctttgactttaacaaaagaaatcaatttggtccccattcggatccaactgtattcacgtgcataagagtgtcccggtcatttcatgtgtggctacaatgaacattgattttaaaaaggcatgagtctacaagctaatcatgtactaagcacattttctttttctggtatagggtttacgtaaaacatgcgacaacgacaaagattgccggaaaactagccggaacttaggggagctaggtgagaccagcggcggttccatcctcgtgagtaaagcagtgatcgtcggtccgttcaaatccgacaacttcacaaccatcaccgatgctattgcagccgcacctaataacactagaccagaggatggttactttgttatctacgcaagagaaggtgtctatgaagaatatattgttgttcccatcaacaaaaagaacttaatg

SEQ ID NO: 29537 - DNA, 3003 bp, Unknown; identical to SEQ ID NO: 24918
  misc_feature (1)..( 3003): 2750-1469P.txt file - cDNA_ID_3018830; gDNA_ID_2684220; Annot_ID_191824

SEQ ID NO: 29538 - DNA, 3000 bp, Unknown; identical to SEQ ID NO: 14735
  misc_feature (1)..( 3000): 2750-1469P.txt file - cDNA_ID_3018838; gDNA_ID_2684220; Annot_ID_191818

SEQ ID NO: 29539 - DNA, 3000 bp, Unknown; identical to SEQ ID NO: 14724
  misc_feature (1)..( 3000): 2750-1469P.txt file - cDNA_ID_3018846; gDNA_ID_2684220; Annot_ID_191814

SEQ ID NO: 29540 - DNA, 3003 bp, Unknown; identical to SEQ ID NO: 27209
  misc_feature (1)..( 3003): 2750-1469P.txt file - cDNA_ID_3018863; gDNA_ID_2684220; Annot_ID_191806

SEQ ID NO: 29541 - DNA, 3003 bp, Unknown
  misc_feature (1)..( 3003): 2750-1469P.txt file - cDNA_ID_3018873; gDNA_ID_2684223; Annot_ID_191855
aatttgcttgtaccaggcggcacaggcaaaaggtatctttcttgaccactttgttgttgttcagtgcaaagttttttgcaagcatcctcgcacattataggagtagcgtttttaacttctttcaagcattggtttgagacacaatgtttaatacacatatttacattattcgaatgtgagatttgtgccgaaaacatcattgcgagcaaagttgtaatgatcagaagatcgcatgttttcttcaaactttgagctgccataatgtatataaatgtattgatattgattagaacaaatattattagtaaacaagatgatttggtgatgaatattgggttttgtttagatgatttatatagtgaaagtaatgtttcctatttttagaagttggttttttgttattgtttctttctctagaagttacatacatctctgtgatttagtgttacgctgatccaaacaactttattgttatgaataaaacaataactatcgtttaaatgttacaaattaaactcaaattggctacgtcatagtggaacttaattcgaggttcaagtcgttttgaacgaaaaccatgaaattaactaaacataacttaattatatgttcttacttgttccatacaaaatctatttttaacaaaaggatgcaatgtctctaaaagtatttgtcgtttgtatgtataacagtatctctcatgaaaagtaataactaagtgctaaaagactctattgcatggtttagtatctagttttggtcgcaaatgaggagaacacaatgtcaacatatacccttatttttaagctagtttctgatattttcaagtttcaacccaattggttttcgttgtttgaactgttttaatatgacatataccgcaagagggaaataaagagcacaactaagtcattgcaatttgatgaatgaaagagattaattaaaaagaaaaattgtaattttataattactttattttggtttgtttaatttttatttttgattaagaatgtgattagctcttgtgcaaatgctaaaataactctcaaaaaagattgttcttcatttttgttgctcttcgatgccaccaaagcgtctcatatcaatggatttcattgaatcgaacctgaatactgcagacaattcaatttgagaaaacacattttatcttcataaagtttttagttgtaattttggtgaaatttgatgaactcacaatttgatgtaaactaggaaatttttgatgtaaagaatcttaattgattagattgatgcacaacttcgtcgagtctagttgaacggaataagtctagactcttaaagacgttgattgcaagttgagagaatgaatatgcataaaattaatatgaagtcggtagtagattcaaaatgatataataataataatactatgtagtttaaaaatgatttgtttaatgtaattttttttaatcgtaaacaaaccaaacggtttttatttgcatttgtattttattctatgtatttgaatctattgaaatggattcaaatctaggagataatgagtttttccttttctttttttataataatgaatgtgaattaaatttatattatttaaattccttttgctggaagattaattgaaaatacgcgacaacatccatatattacttcaagacacttgacatgagaacaataaacaacatcatataagaagtggattaacatatatatggagaaacaaacaatgagagcttttgcgattataggttaaaaagaccacacgctttaggaaacatcctgcaaaacttgcttgtaccaggtggcacaggcacaaggtatctttcttgaccactttgttgttgttcagtgcaaagttttttgcaagcatcctcgcacattataggagtagcgtttttaacttctttcaagcattggtttgagacacaatgtttaatacacatatttacattattcgaatgtgagatttgtgccgaaaacatcattgcgaacaaagttgtaatgattagaagatcgcatgttttcttcaaactttgagctgccataatgtatataaatgtagtgatattgattagaacaaatgttattagaaaacaagatgaattggtgatggatattgggttttgtttagatgatttatatagtgaagataatatttcctatttttaaaaattggtttttctgtttcttgtttctttcacgacggttaagattgcatttctgtgatttagtgttatggtaatccaaacaactttattgttatgaataaacaataataatgttacaaatccttgtaatttaaccataatcagagaacgactaaaaccgtgaaattaaccgaacagaaattaacgattggctaaacgatttcggttcggttagtttccggttaacaaaattaatccgaagtcactcctaggcctttggtcaatcttcgtttctcgtttctctgttgagtaacgacaatcgacaaaggaactttgctcaatcttcgtttcttcgttaggtaatcttcgtttctaagaattggaatgttctttttcataggattcatgatagtttttggctgcaattttgaatctttattctgactatgtgaggaatttgattttgttatcgttgtcgttgtttcgtcttaggatttgtgagaatcattgaacaatttttcaactttgacaattaataacacgagaggagcttcagatttatgtgtttgagtattcaaagatatagcttttatatttgcctttctgggtttcatggagatgaatctgtatacttatagctcattaattagtcaactctgttgttgcttctggtttgacattgtattgagtagtcaaagatttgagctttctaactccacatgaagatatagcgtgtttacatttcatttgtgaaaagtacttcagtccatttgggtttctatctggtttagaagatatttctggtgaaaactttatttgggcattgcttcttttcagtgactgatcaaagatg

SEQ ID NO: 29542 - DNA, 3003 bp, Unknown; identical to SEQ ID NO: 27210
  misc_feature (1)..( 3003): 2750-1469P.txt file - cDNA_ID_3018893; gDNA_ID_2684223; Annot_ID_191859

SEQ ID NO: 29543 - DNA, 3000 bp, Unknown; identical to SEQ ID NO: 14747
  misc_feature (1)..( 3000): 2750-1469P.txt file - cDNA_ID_3018908; gDNA_ID_2684223; Annot_ID_191853

SEQ ID NO: 29544 - DNA, 3000 bp, Unknown; identical to SEQ ID NO: 14742
  misc_feature (1)..( 3000): 2750-1469P.txt file - cDNA_ID_3018908; gDNA_ID_2684223; Annot_ID_137502

SEQ ID NO: 29545 - DNA, 3000 bp, Unknown; identical to SEQ ID NO: 14741
  misc_feature (1)..( 3000): 2750-1469P.txt file - cDNA_ID_3018919; gDNA_ID_2684223; Annot_ID_191849

SEQ ID NO: 29546 - DNA, 3003 bp, Unknown; identical to SEQ ID NO: 27212
  misc_feature (1)..( 3003): 2750-1469P.txt file - cDNA_ID_3018925; gDNA_ID_2684223; Annot_ID_191846

SEQ ID NO: 29547 - DNA, 3000 bp, Unknown; identical to SEQ ID NO: 14763
  misc_feature (1)..( 3000): 2750-1469P.txt file - cDNA_ID_3018971; gDNA_ID_2684224; Annot_ID_191889

SEQ ID NO: 29548 - DNA, 3000 bp, Unknown; identical to SEQ ID NO: 14761
  misc_feature (1)..( 3000): 2750-1469P.txt file - cDNA_ID_3018975; gDNA_ID_2684224; Annot_ID_191887

SEQ ID NO: 29549 - DNA, 3003 bp, Unknown
  misc_feature (1)..( 3003): 2750-1469P.txt file - cDNA_ID_3018979; gDNA_ID_2684224; Annot_ID_191881
acgtatgattggacggtgacataagcgactgtaaacggcacgtgagggaagcagagattcaccgcttcgtgtccttaaaaacgtcacagaaagagaaatggaacaaggaagagaagactgacacacaaagtctgatgaatctgttggacaaaaatatgcctaagcaaagtttcttgatatgaccttaacactattcgacctcactccttacctctgtttttatcgtttcatcttttttttattaaaaacaatgatctgtatttcaataaaagatacgaaaagagtcattattatgtaactttaatatctatctcatttgccaactactactcctgtgcttcttttaataccataatttactttaatcatttttttttttacaacgtttggagattctttaagcgaatctgaagtaaaaaattgctaagcacggaaatagaatcttctaaagcagttgtcagattttcccaaaaagaggctttacttaacgcgaaataagcaaaaacaaactatacgatatactcatttactttactaaattacgatttttgtataaatgaatacaaaataataagacatgatgctctaagttgttgtactgatattgatatagcttttattgaatatttgtatcatgtaacttaaaatgactagatatatttcattcagaaaactgtataaatccaaaagagcatatcattgattcgtggcgaagcagtgtacatggtgacgcattaatggcttcttttccagtaacttcgcgtgtacgtaaaaatcgatatttacatctatctatagcattcataaattacattaatgggttatgtagtcgtcaataaaggtgcatacttaaatgcgcttgtttaatttatacgagaagttaggtcaaaactttcatatcgatcccacaagaaaacttgaatacacataattgcaaaccctttattaaaaaacttaaatacccagagaactgtataaacaaaaaagaaaaaaagaactttcggcacgttttgttttgtcatttttcttcagtgttttcaaataaacctattaattcatattgtaaatattataaaacgactaactaaaaagaaaaataatatatataaaaaagaattatgaattttatatatacatttttttacatatataattagatctggtcaactatatacaataaatcatacttgtcaagtcaaaaagcaccgtaatgtgaaataattcaagatctgattatttcttcacaagatatgatagaaattgagtatcataaacttggaaaagaaatctattacaacttataatacaaatggaggaatttattgtaatggcctatgaaaagatggtcaaagttgtaggtattttatcagtagaaagagacaatactttttagtttcccctataacatcgagacatcaatttcttgcatgggtccaattccaactatctttgtaaaagaccagttttatacatttatatgtttatgtaatttttattcactaaaagattgtaaaaagtcatatttaacttggatgtttggagtcgtgatatttaattcaatataatcccctggccggaatttatttaatatatagtgcaaaatgactcttttgatacagctgattgcacaaatatctttagtagttttagctcagattttgtttttgttttcgttcctatgtcttatgtatttaataaaattaatttggtttcttcaatcaatttcgcattggataagcatcgaagtgttaaataaagtaaagttttgtctcttttccttcaactcggttttaaaaatagctatctctcaagcctatttctaaggccatcaatgtagtctttcagaattcaagtgatgtcaagaacattggatagtttaattccttctgtaggttcaattgaaaaccttgcttttgtgttgcagcatacaatgcacaaaggcttgttcagagaccaattggcatgcctaaggagaaatacacgcactttacaaatatggttatttagaggattaagagtttcacaatgactatagaaccccataatccaaggcgaagacatctaattcatatcacaagagaaatgtttattgcaaaatgttatgacctaatgtagcacctatgctttacctacttttaagttatttcttgtttatattttggaaattatcagtttactagcattttcgatcatatcgttttaagacactgtaaccacacatttcttggagtatttgtaatatgtgtgtgtacatgcatgtggtgtatgtatatatggacactcacgattgatttaatgctctgtcatatcaaataacgtatttactattacaagctggtggtgtcattgaagtcatcattgtatcttcttccaaattcataaagttactgtcactgatactattggtgggccattttttaccatcacccatttttcactactatttatcttttcttcaaaaatgttttcagcataaaaaaacatatttggaaagatagacgcaaacctacgccaagaaaagagaactccaagtctccaacctaataattagcattagcatttaaaaacaaaaccgcgtgtccatttcatgtttttatgctgtgtaataacatattgctgcgaagtacaagctatgcaaattggtattacatgagtttgagttaggatacaagttttttagtcaattgtactaatcaaactgccaaaacaattagttccccagctctaattttttttgttacctttccattattttcgagtaaatatgatactgaataacttattatacatagtttcagtttgtttatcataatttgtttttttttttgaatttatatcataaaatatttcaatgtcatttaaatattatcctgatttcgtctatctctctctctctctctctctctctctatttaagacaagctaaaggtagaactgtagaggccaatctcaaaaagtctccgacactctctagatttcctttgctccttcgttctggccatg

SEQ ID NO: 29550 - DNA, 3003 bp, Unknown; identical to SEQ ID NO: 29549
  misc_feature (1)..( 3003): 2750-1469P.txt file - cDNA_ID_3018979; gDNA_ID_2684224; Annot_ID_137517

SEQ ID NO: 29551 - DNA, 3003 bp, Unknown; identical to SEQ ID NO: 27223
  misc_feature (1)..( 3003): 2750-1469P.txt file - cDNA_ID_3019029; gDNA_ID_2684225; Annot_ID_191958

SEQ ID NO: 29552 - DNA, 3000 bp, Unknown; identical to SEQ ID NO: 14797
  misc_feature (1)..( 3000): 2750-1469P.txt file - cDNA_ID_3019033; gDNA_ID_2684225; Annot_ID_191956

SEQ ID NO: 29553 - DNA, 3003 bp, Unknown; identical to SEQ ID NO: 27225
  misc_feature (1)..( 3003): 2750-1469P.txt file - cDNA_ID_3019044; gDNA_ID_2684225; Annot_ID_191950

SEQ ID NO: 29554 - DNA, 3003 bp, Unknown; identical to SEQ ID NO: 27226
  misc_feature (1)..( 3003): 2750-1469P.txt file - cDNA_ID_3019048; gDNA_ID_2684225; Annot_ID_191947

SEQ ID NO: 29555 - DNA, 3000 bp, Unknown; identical to SEQ ID NO: 14789
  misc_feature (1)..( 3000): 2750-1469P.txt file - cDNA_ID_3019052; gDNA_ID_2684225; Annot_ID_191941

SEQ ID NO: 29556 - DNA, 3003 bp, Unknown; identical to SEQ ID NO: 27235
  misc_feature (1)..( 3003): 2750-1469P.txt file - cDNA_ID_3019060; gDNA_ID_2684225; Annot_ID_191936

SEQ ID NO: 29557 - DNA, 3000 bp, Unknown
  misc_feature (1)..( 3000): 2750-1469P.txt file - cDNA_ID_3019115; gDNA_ID_2684226; Annot_ID_191997
tctttgcatacacgaaactacaaatgtgagaacgaacaaggccaatgattaatatgattaatattcaatgacatttctaaagaacactatctggaaaattaagtaatgattgatgacgaacaaaactctaaaagccgagctacactggtgagaaaagagggaggaatcaaaagcaccttgagcatcgtcgtcttcctcttcttcgtcatcatcatcatcgtcttcatcatctttaacatcttctacaatcggttcatcagtctgcaaaaacaaatcctcgagcgtgagactaagaagtaaaaaccgtgacaaatctacgtaaaatcgtcttaacctgaagctttttctccagctcttcagcaatggcggtaaccggtggttgctcaggttgtccatcggcagattcagtgactacagcaggaggaggagacatggctttcggagagattttagggttccgattcgattttgcgtcagccaaatggataaggaacggtgaggtggtgagtgacgactgtgtgtgtggtaacgactcgggttctgctttgtcgttgtccaattgggccttttattgggcttctgaggcttaataagaacaattttggttatctatataggccatgaaattccagtcctaaattttctctgggccgcacatgatattcacgtgcccatttcgaaacattaataatcctctagaaaccctaataactctatcgaaataaatagtgacctcgtacgttaacccctaatcttctgtttggttacaggttcgattcagagactctacacgttttgtttttatgtttcacttgaagttcagattatgaatcgatgagctctattgatggttttgtagatctttcgtgggacgcgagctagcctacaatggccaccggtgagctagcttgcacttacgcagctctcctcctccatgaccatgtcaccgtatgtactttctaggctcaatcttgacatcaatcctactggagccttaattaacttgtaggttgtttgttttaattaacatgtactcaaactattttgtttacttgtaaactaggctgagaaagatgtcaacattggtgaaaacagccaatttgaacattgaatcatactggcctagtcttccgccagaacaaaaacatggatgatctcatcatgaatgctggtgccggtggatctgctgcttctcccatggccgttttttcttctgcactttcatctggaagtgccactcaagctgccccagtagctgaagagaaaaataaggtatcgtattcttctctccttgaacccttttactaattaatatactatactcataaattcataattgtaattactgttgatattcaatataaatatctaatttcttggtttaatttgttcttgtgatgaatcatctttaggaggacgtgaagggagagagtgacgatgattttgtatccggattgttgactaatagatttaacctatcttttgaaggcaattgatgtttagtcgactcaattttttgagatttattttattcttaggaaagcctagtaattttacttggaacatgtctttttttggcaaacacttgggacaggttttatcatgagttttgagctataatcaatgcaacaatgttgggctataacactttttcggttaatttcgctcgcttacctaaacagtaaaccctacatatgactaagtttggattgtatttagataccgaaacgcctgtttccgaggtttactgacagatttgtccctgagaaattaataggctgtttacttgtaggacatcattctttaatttgaaactattgcactaatcgctattctcagttaagttgatatatatctgatatgcggagaattattttgaggaagaatgtttcctaaaacacaagaaaaccctaggtgataggcattcattcgtcaaaaatgtagagaccataatgaaattgttaagcacgttatatcacggacaaacgagtatgcccccccagcaacgccatctgccactatacttagcttctctctctctactggcgtcaataaacgccaaatttactagccttttcaaatgctgcaccaactgaggcttctttctatggttgatactccttcatctgtggacaccctatttattcctacccaacgaggttcattggcaaatgaaaatctagttaatgtttttgaaagcaatatttttgcttccttaaactcaggatttggtgatacttgttttgagatgggtgactcctctctaaaagcccaaggaggaaggccaatcaagcctacgcaaaaatatcaagagaatcaatgtactacgatttggccgtggtggtcgcggttcatcgacctaatccattgcttttctttctctaatctaaaacctacttttactgtatgttattctctttcatctactttcataaaactatatgatcccctcatagtcatatccttttcatattttttatgcatataataaattgaactcaaaatttattcaatttgattaaatagaaatttgatatcttttcaagataatcacactcaatattttagtaagtcattttaaaaatatacaaaaaggcgtgaaagcaacggtatgattgggtaattagtatagtgtatgtatgtatatatacattaaaaagtactacctaattatagataaataatttgtataataactttgtaatctcgattggtatcaatgaatttagaaggaaaagaagaaaaattatagataaaattatctatatatgtaatggtatctaataaggatgctacaaaaaggaaattaaagaaaaaaagataaggttagaaaaagggagaaagataaaaaaaaaaaatgtggtaggtagacataatccgaaaggtggcaaaatcgtgtctgtctagtggatctgtaagggtttcatttataaggtcgtcttgtgtttgtctatcggtactcagaactctaagggtttcatttctttttcatgtgcaatg

SEQ ID NO: 29558 - DNA, 3000 bp, Unknown; identical to SEQ ID NO: 29557
  misc_feature (1)..( 3000): 2750-1469P.txt file - cDNA_ID_3019115; gDNA_ID_2684126; Annot_ID_191092

SEQ ID NO: 29559 - DNA, 3003 bp, Unknown; identical to SEQ ID NO: 27105
  misc_feature (1)..( 3003): 2750-1469P.txt file - cDNA_ID_3019119; gDNA_ID_2684226; Annot_ID_191995

SEQ ID NO: 29560 - DNA, 3003 bp, Unknown; identical to SEQ ID NO: 27105
  misc_feature (1)..( 3003): 2750-1469P.txt file - cDNA_ID_3019119; gDNA_ID_2684126; Annot_ID_191090

SEQ ID NO: 29561 - DNA, 3003 bp, Unknown; identical to SEQ ID NO: 27242
  misc_feature (1)..( 3003): 2750-1469P.txt file - cDNA_ID_3019126; gDNA_ID_2684226; Annot_ID_191993

SEQ ID NO: 29562 - DNA, 669 bp, Unknown; identical to SEQ ID NO: 14503
  misc_feature (1)..( 669): 2750-1469P.txt file - cDNA_ID_3019126; gDNA_ID_2684126; Annot_ID_191088

SEQ ID NO: 29563 - DNA, 3000 bp, Unknown; identical to SEQ ID NO: 14829
  misc_feature (1)..( 3000): 2750-1469P.txt file - cDNA_ID_3019147; gDNA_ID_2684227; Annot_ID_192027

SEQ ID NO: 29564 - DNA, 3000 bp, Unknown; identical to SEQ ID NO: 14827
  misc_feature (1)..( 3000): 2750-1469P.txt file - cDNA_ID_3019147; gDNA_ID_2684227; Annot_ID_137599

SEQ ID NO: 29565 - DNA, 3000 bp, Unknown; identical to SEQ ID NO: 14828
  misc_feature (1)..( 3000): 2750-1469P.txt file - cDNA_ID_3019172; gDNA_ID_2684227; Annot_ID_192029

SEQ ID NO: 29566 - DNA, 3000 bp, Unknown; identical to SEQ ID NO: 14828
  misc_feature (1)..( 3000): 2750-1469P.txt file - cDNA_ID_3019172; gDNA_ID_2684227; Annot_ID_137600

SEQ ID NO: 29567 - DNA, 3000 bp, Unknown; identical to SEQ ID NO: 14826
  misc_feature (1)..( 3000): 2750-1469P.txt file - cDNA_ID_3019189; gDNA_ID_2684227; Annot_ID_192020

SEQ ID NO: 29568 - DNA, 3003 bp, Unknown
  misc_feature (1)..( 3003): 2750-1469P.txt file - cDNA_ID_3019210; gDNA_ID_2684228; Annot_ID_192145
tctaactttttcataatcataccaacaggttgtgagctccttgaattctcatacagattcagttgaatgtgtgaagttttcaccaagctccgcaaccatccctttggctgcaacaggtggaatggacaagaagcttataatctgggatctgcagcattccactcccaggttcatctgcgagcacgaggtataaacccttatagtttctctgagatagcatcaaaacagatattgaaactaaaacaactcctctcttcttcttttttcgattacaggaaggtgtgacatctctgacttggataggaacctccaagtacttagccactggctgtgccaatggtacagtgagcatttgggacagcttattaggcaactgcgtccatacctaccatggtcaccaagatgcggtccaggccatctcagtctctaccaacacggacttcattgtttcggtatctgtcgataacactgctagagtctttgagtcatctgagttccaaaacaaagtgacataggcaagtgaggagaatacttgcagatactatccagacatgttgctatctgtgttcgttgttgtggtcttaattctatgctttgtgggggaaaattttgacaagaaagttatcaatgtctaaaattccatatgtacacggcttaatttattgataaatgtagtctctgtttggaatttgtccttcattttacagttcttatggttcgaatgagattgataaatgttactccttacattgatatcgttaatgaatgagattcatgctaatgttccactagcaattgaactacttgatatcatgagtctgccaaatcgactggagaagtcagatttagggtctgagcatcaccatggaattataaccgaactctttataaaaactcttctcccttgagaagtaagaatgaaacgggcaagctatagagtgagattactacacaggagaagaaacgaatctgctgaaaatgcagccaccggtaaagttggattaagtctctaatacatccgactcctcttcttctcagtctttaaactgatcttgctccgcctcgattgtgccttatctcttgaacctgagtttccaaaactcctcctaccagatcttggacttgaatttctacgaccacgctccagatcctggttttgatccacttcatcatcgtcctcgtcatcatcaacaaagtctccttgacgatcatcctcgacatcagaaccagaaatgtcatcattctcagccttcgcatcagtatcacaaacttccccttccactttccccttatcttctttcttgctgctcgaagaaactgccttgttatctttcttaactgtattcatgagtttcatgtaacggttcctgcttgtcaccaattcattactctctatcaacatccccctcttgtaaccatctctaagaaccacagtgtgagtcctaagcttactagacaagtaaaagataccaggatgattatggagaactctcttaaacctcgatctcaatcccataaactcaccaagatgcaaaatagcatctttctcaaccttcttcgacacaaaaaggttcatgatctcgtgcaaaacagccgccgcccacttatcagactcatcgctagtcgcagacagatgaagtgcattctcataaggagaaatatacggcaacttctgccaatcatcaatccatttcttcatcttcttatcaaccacaaaaccattcgaaaacttcatcggaaaagcaatcgccgatcctttcgtatactctcctttacgtaatgttctagctttcttctccaacacagatacagcatgctcattgctccaacaaaccagctctagctcaccactacatcctcttaacttcgatttgataactctaaagtaatcaggaaactcaggtaccatagtttcaacataatccttaggtaaacctaaatcccatttcaacaaatctagaatctctaatggaattttgttaatcctattaatcatcagcaatttcaaaagcctatcagctaatccttgcttataagtctcactaccgtaaaccaattgctcatcggcatcgtggtttagaatctccggcgtgaggctgatgtgaggatgaataccaattcctccggggagaaactcttggaaaacggaagggaagctacgtatgaactcgattggacgaagaggaactcgtagtgaatctttctgtgaggtgataactgagatcggaactgattttgctggctccgatctgattaggtctttgatactgagaagtggtctgagattcttctctctttctaccgcgtggtcgagtcctctgtctcttacgaatttgtaggtatcttccaccgccgacgtatcggcgaaggttcggtggccggaatgacggcggatagaaatggaacggaaaatggatttcatcggcgatttgattttttagggtttaagagggttttggctcatcaatggtgtttcgaagacattgatgtggagctgtgtgtgtcactcgagactcggaagtgaagagtttttattattggttatgggcttttaagttgggcgttttaggcccactgtagttttttctgtgacgttgcccatctttttttttataatgatgagcccatctaaaatgttattctacaaaacaataaaagaaagaccaggattcctttgcttaaaagaccagggtcctttgctaaaactatattataatgaccaatgaaatcataattaataatgaccaattaaaatgatgacaaaaaaaaaaaaaacccaattaaaatagtaaatttatattatagtcatcaactttaatactttgttgcaaaataaaaggaaacagtcgcataataatccactaatcacaaacctttaccctttcttctcggggccaatcaaaaacttcaattaaccagaaaaggtcagattctccgccgcctcacacgacgggcaacttcagttcctgccgtcgcgttagatcccgccgtcaatcggtcatg

SEQ ID NO: 29569 - DNA, 3003 bp, Unknown
  misc_feature (1)..( 3003): 2750-1469P.txt file - cDNA_ID_3019218; gDNA_ID_2684228; Annot_ID_192143
ttaagatatggtcttctgtccaacttaattctcagtgagatcactaattttacttgatacgtgttcttgacttgttcctcctatggtaatgtaaataacctagctattttactttatagaatggtgcgagggacaggttaccgagtacctcgtggcaactttcggtgattatttcacagatgtgaaaatgtaagtttttctttcccccttttgtttaacaagagccaaaaatgctacaagtctattgaagatgtcgtggtgaatactggatgcaggtatgtcgaagaaagatcatttagaagatttgtcgaagcatgtttggaagaaacagtcgttgtctatgttgaccatctcctaactcaggttcccccatttattctcaagcatttttaccttttatatttcatcagcatacacaaacactgaacctttggggttgacgtgtgtaattccagaaaaactacatcaaggaagaaactattgaacggatgaggctagatgaagaggttctcatggatttctttagggagtatataagtgcatctgtaagttggtttcagcacttaactcatttttaacctgaataattttatatttctttgaagtattgcttaatatttccactggaactgtgttacagaaagtggagagcagaatcagaataatgagcgatctgagagaacttgcatctgcagagagtctagatgcatttacactcgtgtactcgaatattctagagcaccagcctgactgcccggtaaatattatctaaacaaagcctgctctggctttttacaatatcagtatacacagaatctctaatatatggtatgcaggccgaggtcgtagagaagcttgttagtctgcgtgaaggcataccacggaaggacacaaaagaggtaaacataccaaactctcttttttggaaaatgctgggttataattgtagcgaatcacatggatttttaaactatggttacgagacttcaaatggcgaagaattcttaaattgacgaaatggttatggtgatgaaaacaggtggtacaagagtgcaaagagatatatgagaacacactggtagatggtaatcctccaaagacaggatttgtattcccgagagtcaagtgcttaactgcttccaaaggatctatgtggcgaaaactcacttaatctgtaaaacagcgttcagcgtttgcgtccgtaactgcttttctagttgagatgatgttctttctccaaattatggcgtttgcgtccatgtcttctttttctttgcatggtatctttcctctgtaaattctgtgttttctcttgttttgttctttttcttacctttattcctggatttgaaagttgaaacgctcggtggccacttgcactaggatattatcccgttgtatttaggaggcgtatttttttgtcgcaaattttaattctactgtttcatttaattttgataaaatcttcttaaagttcgtttctctttcataacaaggtagctcttattgtttttagaattatttctgatttgtgaaattttgaatttgaagcatatttttatcatgaatataaaaaatgttggggattataaaaaagtttgtaaattcactcattggcagctgatttagccactcacaatatctaaataaataattgtaagcattatcttgaaatattttctgaaatgactgtttcttttttactttaattaaattttgttctagaaaccttttgatcataatgaaaataaagagtccatccaccacatggggtaagcataatgtgtgatatttaaagggtaacaaatgtaatctgctttttattttactttttacctctactcaaattgtatgggcagttttttttttttttttaaatgataagacaagtatctgtttaatggtattgtgatgaaacagtagtaaagtcatatcgggcacgccatactacttccacagtggaacttggccaaattttgtctttgccgtctctacagtttcttccaccaaattttttgttgacaaaactcaaatctttcaatctcatctctgccaaagttgggtttagaaagaatatcagcaaacactaatatctttattgttgcatggtttatcaatcacaaaattcacaaccattgtaaaaaaaaattcacatttttggtatgagattgctcacatgatagtgaacctctttaacattttaactttactttcataaatacgggattacgaatcttacttgcattaaaaatttagaaaaggtttttctacttaaagaaaaaagggacccaacagagagaggtttgaccaggagaaacgggtgcatagccttaagagctttcaactactttaccccaaacccaaagcgatgtcactttcaaccatctcttctctcccccgaacccgtttttttgaccggtcagttcgggcagcagcaccgttacgggcagcttatattcctcgtcttcctcctctacaccactgcatgcccataaataaagcccgttgagatctttaaaaatattaaataatatatcaacgaaaaagctattttattcataagaagaaaaagagaggaacaacaacaacacactaatcatagtttctctggcaggcttgttgttgcggcttaataaaaagctcttttgttattattacttcacgtagattttccccaaaaagctcttatttttttgtttaaaaaaaaaagtttcatctttattcaacttttgttttacagtgtgtgtgtgagagagagagtgtggtttgattgaggaaagacgacgacgagaacgccggagaattaggattttgattttattttttactctttgtttgttttaatgctaatgggtttttaaaagggttatcgaaaaaatgagtgagtttgtgttgaggttgtctctgtaaagtgttaatggtggtgattttcggaagttagggttttctcggatctgaagagatcaaatcaagattcgaaatttagcattgttgtttgaaatg

SEQ ID NO: 29570 - DNA, 3003 bp, Unknown
  misc_feature (1)..( 3003): 2750-1469P.txt file - cDNA_ID_3019222; gDNA_ID_2684228; Annot_ID_192142
taggatcagctttagaccatcaagaacatgctttcccacgtacctgtccaagggacgctgcagcaacaggctcaggagaaatctcagagaaaagctcatctataggaagaccaagttcatcctcaatcatattgaaagcaacttcggttgaaaacggagttatttgatcttgtagcagggagagttcatccaagtatataggaggtatcaaatcctagtttcgtgaataaagctagttcagaaaccataatcttcatagcaataacaatcacaaagctccagaaaataagaatcaaacatgttaagaaagacgcttacaggacgagatgaaacagcttgagcgattttgacgtacgcctaaaaacaaggtcaagacatgataagaacactagcattgagcaaattgatggactgatgatgaaatctcaaagaacacgtgagagataaccataccggacctagctccacaagcaatttcctaagctccgctgctcgtacctaatgataccaattcgtgaaatcgaaaacgaagcatgagaacacaaaatcatcattatcattgaagagcaaatcacgaaattggaaaaaagaccttgaacatttgatcagagcgttccaaagcctcatcagctaagcgaagcccaaaccaataactaaacgtagttccgatctgagctaatctacgaagcagaatcagaggtttcttcttatacatcccatcaatcctgggaaaattgtactccgacaaagaatcagcctcatcggcactgagactgaacaaataaccggatttactagtgaaactatctacatctctagacgcagcggagacaacaacggcggagtttcctcttcgcgacggccaagatggttgtggattaatcagcagattgggattggcgggaaaagaaacgattggcatagaagaaggaagccgaagcatctctttcaaaatctacagagttatcttctttttcttttcttcttcgccaatggttgttggtgagattttgaatatcatgcagtggattcttctaagaaatggcaaataatatggttctctactgttttatctcttttttgccggtcacattctttatactttctctctctctcgacatttgctgggattttctgtgtcacacaaatggcaccaatctttttgtacgttttttaagtatttatatgtcatataaatgtactttatttagctactaatcatattttttggttagtgactaaaactgtatcattccaaactattcataataattacgtttaaaacttaagaaaaacatatgaaaaagtttgtagattgtctgtttatttatctgtccttggatgcttcctttgaagaaaaagaaatttagtgtatatataaaagagataaagaatatatcacatccacatatttggtaattgatatataactctgtagatcttattccttttagataccaatgactcttctttttatgtaaaccatcaaaatctgaaacaagctgaataatgaaatacacatatcttaaaatatatttttactagtagtagtaattagtaaatatcataatatcagtttgtggagtattttagaaagaattcgaacataatatattttcgattttttcctaaatgtaaactttcgaattttctctagtatgttcttaatgaaaaaatgtaaacttaccaaatgttgctgatatatttacaaaaatgtaaagttagtgtcgacgatacatgtatataaatataatcagtacacgaaaaaaaaggttaagaaagattagagattggtggtgtggtgaacaagaagatggacatgtatcatttgacagaatacatcggcgtggtatcgggcgtccttatggtagctcttgcttcgtgcttgtatggccattacctacgtcgcatggtatgtccatgttgtgaacctagactacctagtgactctaatgcctaactattatcattttgctactgattatatttatataaatgtattgtcgaaaattgtgcgtccgtttatcctctacgctaaacggactctagatgaataattatttgtttcaaaatattgtaactctattctattgatatttatgagattttacaaatttcttttcaaatagtttgtacttggaagctgtcattttcttaggctttgtttttctttttcgtcgagttcaatattccatccatctcatcgatttatttcttatatattacatgtactacgttatgtgcaaaactttgatgatatcacaactaatatatcacatccaagttttgcaaagcatgtcgtcaaattataaacttatcaaaacatatgcaaccccattaatatcaaacgtatgtaacatcgctagataaccaatcagacccctacgactaatattttcgaattcgatacgttatggtaagatttaaaatcgatgatattttagtgacatttcaaatgattaaacatataacaaaaaataaaaaataacacgaacccgagcatggggttaagatttgcgttttgctcaacgaattagcgttagcgtttgcaaaaaaaaaaaaaaaaaaaataggtttgcatcaacagctggcaaaaaagaaaaagaaaaatcaaaaccggcgagacggaaaatttcagcgtttccgaactttccattagagtcgcgagacgatagatgagactcgttccagaaatttaatcgttgcttctcttcccagctgatctgcgtccaacatcactgtttccaggatcttcagaatcagcgaaggaagaagataagaggacgacgaagtaattgaagttggagaatcgcacatttggctctcgatatttgctcaatgacttcttattcggttgcgtccatttttcctctacgtttctgtttccagatctcttgattctcctctgcgttatcgtaattgtgctggaattttgaataactttgcagaggtagccttcaatttaggatcggagttcgtaaataaggtgatttagcgaagatg

SEQ ID NO: 29571 - DNA, 3000 bp, Unknown; identical to SEQ ID NO: 14833
  misc_feature (1)..( 3000): 2750-1469P.txt file - cDNA_ID_3019226; gDNA_ID_2684228; Annot_ID_192141

SEQ ID NO: 29572 - DNA, 3003 bp, Unknown
  misc_feature (1)..( 3003): 2750-1469P.txt file - cDNA_ID_3019234; gDNA_ID_2684228; Annot_ID_192139
ttatatgatatataaccatccaaatacaacaatcattaaaacaaataaagaaaactgaacacaattttgacgaagaagtagaagggatcatgcgttctaaacggaagccgcaaccgaatgaatctgttaagtctgctcttcatatactcgcaaaaaactacgactaacgtcttatagatgagatctagtgccacatagatatttatgttttttcttaacatcttattactctactttttttttttttttttccgtctacttctccttcttaattattttgttgttatcgtcatgtctgttttttttgttaaaagaggctttattggttcataatttacacgaaattttgatgactttaataatatcatagaaagtaaataaatgaaagattataaactattgctagagagttttttataatcttgttgatttgtttttcacaatctcgtaaaaaaatttaaacaatctctcgattttgatgatactttcatgattttattttgtgaagaaaaatgtaaaaaatcataaaccattaacagaataatttaattcattaacaatcatagattattttgttttaattgaataacgcaaaatatttaataattttataaaaatataaatcaaataacttcagatttatgaagattttatattactttttacaaattctaaactaataacatctacaatagtttagaatctttcatttattcactttcaataatattattaaaatcatcaaaattcttagtaaattaggaattccagatagtgtcaagcaggatgttatcagcaacgtcaacgcagccgcgataaactcaattttatacattaaatcaatatcaacatatttccatagaattgtttaaaacatgagacagatttttggtatgccacaaggctaatctatagaattcatggacaatattttgtggatgagacaattttgatctttaaaaaattccatcatcaataaatacaacagttgaaatctattgaacagagattgctaagtactcgtgattaatagagtaaaatgtcagactctagtcgactaaatattttctaccaccaaaaagtaagttcgatatgggtgatgttgtcattcattttagatatttctgaaacactatctgacatatgtacgaaactgagcatgtcatgcgttacaagactaaattttcatattatcagggaggaatgtagagattaaatatggacaggcttgttgccaaactattgggttttagaaaataagtatcagtttccatcaaaatggcaaaaaccaaatcgcattacacatggaaatgcataaaactataaacttcaacaaaatgcaaatgaagaaaatgattgctctctcttagttctgaaagcaagcaatttggcgcctcaaggcgtatcaaagacgaagagtcttgccaaggaagggaacttgttgggttaaggcaagagaacctctatatatatggtcgatgaaagactacaaatttcgaccacattttaagcgagacgagtgttagggtctgcgaaactaccagccatacttcttgaagaagtccctggttctctttctagctcgagtgaaaactataactatgcatgcgagcacccatggaggaaaggtcccaatggagatgttgttcttgatccaagctggagggtctttcaatagaaatgttattaagagcgtaacaatcacaactccgagaatgattctggtgatgggtttgagcagggaatcctgaaaacaaaaggtgttcaaattaatagtgttatcagatgaatcacccaattaaagctgcatgttttaatgctttttttttctgttcttgcaacaatattatccaaagactttttacgccccaacgaagtcagaataccatgacatccattctagtttctacatgcgtattctaaatctatgagccataggagtgattccaagaaattgtttactttaagtaagaatacaagctttgacctaaacctaaggttccatgagacaccgaatccacgttaattgatattccagggcaattgaagagtaaagaagcctagaaagtctagagacatgtatgaggtttatgagcacaatcaaaagaaaaccatcaacttatctaaatgcagaacgccaatgtagagtaattctacaatccaagggtatgaagaacatgtaaaggagacaagaagcagattgggtcctatcctattccttaatcatgcgttcagagaaggtccaacagatgcaatgcaacaatattcaccgtgagtttattcattcaagcatcagtagggaactataactaagctaaggagatcgttctctgtccttttttcctattgcgtaagtgaaaactcaaaatcaaaacaatcagattacctgaggttcaccgtcgatgtaaatgacggcaccatccctataaggcaacacagaccgaccattcctagggtgaaatctgatcggaacagcacgacctttctcaacgttgaaagcgaagattgctttcaagccatatttctcaagaatagatcgaacctcgagctgatcctgctcataaccgccgagatttgacttgaacacatcgatcggaccttttccacacttatacagatgaatctccacctcaggaaccttcgccgccgcggtcgtcgatctcaattcactttccggttgagaattttcgagcaacggagtagtctcttcaatctcttgatgtggtggtggtggatctctctccttctccttctccgtcatcgatgacatgactaacaattcaccgtccgatggaaaaaaagatttataatcccaggaaagcaaaaaataaatattctgttcataacgacgtcgcttagtaaaaggcctcgtaatgtttgggccttatgatgggcctaaagggtataatagacaataagagattggttattcggttgttaccttttagttcgtcttctcagaggagaagtgttttttttctccggcgaggttggaaaaaaatg

SEQ ID NO: 29573 - DNA, 3 bp, Unknown
  misc_feature (1)..( 3): 2750-1469P.txt file - cDNA_ID_3019256; gDNA_ID_2214475; Annot_ID_133108
gaa

SEQ ID NO: 29574 - DNA, 3000 bp, Unknown; identical to SEQ ID NO: 14838
  misc_feature (1)..( 3000): 2750-1469P.txt file - cDNA_ID_3019256; gDNA_ID_2684228; Annot_ID_192130

SEQ ID NO: 29575 - DNA, 3003 bp, Unknown
  misc_feature (1)..( 3003): 2750-1469P.txt file - cDNA_ID_3019267; gDNA_ID_2684228; Annot_ID_192127
atctctttggtaagaaaaaaagaagcctttttctattgacaatagtaattggtacgttgaacacagggtcacaggaacgaccgaacgagaccagacgcaaagcttccacttggatattttttttcctttttgaaaagcaaagaaatatactctcctttaatcacaataaatatatagaaggaaaagacttcagtattcctttgccttttaacataagaaaaatatatatacttaaaagatagaaataagacacacaaggactgaaggaccaaaattgcctataaaagcaaagtccatctattccacaagaacaagaaaaggcagagaagagagaggctctgataaaaaaaaaaacaaaaaaaaatgacaaaggcttattcaacacgtgtcctcacgtttctgatattgatctcgctaatggcggtgacactgaacctttttcccacggtagaggcaaagaagcggagtagagatgctcctatagtgaaaggtctctcatggaacttttaccagaaagcatgtccgaaagtcgaaaacatcatcagaaaagagctcaagaaagtcttcaagcgagatattggtttagccgctgccatccttcgtatacatttccatgattgcttcgttcaggttcgatctttttcttccttttgttttgtttcttgtattaaaacctaagaaaacttaatttgattcttaaagcctagtctaaacagttctacgcatgtaaattacatattatttcattaataaaaatatcattttttaatataagaaaccatatccagttatccactcatcactcgttatacccacacacaaaaaagattctctaggcatgtccgaaatgaaaatgaaatattcataaatatcaataaacttgtgagttttcttattaaaatccgaccaaaataaccttaaaggaaaacacaaagtcgcctcaaaagtctcatgaacaagatttaagggttgtccgattcttacttcacttttgtttttttttcaaaacaaagggtttcttagtgtaaacataactaaatgacatgtattattggaatagtattgtttattacaaaattactacacttaatatacatgcaagctataaaataaaattaaaaaaatacatgcaataggacatgtcgcattaatactatacaccggctttccgtatgttagttggatctcagttatggaacgtaaacatatcttaaataattcaatatccaaccaataataaaaataatacatatccggatatgatagcatatgtgaattatttatatcaacatttaatgcatccaattttctgaataaaatatttgatatttctcaagccaaatactaaacctaattttgtttgcagcaatactttaattatgattatcagattcttagaacttgtaagttgcaacacctttatatacttaaaagtaaatattatcaataatgatgaattgtggcataatttgattagatatacaatttcggaagaaacttcaaaatgtatttttcatttttaatctttttgttatgagaaatatcttcttttttttttgtatgttatgagaaattttataaactaaaataaacagggatgtgaagcatcagtgctgctagctggatcagccagtggaccaggagaacaatcatcaatcccaaatctgacactacgacaacaagcctttgtcgtcattaataaccttcgtgccctcgtccaaaagaagtgcggtcaagtcgtctcttgctcagatatcctcgctctcgccgctcgcgattccgtcgtcctagtaaccacatctatcactttttcgtctataactcaatcacatttagtttcaactaaccttggattatgacttgcggttacatgcaataatacaaaccattagtctacaagtcacactaattctctaacatgataattatttttgtgtgtcaatgtagtcaggagggccagactatgctgtcccacttggccgacgtgactctctagcgttcgcgagccaggaaacgacgttaaataacttaccaccaccgttcttcaacgcgagtcagctcatcgccgacttcgccaacagaaacctcaacatcaccgacttagtagcactttccggtggtcacaccatcggaatcgcgcattgtccgtctttcacagaccgactctacccgaaccaagacccaaccatgaaccagttcttcgccaacagcctcaaacgcacttgtcccaccgcaaactcgagcaacacgcaagtgaatgacataaggagtcctgacgtgttcgacaacaagtactacgttgatctcatgaaccgacaagggctattcacttctgaccaggatctcttcgtggataagaggacacgtggcattgtggaaagctttgcgatcgaccagcagctgttttttgattattttactgtggcgatgatcaagatgggtcagatgagtgtcttaactggaacacaaggagagattcgttccaattgttcagccagaaacacccaaagtttcatgtccgttttggaagaaggcatagaggaagctatttccatgatctaaataaccataaatctcgacctttcctttgtcaactctgtttttatttagttcatgcacttgtggttgggttgtcgaatgcgtaaaactatctgataaataagaacgtcgcttcatcttaattaacttcatccaataccatgcactccttcattatttatgtgccaatcgagttactaaaatttaacgggctaaaagagaatttaaattaggcccactagttacaataactcacgaggctatgacccaatatttgtaactgtctaaagcccaagttttggtcaacgatctctgactctctaatgtcccttcttccttccctccccattgtacctttcacctatcccaacaatggtggaaatcagaaatcccggtattgctttaacgaatcaatcagcaaggaagtgagaacgagaaggagagatctgtgtttcattagagatg

SEQ ID NO: 29576 - DNA, 3000 bp, Unknown
  misc_feature (1)..( 3000): 2750-1469P.txt file - cDNA_ID_3019267; gDNA_ID_2214475; Annot_ID_183067
tctttggtaagaaaaaaagaagcctttttctattgacaatagtaattggtacgttgaacacagggtcacaggaacgaccgaacgagaccagacgcaaagcttccacttggatattttttttcctttttgaaaagcaaagaaatatactctcctttaatcacaataaatatatagaaggaaaagacttcagtattcctttgccttttaacataagaaaaatatatatacttaaaagatagaaataagacacacaaggactgaaggaccaaaattgcctataaaagcaaagtccatctattccacaagaacaagaaaaggcagagaagagagaggctctgataaaaaaaaaaacaaaaaaaaatgacaaaggcttattcaacacgtgtcctcacgtttctgatattgatctcgctaatggcggtgacactgaacctttttcccacggtagaggcaaagaagcggagtagagatgctcctatagtgaaaggtctctcatggaacttttaccagaaagcatgtccgaaagtcgaaaacatcatcagaaaagagctcaagaaagtcttcaagcgagatattggtttagccgctgccatccttcgtatacatttccatgattgcttcgttcaggttcgatctttttcttccttttgttttgtttcttgtattaaaacctaagaaaacttaatttgattcttaaagcctagtctaaacagttctacgcatgtaaattacatattatttcattaataaaaatatcattttttaatataagaaaccatatccagttatccactcatcactcgttatacccacacacaaaaaagattctctaggcatgtccgaaatgaaaatgaaatattcataaatatcaataaacttgtgagttttcttattaaaatccgaccaaaataaccttaaaggaaaacacaaagtcgcctcaaaagtctcatgaacaagatttaagggttgtccgattcttacttcacttttgtttttttttcaaaacaaagggtttcttagtgtaaacataactaaatgacatgtattattggaatagtattgtttattacaaaattactacacttaatatacatgcaagctataaaataaaattaaaaaaatacatgcaataggacatgtcgcattaatactatacaccggctttccgtatgttagttggatctcagttatggaacgtaaacatatcttaaataattcaatatccaaccaataataaaaataatacatatccggatatgatagcatatgtgaattatttatatcaacatttaatgcatccaattttctgaataaaatatttgatatttctcaagccaaatactaaacctaattttgtttgcagcaatactttaattatgattatcagattcttagaacttgtaagttgcaacacctttatatacttaaaagtaaatattatcaataatgatgaattgtggcataatttgattagatatacaatttcggaagaaacttcaaaatgtatttttcatttttaatctttttgttatgagaaatatcttcttttttttttgtatgttatgagaaattttataaactaaaataaacagggatgtgaagcatcagtgctgctagctggatcagccagtggaccaggagaacaatcatcaatcccaaatctgacactacgacaacaagcctttgtcgtcattaataaccttcgtgccctcgtccaaaagaagtgcggtcaagtcgtctcttgctcagatatcctcgctctcgccgctcgcgattccgtcgtcctagtaaccacatctatcactttttcgtctataactcaatcacatttagtttcaactaaccttggattatgacttgcggttacatgcaataatacaaaccattagtctacaagtcacactaattctctaacatgataattatttttgtgtgtcaatgtagtcaggagggccagactatgctgtcccacttggccgacgtgactctctagcgttcgcgagccaggaaacgacgttaaataacttaccaccaccgttcttcaacgcgagtcagctcatcgccgacttcgccaacagaaacctcaacatcaccgacttagtagcactttccggtggtcacaccatcggaatcgcgcattgtccgtctttcacagaccgactctacccgaaccaagacccaaccatgaaccagttcttcgccaacagcctcaaacgcacttgtcccaccgcaaactcgagcaacacgcaagtgaatgacataaggagtcctgacgtgttcgacaacaagtactacgttgatctcatgaaccgacaagggctattcacttctgaccaggatctcttcgtggataagaggacacgtggcattgtggaaagctttgcgatcgaccagcagctgttttttgattattttactgtggcgatgatcaagatgggtcagatgagtgtcttaactggaacacaaggagagattcgttccaattgttcagccagaaacacccaaagtttcatgtccgttttggaagaaggcatagaggaagctatttccatgatctaaataaccataaatctcgacctttcctttgtcaactctgtttttatttagttcatgcacttgtggttgggttgtcgaatgcgtaaaactatctgataaataagaacgtcgcttcatcttaattaacttcatccaataccatgcactccttcattatttatgtgccaatcgagttactaaaatttaacgggctaaaagagaatttaaattaggcccactagttacaataactcacgaggctatgacccaatatttgtaactgtctaaagcccaagttttggtcaacgatctctgactctctaatgtcccttcttccttccctccccattgtacctttcacctatcccaacaatggtggaaatcagaaatcccggtattgctttaacgaatcaatcagcaaggaagtgagaacgagaaggagagatctgtgtttcattagagatg

SEQ ID NO: 29577 - DNA, 3003 bp, Unknown
  misc_feature (1)..( 3003): 2750-1469P.txt file - cDNA_ID_3019302; gDNA_ID_2684229; Annot_ID_192164
ttgtatgtctgtcaaaatctgacctttttttttacttcaattatttggtcattgtgaaggcaagccaatcaagagagcttatgatggattgttgcttgatgctggaggaactcttttgcaattgtcgaaacctgttcatgaaacctacgcttccttgggccaaaaatatggtcactttcttacactctttgtctttgatctgttccaaaaccaatttcagatgttctcatgttggcatttgtttctagttcaggtctcaagacaactccagctgagatcaaggaaggtttcaagagagttttttctgccccttggcctgagaagttacgttaccaggtccctaaatgcatgtgtgaatctctctttgtaatagattctatctttgctcgttactgtaagcaaacgtattaaaagagaacattctttcattgttagggagatggaagaccattctggaagcttgttgtttcggaagctactggttgttctgataatgactacttcgaagacgtctaccaagtgagtatcgagtgaaagactctttctttgaggcttttgactagtctttcggttccattaacaatccatcacattgttttatctcttaagtattatgcgaatggcgaggcatggcatctcccagaaggagcttatgagacaatgtcactactgaaagatgctggaggttattattactctctccttgttaacttagataactttttgtattctttatggcggatttgtaaaattggtgttagatgattgcagttaagatggctgttgtgtctaatttcgataccaggctaagaaagctattgaaggatcttaatgtcatagatatgtaagctttgtcatgttttgttatataaaccagaagtctgagtaccaaagttaacaccatgaatggtaatcgtttataatgcttgcatctcttgcaggttcgatgctgtgattgtatccgcagaagtcggatacgagaagcctgatgaacgaatcttcaaatctgcgttaggtattggcatattgcattctaaactgaagtgttgtttcgtttaaattataagaaaggtttcagagttaacattttgtgtcaagcggagaacaaattaacgttaacattttgtgtcaagcgcagaacaaatcagcgtagatgtaaacagagcagtgcatgtcggagatgatgaaggagctgataaaggcggagcaaacgccatcggtattgcttgttggtgcgccaaatatacttttcatcttgttttttccgaggtttttaaattctcatccatcataacacatagtgctttttgtttatctgttttctttgaaaatttaggttgtggggagaagatgtgcagacattttcggacatacaaaagcggatcttggtttcagaactctaagcttcaaagattttgttctgcaatatttttcagaccctgtacacacttactcaatcaacactgtaatctgtctctttaaaaatttaattaataatgaaaaagctgcaaacttggacaacaagaatctaaaatttaaatcaaatagatggatccacgagaagcaaacaaaaagaagaaaatggtgaaagttacaatatagagattaaactctcgaaataacaaaaaacactatctccgcaacgataggtgcctatggaaactgaatcaacagatttggttttgatatcatatatcatcagctgtctactatttgatctaggacaacacaaaagcttattcttctccaaaatggctactggtaatgattgcgtaacactacgattcactatcgaatatatttgttcccaggtcttgttctctgaattgaacgaccatattatcatttgttggagaggtttactaaccgataagcacaaacggttattcaggctgcgtgtgataatgtttctatgatctgcttccgcaaaaggagctttagagataacttgaaaagtttcggtgtggagatctaacgctaaaactttaatttctttcttcccggttaaccaataaagcgatccatctacatacagagcatgcccccgagacgaggaagtattaatccgataaggagaagaaggattgatatacctccaagtgttggtgctaaaatcaaaaacttcacatgtagtagcgttttctaggccaagttcggaagagttatacataaccaaaccggtttgtatatgccactgattttgtctttgccaaatccaaatttaacgtgactaaaataacttggctgctcaagacagatttgttgcaacctggaaacagggaaacgtcgatgccatcgagtggcgggattataaacaatgttgtttaaggtttggtaatcaaagaggcaaacaagaccgtcacaactattgtggaaaagttggtaaatatgatatcgttctgatgatatcaacaacacgttagttttaagtggaggagaatcagcagtaacatgatggggcaacaccaacgtactgggtacttcagacaccaatacaagatttagatctttcccgccagctgagcagatcaactgtttcgcctggaaatattgagattcgattgtcaacttccattgtttgcaagcagacttgaatctgagcagagatttcaccggaactctctcaagaatatcctcaacggtgtcgtggggaagcaattgcattatttctctgtctattgagaggattttgttctgagtgatggataacatgaaagatatgcttatttgtatcaattcaatccaatgttgattttttccttgaggaggaagataaaaaaaaaaaaacgtatatacaatcgatgggccctaaccctatccctaacaaatctctttaatatgtaatgcgctttaatagttaaagcccattagttaaaaacccagagctatattgttgacctagcaaatttcggatctataaattgaagccattttctaggtcattagttttttcgtcgagcagccgcgctttttggccgaggaaggataaagagagacgccatg

SEQ ID NO: 29578 - DNA, 3000 bp, Unknown
  misc_feature (1)..( 3000): 2750-1469P.txt file - cDNA_ID_3019333; gDNA_ID_2684229; Annot_ID_192187
tatttgtattgctatatatccacacattcaaacttaagttgggctgaaattaaaataccttcatgataactcttagtacgtaagacatatacatatattttctttaacaaaaaaaaagaaatatacatatattttgcagagaataaaattcactccctcgtatcaaatatagatattgatacaaagcttacaaaacgaactttatttgtaaatcaaatggtgcttgtcgacgttgtcgtctttgagcctattgattagttgtccgcgagattcagtaaacatttgaattaatatatgcatttttttgggagatgggtaaaacaatagtcaaacagaaatcaagatataatcataacataatgatattttagatatttgttctatatcgttttcatctgaaagatcctgatgagaatttaagaaaatggaatggaattgaaaaaataaaaggattcaaaggtgtaaatgtaaatggaacttaatttttttaattatttactgaaacaaactaagaagcttacctaaataggaaagcaacgaacaagttaagaagcacttgtggctagtggttacggtatggacaatgttacatcacattatccttacgaaagattctttctgactattttataaaagtcaaaagtcaattttcaaaattccgcgtaagcgtaacggttttaattattaagttatggtttggtcaacgtaggccagcttcaacaaaatctaaaccaaattcggatactttattatttcagttttttcgttaatgcaaatgtcaagtaattgcaagagttgaaaatagaaagcgaaataatcaaataccccgaacaaacactcttttgttgaaaacgaatatctataatgtacaaattaagattgttcaatccaataaaagatttagttctttatcaaaataaatttttatgagagttcaataatcatcgcagaaacttattatataatttcagattgctaaatccaatatgagaatgtaatcgtttctaaaaatagttaactcttatccaataataattattatgtagacaaagatattaggtgccatattaaaggagaaaaggcaactattggaaaaggtcgtcgggtggtgtctacgcgctatcgcagaaaaaagtgaccatgattggttacttatttcgctcctatatatataagacgtatttcgtcccatttcgaaaactcacatcaagtttcttcaattcattaaatcacttctcaattagctcttacgaaattcttttcattactaaaaaaatttacaaacaaaagtctcttgtaataagctaaatggcgatcttcaagattcttgtattgttgttgagtttgtgttgtttcagtcaagcacaactttctcctactttctacgaccaaacttgtcaaaacgctctctccaccatccgatcttcaatccgaaccgcaatcagccgtgaacgtagaatggctgcttctctcatccgtctccatttccacgactgcttcgttaatgtatgtacttaaaacatttgattcaacatgtgtgtgtgtgtccatacatatatgtgttttatggactgctctaaactttatatatttttttttttttttttttaatttgtagggttgtgatgcatcggtcatgctcgtggcaactcccaccatggagagtgagagagattcattggcaaattttcaatcggcaagaggatttgaagttatcgatcaagccaaatcagctgtagagagtgtttgtcccggcgttgtttcttgcgctgatattattgccgttgctgctagagatgcttctgaatatgttagtctctatatccatctttatatacatatatcttgattattaatccaaacatgtacatatttatatattcaactactactttaaactttttcaagtaatataatatttacttctctgacgtaaaatgtcatgtaaatgttataagtttacggttgcaaatttgattaatcatagttctaattaattcttgaatatgtaaattttggtatcatcaataggtcggaggtccaagatatgatgtgaaggttggtcgaagagattccaccaacgcgtttagggctatcgcagacagggatctccccaacttcagggctagcctcaacgatctctctgaactcttccttcgaaaaggactcaacacaagagacctcgtcgctctctcaggtcagtcaccccgtaaaacacacttttggtcactaatttcttgccatttaaaacctttcttgtgacacaagttaaccctatttacaggagctcacacattagggcaagctcaatgcctcacgttcaaaggtaggctttacgataactcgagtgacattgacgcgggattctccagtacccgtaagcgtcgttgtccggtcaacggtggagatacgactctagcacctttagatcaagtgacaccaaactcgttcgacaataactattacagaaacttgatgcagaagaaaggacttttagaaagcgatcaagttttgttcggaaccggagcttctacagatagtatagtgacggagtacagcagaaatccatcacgatttgcgtctgatttctcagctgcaatgatcaaaatgggagatattcagacactcactggttcagatggacaaatccgaagaatctgcagtgccgttaattaaaagagttattacctacttgtcttcaacgagaaaagttcgaaccttgaaaattcatgttattatatttacgtgtataccccatttgattcatttttgtaattgtgtgtaactaaaattcctgcagcgataattcgtttgttatttgaatatatggaataataaatattttggaatatataaggtaccaaggaaagtgttaataattaaatccatagcattttttattagtttcgtcattgttaaattagtcacaatctctctaaagttcattaaaaagtccagctagcattaatttatccacgtatacatacacgtggaactatg

SEQ ID NO: 29579 - DNA, 3000 bp, Unknown; identical to SEQ ID NO: 29578
  misc_feature (1)..( 3000): 2750-1469P.txt file - cDNA_ID_3019333; gDNA_ID_1972118; Annot_ID_178843

SEQ ID NO: 29580 - DNA, 3003 bp, Unknown
  misc_feature (1)..( 3003): 2750-1469P.txt file - cDNA_ID_3019345; gDNA_ID_2684229; Annot_ID_192182
ttaaaagagttttgcttttgcttttttttcctctttatgatcgtgttaatatatagtacacacaaatatgtgtatttacatgcatatgaacaaagctcttgggtccttatagttttgtgttcttttaatcatgcattataataattcatacatgcaaaaacaaactaacggtgaatatgcacatgcccactattttgtatgttttcgaagttttctttctggctctcaaattgattcattagtcttgtaagcaaacgttgtctccatgttattttggataatataacatgtagtcatgtagagaatacccaaggaggaatcaaagtcaagcgacagattaataatatcatagatggtcctgttcttttttgtaattagaaggaaagagtatgtacatatcctatgaaaatatcatgattaactattagtgatactttattaattcaataattaatactacctttttcttaatgattaaccaattgattaatgtgcttaatgttgttgttacattaaccaatcgtcctacatttaatgggcctaatactaaataatgggccttaacgagcttatcatgttcagttataaactcaaatattttttaaaaaaatcttcttccacttgaatacgaaacacggaaacactaacgaggaagagaacgtgaagctatatatatatgtctcgagagctcactgtatctcttgccgccatagcttcacaagctctaacatttcctcaattaaaccaaatccatgctcagctcattgtattcaattctcttcctcgacaaagctactgggcttcgcgtataatcagctgctgcacgcgcctccgtgcgccgtcttactacacgcggctcattttcgattcagtgacattccctaatgtcttcgttgtcaattccatgtttaaatacttctcgaagatggatatggcgaatgatgttcttcgtctgtatgaacaaagatctcgttgtgggattatgcctgacgctttttctttccctgttgtgatcaaatcggctgggagattcgggattttgtttcaggcccttgttgagaagttgggattttttaaggacccttatgtgaggaatgtgataatggatatgtatgtgaagcatgagtcagtggagagtgcacgcaaagtgttcgatcaaatttctcagagaaagggttctgactggaatgtgatgatttctgggtattggaaatggggaaacaaggaggaagcttgtaagttgttcgatatgatgccagagaatgatgtggtttcttggacggtgatgattactggttttgcaaaggttaaggatttggaaaatgcgaggaagtattttgatcggatgccggagaagagtgttgtttcttggaacgctatgctttcaggttatgctcaaaatggttttacagaggatgctctgagattgtttaacgatatgttgagacttggagttaggccaaatgagaccacatgggtcattgttatttccgcatgttctttccgtgctgatccttccctcactcgttcactagtaaaactgattgatgagaagagagtccgtttgaattgctttgtgaagacagcattgcttgatatgcatgctaagtgcagagatattcaatctgctagaagaattttcaacgagttaggtacgcagaggaatcttgtgacttggaatgctatgatatctggatacactagaatcggggatatgagttcggctaggcagctttttgatacaatgcctaagcgaaatgttgtttcttggaattctctgatagctgggtatgctcacaacgggcaagctgcactagccattgagtttttcgaagatatgattgattatggagattccaaaccggatgaagtaacaatgattagtgttctctcggcttgtggacacatggctgatctagaattgggtgattgcattgtagattacattcgtaagaaccaaatcaagcttaatgattcaggatacaggtctttgatcttcatgtatgctaggggtggaaacctgtgggaagcaaaacgggtgtttgacgaaatgaaggaaagagatgttgtctcttataacactttattcacagcttttgcagctaacggagacggggttgaaacgctgaatttactctcaaagatgaaagacgaaggtattgagcctgaccgtgtgacttacactagtgtcttgacggcttgtaaccgtgcaggattactcaaagaaggccagagaatattcaaatcaataagaaatccactggcggatcattatgcttgtatggatttgttgcgctgagttgataagcaaatagattaatcagccaaaggtagaatgtacagtccctaagaaattgccaatggatgcacgctcctcaatgccagtcttacatcaggtgagcataatctgtatttgaattgatttaatataaagttcaaaaaaatttccttacaacctaggaaaaggatagaacccaaaattaaaactaatactaaagtcccactcttgtcaatgtaataatatggtcgtctggttagaccccactttttgcctttttttgtttctttagttgcttcttctcccatttaacattccgtgtgaataggatatccttaaagtggtttctatgtgatttcttgggtcttttctttgttatttcttacatgtgagtgcttccctaaagttcacttttgttttgtctaccattctgtgtgggttcacttatttactggtttttgcttcgaagcttcctcctgaaactcccaagcttgccactttattttgtttaagaatgtgtatataatctgaattgtgggttagggcaacgaaaccacagtagaaaaccaacatctgcagaaaggaaactatctcctgaaaagaaaaacaaacttctttgttcctgtttatattgttctctttctcaattatatcagttttgcggagtttctattatataactgtgtcttgatcactgagtttctgcctaaatttttttttctatg

SEQ ID NO: 29581 - DNA, 3003 bp, Unknown
  misc_feature (1)..( 3003): 2750-1469P.txt file - cDNA_ID_3019359; gDNA_ID_2684229; Annot_ID_192176
gctttctggaataaatccatatctactggatttgttctctgttatttcccaagtttggtctctattcagtaatttgattattgtcaatgcatattgtaatatttgcttcttccatcaacagtttgttggtcaaattttgcaactcttcaagatattgttttggtccatatagctaataacattcgagacaagataagagagctaattgatgaaagtattacgaggagattgtataattagtataaagatctaaggtattttgattttctcatttttccgtagaaaaaggaacctggatcctattaagaataataatccgaaaactgcgcattatatatgcagtcttagttacaaaacaccattcatagaaaaacattctctttcgttttctctcctctctctccatattgtttttcttgaacaacaagcaaaaacagggcaaaagctttggctgtttgttggaagggggcaaaatggttatgtaatcagcaagcttcaccaagtttgcagccaagtactcctgcatccatggtaagtttccggaccatcgttcccggtttaggtcgaattgtaaacttgtttgggagcggggttttcggtttagagctccacgcatttgcttttccggattgcacaaaataagctccgttgagaaagtaatctccttctgattgccaattccaagatttccattcaccgtatggtgtgtactctctttttgtaatctgtttggcttcttcattaggaggagcaatgaaacgattgccttgactaataattgtagggttcatgttcccaccaattgcatacatttcccaatgtgtgtagtcattgttcaccacatgtatcgttccgtatctgcaacgaggcattctctgttccaatcgcttaccgaagtggttaaacgcaaccgttatctgcattttcttgtcgatcacgtgttcgtccctcgccccaaacaacatcacctgttctctcacaaaatttaaaacaagactctaaattagaggtcttgattgtttcatatgcaacttcacatgagcgaaaacaaaggaatctttttacctcttggtggtcggtgaaatgactgttggaaatagttacagcagtggagccgtcaatagcatcgatcataccatctgcacatcttgtcattgagacatggtcgatccaaatattggttgctccaaacaaactgattccatcaccatcactttttgtcctaagccctatgtgagcctcagagtctctgatcaacccaccgttcccaggaacaatgtgcttgacataaatattgtgaatgatcacattattcacaaattgcaacgttaatccagcaccttccatgatgtaaaccctagctcctcttccatcgattgttttgtcgctcgttatcatcagttcttgttgcagttttatgatcatgcttcttgcgaatatgatccaaagcggtccgtctcgagtcactgcatgccttaacgttcctggtttagggttgataagatcgttgtcagacgcgtctttgacgacgtatatcggtccgtcttttcctccggtggttctccggccgaatccgagcacacagtcggctagtttcttccggttattagcccagttacgatcgcatcgccagcagttgtctatcgggttataagctaggcattttccgctgcttttgtgcgttttacgaccacttctcacctgagtaagctctctccttgtatcgttccttgattccgatgcatccactgctctgttaaaaaaaataaaaagtgtttaattagtacttgtttaggaagttaggttaaacatttgacctaacaaagacaaaaactcacatattgacatggtaattaaaatggttggtgacgttaagtggatgaggatcgtaagagccgatggtttgtttcaatgcatcactttgtcgttgcgtccagtagctatcaaagacagcaacattgcctcgaacctgtggggccactatagctaagaacgaagagaagaaaacgaaaacatagccgccaagattcaagaaagctgctgccattttaaatatattgcaaatgcagagaccaaagcctgtgaactttatattttcccggcaaaacctcaaacggaggttgttgtttcagataggcctgccgggattaaaagattaaagatttgaatcacctgattgctttaataaccaggaactggggagagagaaaaggagatgagaagagtcaatagaggattgagaattaacatagattagacaaccattgatttaaatctctatggtcatttctccaaaaaacccaattatagattttggatgcctttgtttaatccttcttttctggatattttcagttatttttgccttgatctaatattatttttactgagataattacccaatagcacctttaaaacttgaggtaactatttttgtatttacttaattaatcatacatactacatatgattattaaacgtagtatatatcaagtctctaggtctattgaaaataattatcatacaagtaattaaaaaaattccccatggggtcagaagctaattaatggcgggactctctgttcccccaaaagaatttgaagacatgactataaaaaaaaaagaatgaaacaattttattttggactcctgatctgtgaaagactgaaacagttcatacgcaaactgatataaaatccaaaatgttatctctaagaatatggtccgtgatcaataatacagatctaaaattcaccaacttatatgcaaattgcaaaatgcaataaataaatcttgaccatatgttacaaatctaccagatcattatgtacagagagcactgcgagtcttgatcacacatttcaccagaaaagtaaaacaatacaacaccataaatgtttcttctcctaccgatttcaagaaagacactaataattactcaaagaagctttaaatgttaaatctctttcaccggagaaagaagattcttagctgaaaataatg

SEQ ID NO: 29582 - DNA, 3000 bp, Unknown; identical to SEQ ID NO: 14850
  misc_feature (1)..( 3000): 2750-1469P.txt file - cDNA_ID_3019363; gDNA_ID_2684229; Annot_ID_192174

SEQ ID NO: 29583 - DNA, 3000 bp, Unknown; identical to SEQ ID NO: 14853
  misc_feature (1)..( 3000): 2750-1469P.txt file - cDNA_ID_3019368; gDNA_ID_2684229; Annot_ID_192171

SEQ ID NO: 29584 - DNA, 3003 bp, Unknown
  misc_feature (1)..( 3003): 2750-1469P.txt file - cDNA_ID_3019372; gDNA_ID_2684229; Annot_ID_192170
tcgagagaaaataatcaacgagctaaaataagattgatcgatttcgaccctaacgagttttacttacaaggtctcttgaagaatgccttggtatatgtaagctgcccagatcccagcgacacagaacgacaataacagaactcgccggagaccggaaccgtgagattccatcgccgcacgtcgcttattgttttatccgacggagctccggcgaaaatttgaatttcaattttacgctatttgatcagttttgcgatcaaattatgagatcggtctgaagtggaaacgaaagttattagagagagtgtaggaggcgcgagaaagacgtagattttccacgtgtaactgtgtcattggcttaataatctgacatgacacttctgattggctataggacgtggatttatttctggaatccaagtcatatgcacattcatgtctgagataggaatgggaactatgtgccgttttattgtcatgaaaacgtcacgcagtttcctagaacttgtaaacggatgttctttttacagcttgggccttaatttgattaagcaaacttgcacacagctaatcatgtcagtttgactaactgatgaattcatacaaatctaagatcacttgtggtaagaaaatgaaagaaaaaggcgtatatacacaaatggaggaaagttgccaacatgatttaattgattaaaatttagtgatgacccattgttaagattactaaaacaaaatatgatatatcttaaagtaaatgtgacaataacgtcaacatagcgagaaaagtttgaaatatcgaatttccattatattaaaacaaggtatcacatgcatgcactcatgcatagttcattatgatttgagtaattttctatacgaataatattatactatatctcaatgaaaatagaagttatatatattgggaaacggaatttatatgacatacttaatcctcatgggagaaccaattatacattttgaagagtcaaaagtcaaaactcaaaagagtgactcttaccggatacaaaatgaaaatagaagtcttggtgagataacaaattaatgtgtaacataacaatataatatcataaaagattccaaatggggcttttgtccacacgtgatatgcaatatgcaaaagaaaaaagaactctctttcgatctgccggtcaataacaatgtgaatatagattaactgattaataagtagtttcttgggtcaatgcatgggatattatatttaagaaatacaccaaaaatgtattcgacgttagccaccacgttccattaaaaattcaaatctaaatgatgattaccgtcgtctacatctatgattacaaattttttgtctactatgcgtttagttatttaccatggtttgacgattatatatataacacacataaattatgacggtttaacgttgtctcttaactcaaaacttaattttacaaaaatattatttaagagttgaatctcatactttaattattcatttggtcaactagaatgcgaaaaatccacaatacttcgtaactaatttcgggtcctttaaatcttgatcacctgttgatcaacaaaagatctacacataaagattgattcatccattgactaaacttttatttatcgaagaaagactatatatatctaatgcatgcatgccatatgcacaataatctaatagtaaatccaatacgtctcagaaagataaaatcgtccataataccaaattttattctaaggttttgatatctctcataatttggaagtgtatgtaaaagtttcttaaacataaatataacatccaaagaaaagttgtaaacacttaacatcttgattgaaggggaatctcgctaataattgtgactgaacgatagtaagtattattgtaaaatatcgatcaaaatttcaacgatatgggcgatccagacccaccactttgttgtcccttagcagacgtcaaccatgaccataattagttaaaaaaaacaccaaacaaaaaccacaacttccttttaattctttttaaattctaaatttcagactaacaaaaagtattcataagctgtttcatgtatgaatttaatatcatgaatactaataacttgagccattaactttaaccaaaaaaaaaaacttgaacaatctaatataattccctgtaacatttaaaagatggagatgggaaaacaagaattctaaagaaacattgtaaaaatgaaacagagacaaatattttcaagcaagtcttgtttcatttcatttctgtttgaaaaatgacaagtttaaagtcatgtctcatatgtgtaatattattaactttaaaatataacaaaataaatatctttgattactttttgaaatgttttttatctcaagaatttggaaattttcgttgattgatacattataaaatctgaaaattagatgtgaaacacgactttttgtccaccaccaatcctcctagaaattatcagtttatcactcgattactgaatgaatgaatgagttatctctgaaaagttgtcgtaccatttattatcccacgcggatttactgccgtgagcatgacgttaccgtatctatctcaaattactaaaattgtcctttccgatggccgtctaaaggaactaactcgagggcattttgtcattttgagaaattgttatgagtttgagtacaaaacaaaaggacacgacgactttgtattatttgcttcaaatcctctgttcttcaccttccttgttccttcttctctccttcttttttatatagattttcctttcatgttgtaatacttttattctattagcgttcatattcagctaaacagacattgcgccgccgttaagtcgaaaggatagaaagaaattaaagaaagaagaagcttgttgtctttgcttcttgaggctctcttcttgtcttgatcatctgttacgttgttccacgaaaagaacagtagctttgtctctccatatagggttattatctgaaatg

SEQ ID NO: 29585 - DNA, 3000 bp, Unknown; identical to SEQ ID NO: 14858
  misc_feature (1)..( 3000): 2750-1469P.txt file - cDNA_ID_3019376; gDNA_ID_2684229; Annot_ID_192169

SEQ ID NO: 29586 - DNA, 3003 bp, Unknown
  misc_feature (1)..( 3003): 2750-1469P.txt file - cDNA_ID_3019388; gDNA_ID_2684229; Annot_ID_192166
agaatccccaaaattttgtttgtatttattttcgagtagttgatataccttctcatgtgagttacattactttacgagccattatccgacgcgtgaaagcccaggctacatctgtattcacaactgaggaaaaagacaaaattgccaacaaaagtattaggttgaaaattgatcattacaagttgcaagttgcagcacattacaatattttcttctcattacaaaaaatatcgaaaaagattttttgtgtgtgtatttgaatagctgttataccagctaattgttttgaattatccgtcgtaaggagataacgtggtggctcctaatacctttacttcttcttttcttctcttttggcaatgccttgtcattcaagtcaacgtcgaatttcaacacgtgctcttcgtaaactcaagattacatagatttgaatgtaactaacttatcacatcttatatctagtcttctaaattttgctgtctatggataatataacataatatatggtatataaacaacacattatgataaatatcttaaatacattcactttaatgggatcgtatgaaaacattttgtgtttcttttggtcataattgcaagttgaagtattggttaatgctgaccatcaggcaaatacgaagagtaaacaatacatgattaacatctaagaattgtttgttctggtttcggccgttttagttttcggtggatatggaaaaatgtgtagaacaaaaaggttcagaactccagaattctaccacacaaaagaaattgtttcaggtttgacgcttataatttatgatttgtggaacaatgacaaagattatcatcgactaatcttagaagacacttattaagaatcacatatgaaaaaagcttactagatacaaataatataataacaataaacaaactctattaacaatagaggaaaattgggagatatcaacttggaatgtgatatttgaatcgactaatcgagtcaattaaagacaaagaaaattatgatttaagaaaaacaggtgagtttgataaaacacgttgtagtcttgttgtagatctccgaattgacgtcaactcaatatcaaaatctttcactatgaaattcaaaatccgaatcaaaacgtctaacctagctatagaatatatacattagtcaatggtcaaccttttatattttattgttataatcatatatggtgaagataattgtatttggaggaccaatattcaactatttcctgtaatttagaacatttatttttttcttaaatatatgttttttgcttatatatagtcgcaatttttagaagttccataatccatatacttgaacttctaaagctatagtcgcaagcaccttattgttgttgtttaataaaagttctaattttggtagacaagtgaaaaaacaaaattaaactatctggtgtttacatatatgaaaaatatacatttccagcagtgaattttggttttgcatgaaaaatacataaatagcaattcactgcagcaggggtcagaatatagaaacatgaaccacacacataaaaaaaaagtagattctgactagatcaatctgaattaaaaactagtaaattttgacagacggacgtggccgtggaaagaagtagaaagagacaatgagagatggagaaagagagacgtaagtattgatttggccaacggctcatatgcaaagaatattaataataataatgttctttgcgtttttttaccaattacatcaaacatttgttaggcacacgtcttttctttttctcctttttagttaagggcatctccatccatgaaaaacccacaaagtttctcaaacaaaaaaaaattaatattatattataatttgattttttgattaaaaaaatatttttattaaaaagttgaatcaataattaaaagggaattatcatgatggattgtagagaatatctcagagtttctcaagtaagaaactttctactctctctccttcatttttattatttttattttttaattgtgagaaactcttataaaaaacccccaatgaaaatggtctaactttcttttccgttgaatttctctcatgtattaacagtaacataagtatttatatcacatacacttgtcaaatttgtctctttagagattttaaaaagttatcacttagagaacttttacctgtttggactttggacggttagacagataatatctaaaattactccaatttttatatatacatgcaatactaaggtataaaaaaggttctagaatgttaaaatcgttgctgaaaaaaaacaaaatcgtctatagattgttaatttttgcttcttgtacaaacacttagtaatgattaatgatttaattttaatatgtaaagactgatttttaaaataaaaaatagcataagatgaaaatttatgtttcaaaaaatatttgtgattatgggttgtttgagactggaaaataatcaaacaacattgggcctttcatgtagaattttttattacatttagaaccgttaacgatatgggctaactcaagacattaaaggcccaacattgagttactaaacggcgcagtttttagctttttaaaattgcgtctttttcgttcactgaaaaggtagtccttctctttcccactcacatcatcaacttcatcaattcatcacctttgtctctctttcaagcttctctgtgtgtgatctccgttggtcaacaacaactacaacaggtaacttctattcttcgattccttaaatttcttctctagagcttagtgaatcaacgatttaggtctgaacatatttggcaatctgtccttgctcaaatttcgcttgaaaatttcaatcccaaatcatgtaaagctaaatcggaaagttctatgtagttcccaaagttgaatcacgaactggaagtaatttaatttattgacttaggatatgttgaaatttttaggttttttgttttgtttttagcttattgagcagagatg

SEQ ID NO: 29587 - DNA, 3000 bp, Unknown; identical to SEQ ID NO: 14842
  misc_feature (1)..( 3000): 2750-1469P.txt file - cDNA_ID_3019400; gDNA_ID_2684229; Annot_ID_192161

SEQ ID NO: 29588 - DNA, 3000 bp, Unknown
  misc_feature (1)..( 3000): 2750-1469P.txt file - cDNA_ID_3019404; gDNA_ID_2684229; Annot_ID_192160
gaaaattcttcctcggagatatggtgacggagctggaagagcttgtcgaatttttgtcatctccttcaccgcctgtaagctttttggtttcatctgtttctgagctatggggatgcattgataattttagattctagggtttttgttaccgatgagtctgattgaatgaagaaacaaacttgtaggtgaagaaagctgcggtggaaattgttagtggtttaactggttccgaggaaggtttacaatctctatcaaagtattccgagattcttcttccatcattgtctcagcttctaaatgaaagcaaggtcattgaatcaactcttaagaagcactaattgtttcctgaatttggattgagagatattgaaatgttgttttgaattcaattttgcaggaggtatcagagccagcagctcaagctcttgttaatctttctcagaagtgtgaattggcaaagaagatgattcaaatgggtttgattaaagtggccatggacatgttgtataagccagagtcttgtattaccagattacttgttatgcttctagtgaatcttactcagttggatgatggggtttcttctttgcttcaggtcgtttatcataagttaaatttgtgtaatatatagtggggattatcttttggtagtctaatggtgacgtagctaatcgtgtaaaactttatgcctttgttagattgacgatgagaagatgcatggactacatatcatgaagcttgttaggtcattttgcaggtcttctggtgaaactgctggtatgtacttcccactttagtattgtaatataatttgtccaagtttatatatatatatatctacttctagatatgatagtttggaatttccttttcatatatcacgtttttgtttcatatatctaaatctaatcctcggtaggacagtctagaattttaatgtttgcattggcaccattgaatattatgcgtagttacttactggtagtttttttagtttgcaatcaagtttcatagctactgtataaaaagaggaatgaattactgaatattgttcttatttgcgcaccagatgatcagtttgagcatgttggttcgatccttgtcaacatatcaaaaacagaagatgggaggaaattgttactggagccaaagagacgactattaaaacagatcattaggcagtttgattcaacaaatcaattgcgaaagaaaggggtacgtttaaaaggagtttggcagattactctttaatgaacatgttgcttagtctataccctttgaacaatttaacatggattatgcttatcggctttcaggttgctgggactattcgtaactgttgttttgaagccaaaaaccaactccagaatatactcttgatatcagagtttctttggcccgctctgctcctaccagttgcaggcagcaaggtttgttgattttgctttatagctgctacgttgttgcttacaaaggttttcttcttttatgagaaaatagtttctgattattgggttttactttccttagacatacagtgagcaagatgtcgcaaaaatgccacctgagcttggaagtgcactgtccattgagcgagaaccagttactgatcctgacattcgcgttcagacactcgaagctatatatttgatcatcttagaggtaaaacatttctctgtctcgctttcccttcttgtgaactcttgtgaaggaccaatcaaacccaaaacttacaaaaggtcctctgttatgtcaaaactacttttgatgttgcaggaggcaggtcgaagggcattttggtcagtcaacggcccacggattctacaattgggatacgaatatgaagaagatccgaaagcaatgagagcctatgagcaagtcggttctttggtatgttcactccctctaatctcactcactgactaactctacaggacttaagatagcatctttctcactattaaccgttatttgctgtgccgtttttaaccagcttgttgaggaagctggaggtccggaagagtcgttggagccaacaaaagcagagtcttgaagttcattatttgttgttctccgactctagtccccattattggctgccctcgcaaagtaagttacttatcctgttatgaaagagttactactacatcttgtgcactactagttgtaacactagattcgttattgacttacgcgatcttattagtgctccattttctatttttggttgtaattttattttatattagacattatagtatgttatcttcgttagacaatatatttgtgtattcttacacacattttttgctacttctctaattgttttgaatctgaatcggaaatcaagcagagaagatctaattaaactactaatgagttaatgttttttacatattttatagaaatatcaattaataaacgataaacaccacattattgccaaccccacgaggtagccaccaaatgtgtccacaattgtacagataagagaacagagaggcaaaatcaaatcaatgattttgtttttagacttttatgttttttggcatgtgtttctaatcatattttcaccattcgtatattaaatttttaatatgtagagattgtaattaattagcacacattaaaattgaaaccagttggcgccttgaccattcgtttaaagccacgtggaaaattccgaatagttgggtcccacctgaaaaatcacgttagatctcttcatcatctcctcctctgcattttcttctcctattcttctcgacgacgaaagaaaacaccgaagcaacgaggaagaagaagattataatctaatctctccttcgtgtagtttagcgaagagtgatgcgattttcttctggcggtgtttgatttcgtattctcgagttgttgtgggggagagattgattagaattagagatgatgagtttcgtgatttcagatgaatttctggggacatttgtgccgattctggtgtattgggtgtattcagggatg

SEQ ID NO: 29589 - DNA, 3000 bp, Unknown
  misc_feature (1)..( 3000): 2750-1469P.txt file - cDNA_ID_3019412; gDNA_ID_2684229; Annot_ID_192158
cagtaaatttatcttgtaatagccaaaacttcagatcttctctgttattattatctgctttataattccaggttttgagacctgtgagagtctcattgatctcctttgttacgaattgacatacgcagagtcgttgattctttcttttatgcaaagggcttctcgcttttgttgttcttatcctctccaaacatggcagcaacggggtagtttttctctatatagttagtttcatagactaaatgaagtcactgttcaattatttcaaaagtggacctttgaaaaggatacaatacttatcttcaagatctattgatactttgtgacatggttgattgggtttaatatcaaaaggttgtttcttgattagatccagctgtaagatctgaatcttgaactaaaactttaaactgtatgacaaatcaatctttttcccaaaacctaacattcctcctgagttggttacagagacatatcatcatcaatgacacaattaaggttttgtcgacgtctactttatctcattatcatcacatggtcttgacactggagatgagttctggaccagaagactctggagtggcttttaagacatgttaggtgaaaggacactatcattgtttgattgagtttcctcattaaaggctcttttaggcaactcgtacggtctttgattaaaccgttaaatctaagcctaatgaggttatctttctattcttgagacaagcacatgaaaatgaggtggaccaaatgtgttttgtgtctagtctacgtgctgcatttaattatgtctcctaagtcaacaaaaggttacaatcacatcttaatatttcacatggaattgcactcttggttatgtcttatttgcggattagacccaagtgtctattgttcacatggtgcagttccttataatctctggcaacaatagatgagttcttggcatcacatttcatcttttactcatttgtggtcagcagataagtattgattgatgatacagattgatttacacttctctatcgacattcttccttaataaaccagttaaatcaaaaactactgttttcaggtacaacaatatgaagatggtattagcaaatcaaatattttccactcaatagacattttacatgtaaaacgaaaggagctcaggtttttggcataattaagtatacaaaaaaggcgattgcgtgtgagaaacagaactactgctgatcctccttcttgtttcagtgcttgttggattagcttctacagggaatcttggaacatagctcggtgttctgttcatgcttgtgtatgaatcaccagaaactctgacagatttatgactcttgcatcccattaataaaccgctactgctagatttccgtctctgaggcgcgatttctcggtttgattttgccatgatagggattcgaggaatctgaaaagaccggttctttttgacgggactcgtagcacattcagacataacagagaaatctgctacacttgctgtcactacactccattgtatgcttacctcacttggtgcataaccatctggtgagtctggatcactacttccttgccttgcaagaaaagggtttgccttccctgttaagctctcaatctcaaaaagatccgtacttacatcgctcacactcccatcttcttcttcttcatacttcacagagaatccatgttcttcttttttcgcagagctcgagtattcccatggaaatttcttctgaatgattctcttctcaataagaggagatccaaatatttccagagacttcctctgctctagcattgcttcttgttgttgttgatgaatcttcatctccgagcttagatctccagagaaactcaattgagtcttgatcttcttcagaccagagcttcttctcttgtcgtcgacgacatccactgaactccagttcgaacacacgcatctgcagccaagagtagcgagaaaactcttcttattactcaccttgtgattgctactcatatccttctcctgaaagtaactgttgcaactagagtttttcttgatgttcttcttcttctctacatatttgctctgaagcaacaaactctggctattccaactggattcagaccgaagactaggagtttccgaggaattcttcgagctttgcttcggaccaacaaagattctctctattggaacttctggatctggcagaggagacacaagtctaggactgtggtcagaatccatatctccattgaagtacttctcagctccaaacacactgatctccaaatcttcagaagctttcttgttaattccaagaacatcattggtgataccactcattaggttcttctgggtgagagcatcttccttgcttgtcaagtaagagaaagaagtagaagaagaagagaaaggaccatagagattgttactgttattattattgttcatcatgaaatcaaaagatacgtttggagttgaagaagatgaagttaaggtcaccattttgtttctttttgtgtattactatttcttagggatgatttagatttgagtaatataaatagaagaaatgaggaagttccttgttttttttttgaagctatgtcgtgtgggttccattactgggacaagactgcctatttgccagtgattttgtgctaatgtataaacaaaatattaattatattttgtcttggttataaggaaaatgaaaaaagaaaaatagtggacatgattctcccaaggaacaaaattacaaattagaagacacgagggatgtacgtattttgtgatatactgacaaagacttgtcgtcgagttagttggtcgttaatgggctttgggcctatactgacataaatgggccttaaacaacgttattttaagtaagtaacggtttttttctacccgctcgttttagtcggatcttatcctcttcctcaatctgataatcgtgttggttcatgtgtggaagttctctaagaacaacagaaaatttcaaaatg

SEQ ID NO: 29590 - DNA, 1604 bp, Unknown
  misc_feature (1)..( 1604): 2750-1469P.txt file - cDNA_ID_3019423; gDNA_ID_2684230; Annot_ID_192211
ccaataccaaagatgtacatacctagtactgagaaaataggctttgatagggattttgcctagtgcttcctctgcctctgttccaaattcatagttttgatatgcatcattcgacccagaatcagagtcattgttgtaaatcgaaatcggagaagggaacgctgaaaagtgtcggaaattgagaaagcgagaagctaaaccaatcgttgggtgtttcgaaacacatggagaagaagaaaggtttagtctttttgaagaattgagtaattgattacgaagaagaagagcagctactgctctccatttacccattcaatgaaatcaaaattgaaattttttgtcctctgcaccagaatctctcgacttattatattagtcaatttgtattttggagagattgtcttttgatatcgaaagatatttggttacgaagaagccttggttctcgccgccggtgaccacagtcccctaatcaaatgatcgttttacttgtttcaaaacgactgtgttttttgtttaattaactaaaacgacagcggttcgtttaataaacttgtttcaaaaagtttaaaaccctcttgtagcattttcatattaagccaaaacaaaaacctaaaaccctatcttggaaaaatgttaagttagaaaagccctaatcttgtagccttggtttttgaagtttagaagaatgacgaatgtctagtccttaccaagtgttatgggattggaaaattctctagggtttcaatttttttccgagatcaatgcgatttatttgtaaaagttggaacaagtttatcaaaaagatcataattattgataaaacaccaataaccccgcatatagtcaattttgcagatttcttataaattaaactttaaaaaataattttataatccatcaaatttaaatactatttttttagaaggtccaatatatagtcaaactctactatatagggtaacgcgacttagtggaatcgaacctcgatagaaagacgaaatcaaatgaacttaaccacttgactaaaagcacatctctcaaatctaaaaactacttattcgtggtttatctataaaacttgaaatatttttgtcaaaagatcatatttttaataaaacagcaagaatgcaaatagtcatctttacggatattttgttagattgaagtttaaagaacaaatattacaatccatcaaatctgaaaactacttattagttatttgtggttgcctacagctttaccaataatgtgattttttataaagcttacattttgcttatagaaaacctttgaatgagttatagaaaacctttgaatgagttggtactattgtcgtcattcttctaatttctaaacttcaaacaccaaaagttgcaaagtagtttttttttgttgttttggtttaatattaaaatagatgatacgacatcggttaggcagttgttaaaacgctgtgtttcaagcctttaaacgacagcgtttcttaaagtgctcgatagccttttactttgtaagaagagtcgtcgtaatctcatttctcttttaactgagacgaaaaagattcacttctccggcgagcaatttcaagtttctcggtaatg

SEQ ID NO: 29591 - DNA, 3003 bp, Unknown
  misc_feature (1)..( 3003): 2750-1469P.txt file - cDNA_ID_3019433; gDNA_ID_2684230; Annot_ID_192218
  misc_feature (1945)..(1945): n is a, c, g, or t
atgtatctttttgaatattttgttcgaaagaaagcagaagcttctcgatcttaatattctgaaaagaataatattcgtataatggaattaagaaaaagtcatgactttttaacatcaaactagtgttcttttataaaataaggagaagtcatgggaggatataatttgtatattggtcataggcatatgattttaatgctcagtgtatatagaaacattttttattccaatcagggaaaattgaaaacaaatagacaaatagttgtcacatttgtctaaccggtatttaaagaaatcgcaagacaatttcagatacatgcggacaaagatgaatttcatctattttaatttttggaccatatattatctcgtggtttcggatttcatattgtttttaagcaaagttaaatattggcatatttttaacttttgtttatcagaacatcaagtgaatataatagaattttaaaagtacactaggcgttaaagtaaaacgatggattcttaaatgtaacgtttaaagcttatacaaaaaatttgttattttctaatagcatcttttaggattgtctaatagcaaaatttctaatgaacctaataactttttttgtttacattattaaatacctaattcacttttggcaagatggtataatggtttatggattatagaaatctaaatacgatatacggctagaacaagtgtgatggtttaatcgttttgggcgtgggaggtgaactacgaattgtcgtaagttacataattgcattcatcaaaatgtatggttttggatcattgagatatgaagtgaaccattatttttttttgtgaaataaatatttttttagtttatcatcaattccatgttcaaatgtttatctctttggagttttcaagaagttgttaagaaacatgttttctaatttgtggataaaatttgaacatcaatgctaaaacttagcattaactttttttaataggtaatgcaagtacaaattaaaggagaaagatatgatttgtccaattaatgaaacaacgcgttttatgtttagcaaacaaatggagacgtaaactcgatctattgtactccgtaaaagtaaatgtttttttttacagcatacataaatgtttttctaaagttaataatgaagaaaatgattattctttgatcgtgtagctttctccattctaaaattaatgtcccaaatgatcgagtctagggggtaaaattgtacttgtgatttggaatttactccactctaacttcaacacccgcacaaatatcacaaattttaactcaaacctacaataaaaggtaaaaaataataaattacaagatgattttttaaataaatatcttttatcaatatttaaaggtatgtattattaaaaaaatattaaaaggtaataaatcatatctttttgttttgtgcacaccaaatatacaaagcaactgaattatataaaacgagacaaaattatccagcttcctatttgattcgcctagaatattttgacgtttcttaggtcaaagagatggaaagatctaaccatagctatataaataattattttctcaaaagaaaataaaaaagctatacatgatgaaaattacagtctatttacatggaaaacacaatttaatgttgaaaataaattttacctaaactcaaattgtaggtacgaaacttttcagtttttttgtttgtttgtttgttttcacagcaagtgtgtgaaatagaacaaaatctaatgattactattttactcatgaatcatgatatacatctgcaaacccaatttatttaaatttttcatacgattttaatgaaaagattagaagaacaatacattgaaattaagttgcatttaaagctaaaactcatgagaaaagtcacttttaatttttaacgaagagaaaaaaaaaaaaaaaaaaaaaaaaangaataacagatgttgacaaaaatatatcgagtctctctctgttgtgagaagcgtcgtcgtgtaattttctcatttagtataattttaattaaaatatatatattttacgggatctctctcctttctctctctacaccgaactactctctctctctctctctcttcactctaatagaaagagagaaaaaaaggaaaaaaaaaaagaaaagaataaaaaaggtgtgattcttttgtttatatttgctttctccgttttaagaatcagaagtagatagagagaaaaataaagaagaagacagatgatacagagagagagagagagagatagttggcccagcggatcgacgtcgacgatgatgatgatgatgatcatttgattcttaagctaaaagctttcttcttcttctctctcccatcccatggagttcgtgatttagtctctcctcttagatttttctctctttccgctccttatttttagtattattatctcagcagaaaaacaaaaacacttttcatttctttatttttctttctcatttcgcataaatctttgtcgccgagacgatttgtgtctgagaaactgagaagaggtatatcaaaactctcattatgacatttaatcgaagctgattatgattttatatagtatctgatcaattttaatggttttaagcattttgactgaaatcaatcacagccttctcttctcttctcttctctttttactgttcatcgtacgcttcatgaatattttttttttttttttttttttttttggtttattgaattagtttttggagtaaactttgagtttttaatgaacgatcggtttcaattcagcttcttcaccttcaatggaggctccaattttctgggaattttttttgctacatctacttgtgaattttagagctaaattcagctcagatgttatagtttcattcattttattgaattgattgattgatcaaatcatataagattattatgttcgtcggtgactttctggatttgttaattgctgtttttactacttaagttgatttgaatctatg

SEQ ID NO: 29592 - DNA, 3003 bp, Unknown
  misc_feature (1)..( 3003): 2750-1469P.txt file - cDNA_ID_3019444; gDNA_ID_2684230; Annot_ID_192234
ctagcctcgctcaatacgtcaaaccactcctccatttctttgacacccttaaacccaccgagaaggtctgatcattttcatattatcacaatgttcgttttggtctaattattaatagtataaattatactttaatttaccaacgagtttaggatataaattaattaatgggtgtgtgcaggtgatattagtggggcatgattttggaggagcttgtatgtcttatgccatggagatgtacccttctaagatcgctaaggctattttcatatctgctgctatgttggctaatgcccaaagcactctcgatctctttaaccaacaggtttttttttcttcaaacattttaattctattttttttttaatacactaagcagccaaattttgacatttaattgccaatatgatgaaccagcaaaattgaaaaataagtgatagtgtttcttatgtgttagaaaccgtcgttaaaatctaatcgcaaccaattgattcgcagcctgactcaaattatgatctgatggaacaagtccatctatttctgtacgccaacggcaaaaagaaccctccaacagccgttgatttcgacagatcattgcttagagattttttctttaatcagagccctccaaaggtacacaacacattaggctaataaatagctgaaccggtacaattcggtttaactaaacccgacttgttttcgttactataggacgttgcattagcgtcggtatcgatgagaccaatcccgttcgcaccagtggtcgaaaagctccacgtgtcggagaaaaattacggttcaatccgacggttctacatcaaaaccatggaggatgattacgctgtaccggtttctctccaagatgcaatgatcaaatcaaaccctccagaacaagtttttcatctcaaaggctctgaccatgcacctttcttctctcgtcctcagtctttgaaccggatactcgttgagatttctcaattacctcccaagaaatcttcttgatcaatgttaccggttatgtaaactgaaccggacataggatcctgtaaaacataaagttagagataattgtccgatttgtttgcccttttaatttggagagatatgaaccaaaaacatatttcggaatgggtccctttttcatcgtgtgtaacagttttaccaaacagtaatactttgtgaaagttttgattaattaatgcaaaaagattagaaaaaagcgaaactaatttttggattacactagaaaaaggttaaaatcaataaccaaaaaaagaaaaaggttaaagttacaaaacacaccggtttatagagtgaaatgattattgttctgttgaattgacgtgccagcttagcatcaccttactattatcagtcacctatatatcacaattcacaggcttcttgctttctctcattggctcgtcttcttccctttcttctccaatcaccttagcttgctgatcaggtaaactagattggtgtttcgtgttgttttcttctcaacttaggtgtttgatttgagaagtttttctatgtatgttggcatgttgcgttcgtagcattgcatatcaacggataggtttgaataggtagaattaatttgattgatatatgaaagaatgtttgtatatatactctaggtctaggttattgaatattgagaaatttattttgttaggtttagatgaattattcttcgatgagtggttcaaagttcaattggcaagtcttttcaatgattgtagtattttggtgatgataagtaagttgttaatgactctcaagtctgaattcatgttttggttttgtttccttgtaaaaatgtgaacgtttttcttacagaagctttcacaaacaaagtatggttaattgagtgactaatccactaattctcttttgttgttttatatcgtttattaggtaatgttttttttttttgggtgtgtaaaatatgatactgactcaagattttatcatatttctgaatccataagctaaagtacatttgagagaagcaagagagatagaatggggcgtggagttagtgcaggtggaggacaaagttctttgggatatctttttgggagcggagaggctccaaagctagcagccgttaacaaaactccagctgaaactgagtcttctgctcatgctccacctactcaagctgctgctgcaaacgctgttgatagcatcaaacaagttcctgctggtctcaatagcaactctgcaaacaattacatgcgtgcagaaggacaaaacacaggcaatttcatcacggtatgtctttaattctttcgctgaatcgagtcctgtgtgctggttatcggatagcaaaaacatctgtatctttacttttcttagattagttgtctgaaaatgaaagaagatcaaatagactgatgggttttgctttgtgctaacaacgcaataatcgtctaaaacttatggtacagttactaaaacatcttgtttggttgttgttcgcaggaccgaccatcgaccaaggttcactcagctccaggaggtggctcgtctcttgattacctctttggtggtggtagcaactagctactgaggccaacttggtcactctatcttctttatcccacgtcacacttctatcattttgtgaaacctcttgttccctagcaaaaaataaaatctgtataatctctaaatttctacgcatatgtgcttcaattgttgtatgtctttcgaacgataacagtctctgatatcgttagtttttttttaccgatttatttcaccaatcgaatcctatacagattatgcaagaaacagtaatgtctttagaggtcatagacaaaacagagaattaaattaatattccagcttgcaaaatattttagttggcccattcctaatttttaaaaattatttgtcatcattaattttaacgacgagacgtattactctttgcctgactctctttctctctctcccggcgacgacggtttagagtcgccatagatg

SEQ ID NO: 29593 - DNA, 3000 bp, Unknown
  misc_feature (1)..( 3000): 2750-1469P.txt file - cDNA_ID_3019448; gDNA_ID_2684230; Annot_ID_192230
acatattggatgcaatgaaaaggtctaaataaacaaaatcacaatctatcttcacaacaatttcttagaaattcaaacttcacataagttgtttgaatccttttttaattaaaaggatatattttaatatgagttaactaaaataattagacacttaaaccaaattaaaagtaataaattctttacttaccaatccggtggagacacgtgagcccctatggcaataaacttataaccttcttccgccactgcctatcacaacacctattagctttgatgtgtggtggacagtggacttgtaatgatggtgagtggcctatattcattattctttttagaatcatacaagagtttttgcttaaaatgtttatcgagtcacggctattatattttttctgttactattgtattcattttattcttaaagacaaaattaaaatgactctggccctctctctcttctctctctcaaaattttcagagagagaatcaaaccaaaattttcgacgacggtaaattgatgtcgtcggtgatggttgaattgccgtccggtgtagtatccggctttcgtctgacatatattggcttccacagcagtacatggtcggcccttgtctagcatcatcggctctttcagcggtgatggctagctcacggtgttaatccggcgtagttcggttttcttttccttttggtttatatcacggttacgtttcgaccgttgattgtctttagatcagaattcattgggtatgtgtgttggtgatggcgttggttttcagtccaagcttgcttaattagatctaattccaacctatcctttgagtttaaggtttacggataataattaggcagtttgcgtttttgagatgaagattcaaagctctttcctcagcttattatgattgcctttagctgtatctcttatattcaagcttcgattgggtctaagtaacagaggtggttaatcgaagatcttttttctcttttgagattaatagatccgtattagatccttacttctgttttgtagttgttggaaaaattcagatgaagctaatcttcgagtttcattcgacttagtttcagtttccggcagaatcgatggcttcacggcgaaggatgatagatggaaaactttcgtctcctcaggttacatgtgtattcgatgctaacacgtgtctgagatatattagcttgatccaatcttcttctctaaatgtaatgttgggccagttggacttaaaatagtctctgtaaaccgttttatgttgttgggcttttgctcgttcgttgtatgttatgttcatcttaataaaatcgtcacttgtgaaaaaaataaaatgactctggcctttctagtttctacaattagactctctctactcaataatttataatctggttcaaaaggatcctctgagtgtaaaagcatgattcacgttctaacatgtagatgatttgggaataatacaacaagtgtggatcggaggatgttattagacacgcaagaggatccacacacccactaggacacgtgtttacaagtccgagctctgacatgcttcacgttcccgcgacagttcgttgtcaccgtgtaagaggaggtctctcagatctctgagctggccggggaggaccacgtaccttacccgttagccaattggtaacacttacgattataaaataaattactttgttatgataaaaataatattggttcatgcgatgaagatatatcacgttcgattaaggttacagaggaaattgaattttcaagaattgattctttttttgtttgtcaatatataatttggatatctagatttgccatggaatataaaatcattaatttgagtttggaggaggacgtcgacagaaaaaaaactaactattaataattttgagttcctccattttgagttgtcaagtaaatatgaagtcttattttataacaatcagttgaaactattactaattgaatacttggtcgattatcaatgattttaatttaatttctctcaaaatagacacattatttctattttgaaaagaatagaaccaatcatgaataacaacacactatagaacaagttataaaaatgataaatacgtattggaatgtttacgcattgtaggacctgagacaaagaaccataagcccattcctctgaacttaaaccgaaacagagcaacacgtgtctcctccgacacatgtcaccttctccgtttttaacgctgatgctaacacgtaacttgccagcgaatattataacaatttatttcataataagaaaaaactgaattctgtttttttaaatactagtagtaggagcaaagaaagaagcaataatagtggcaaaaagtaaggagacaaagaaattaaaataaaaaaatacaaagccgtacaaaaaacgtgtcgactcgagggatcatctgattgccacttggcacttttcacacattggctattctcgtcgctttcttttcttctacgtgcccaaaacccaacatttattttattcttactcaactttattttattaattttcctcaacaacataataattaattaattaatagataaacttttttatattatttttttgatataggaaagaatctaatttgattacaattccattttttggtgaatatttttaagagtaaatagaaaataataattacagggatttcgtttttaattgtacatgttaatgatgaagaactaaataaggtattgtcaagtaaatggtagtgaatattccgacttgtgctcaaatttgagttctctttctctgtctcatccatttaaacttttttttcttctgtctcccccatttgtaatcaatagtaacgaaacgtgtctcgtcaatttttgtcaatggactaaagagaaacttttttttcagttcttgtgaaaatattggattattatggatcgtggcataaaaatctgattactgtttcataagcttccagtattcttttttgttaatg

SEQ ID NO: 29594 - DNA, 3003 bp, Unknown
  misc_feature (1)..( 3003): 2750-1469P.txt file - cDNA_ID_3019448; gDNA_ID_1971826; Annot_ID_176317
taaacatattggatgcaatgaaaaggtctaaataaacaaaatcacaatctatcttcacaacaatttcttagaaattcaaacttcacataagttgtttgaatccttttttaattaaaaggatatattttaatatgagttaactaaaataattagacacttaaaccaaattaaaagtaataaattctttacttaccaatccggtggagacacgtgagcccctatggcaataaacttataaccttcttccgccactgcctatcacaacacctattagctttgatgtgtggtggacagtggacttgtaatgatggtgagtggcctatattcattattctttttagaatcatacaagagtttttgcttaaaatgtttatcgagtcacggctattatattttttctgttactattgtattcattttattcttaaagacaaaattaaaatgactctggccctctctctcttctctctctcaaaattttcagagagagaatcaaaccaaaattttcgacgacggtaaattgatgtcgtcggtgatggttgaattgccgtccggtgtagtatccggctttcgtctgacatatattggcttccacagcagtacatggtcggcccttgtctagcatcatcggctctttcagcggtgatggctagctcacggtgttaatccggcgtagttcggttttcttttccttttggtttatatcacggttacgtttcgaccgttgattgtctttagatcagaattcattgggtatgtgtgttggtgatggcgttggttttcagtccaagcttgcttaattagatctaattccaacctatcctttgagtttaaggtttacggataataattaggcagtttgcgtttttgagatgaagattcaaagctctttcctcagcttattatgattgcctttagctgtatctcttatattcaagcttcgattgggtctaagtaacagaggtggttaatcgaagatcttttttctcttttgagattaatagatccgtattagatccttacttctgttttgtagttgttggaaaaattcagatgaagctaatcttcgagtttcattcgacttagtttcagtttccggcagaatcgatggcttcacggcgaaggatgatagatggaaaactttcgtctcctcaggttacatgtgtattcgatgctaacacgtgtctgagatatattagcttgatccaatcttcttctctaaatgtaatgttgggccagttggacttaaaatagtctctgtaaaccgttttatgttgttgggcttttgctcgttcgttgtatgttatgttcatcttaataaaatcgtcacttgtgaaaaaaataaaatgactctggcctttctagtttctacaattagactctctctactcaataatttataatctggttcaaaaggatcctctgagtgtaaaagcatgattcacgttctaacatgtagatgatttgggaataatacaacaagtgtggatcggaggatgttattagacacgcaagaggatccacacacccactaggacacgtgtttacaagtccgagctctgacatgcttcacgttcccgcgacagttcgttgtcaccgtgtaagaggaggtctctcagatctctgagctggccggggaggaccacgtaccttacccgttagccaattggtaacacttacgattataaaataaattactttgttatgataaaaataatattggttcatgcgatgaagatatatcacgttcgattaaggttacagaggaaattgaattttcaagaattgattctttttttgtttgtcaatatataatttggatatctagatttgccatggaatataaaatcattaatttgagtttggaggaggacgtcgacagaaaaaaaactaactattaataattttgagttcctccattttgagttgtcaagtaaatatgaagtcttattttataacaatcagttgaaactattactaattgaatacttggtcgattatcaatgattttaatttaatttctctcaaaatagacacattatttctattttgaaaagaatagaaccaatcatgaataacaacacactatagaacaagttataaaaatgataaatacgtattggaatgtttacgcattgtaggacctgagacaaagaaccataagcccattcctctgaacttaaaccgaaacagagcaacacgtgtctcctccgacacatgtcaccttctccgtttttaacgctgatgctaacacgtaacttgccagcgaatattataacaatttatttcataataagaaaaaactgaattctgtttttttaaatactagtagtaggagcaaagaaagaagcaataatagtggcaaaaagtaaggagacaaagaaattaaaataaaaaaatacaaagccgtacaaaaaacgtgtcgactcgagggatcatctgattgccacttggcacttttcacacattggctattctcgtcgctttcttttcttctacgtgcccaaaacccaacatttattttattcttactcaactttattttattaattttcctcaacaacataataattaattaattaatagataaacttttttatattatttttttgatataggaaagaatctaatttgattacaattccattttttggtgaatatttttaagagtaaatagaaaataataattacagggatttcgtttttaattgtacatgttaatgatgaagaactaaataaggtattgtcaagtaaatggtagtgaatattccgacttgtgctcaaatttgagttctctttctctgtctcatccatttaaacttttttttcttctgtctcccccatttgtaatcaatagtaacgaaacgtgtctcgtcaatttttgtcaatggactaaagagaaacttttttttcagttcttgtgaaaatattggattattatggatcgtggcataaaaatctgattactgtttcataagcttccagtattcttttttgttaatg

SEQ ID NO: 29595 - DNA, 3003 bp, Unknown
  misc_feature (1)..( 3003): 2750-1469P.txt file - cDNA_ID_3019458; gDNA_ID_2684230; Annot_ID_192225
gtataacaatatggcgttgtaacaatggatctatatattacctcattgttgatcaatagcacaccaccggtacgtttgcaatttcttcatgtatatttcttgttatatatgtagttatatatccaggtataattttgatgtaacacaacattaatcttaatcgtggatccatcccacatttgatgcatgtatgtgcacttaagaaaaagaacatggaggaaataacgttattttttattattcttttcatcaattttacaattattttatacttttatctttataactttagggcgatatatatctatatgaactttacagattgcaagaatatccccaattcatattggagaacagaattcgcgatgcgtaatttataaaaagagattatcaattgctttggtgaaaatatcttataacgtggtcaaggcatggataatccgaacagcatcgacttatatgacatgccattgtgaatgtggtgataatctattcatgtaactaacatgttttgtacgttggtaaaaaagacgaaatttgtggtaatcatcaatcatgtttgacttttacccattttgatctagactatatattatggttttatcatcgttttttggtttggaacggaatttcgtttacgtgatgaaaacgataaccattgcggtgcctcgttgtctcccaaaaggccaaaatataaaagagacgtaaacgatcattaaatcagaagacaaaccagtctaatgatcagaattactcagtttacatattttaaaaattacaatcctatttatgctaaaaaaaaatgttttgatccgaacaaattaaatctttccaaagacattcaaagtcttgcttttcaatgaaccgttcaaagttaatgaatgtattgaagtgacgtacatatcaacttctagctacgccaagcaaatgtgtaaaaaccgttccgttttggtaaattaagttcacattttaaatcaagaaaataaatgtcgacttgtgaactaaatatatgtcaacatgctaattgtcgacattaattgttcttaatcagccaaaactccacttaaaagtatttgcaaaacgcacaattatgttcacattaaaatataaaattccggttttgaaccaagacaaccacaatcaacaacaaggtcaatgtttatttcatgtttctgttgagacaacactatgtcttatgattccgagtcattaccggagataaaaagaagaagaaggattacgaattatctctgtgactaaaaactatttagtccatggtcgttcgtataaaaactgttttacataccggtcttgaaattggttactacctatgatcaatgatttgggggtggtaaaagatcatatatgaaatatgtatgatatctggatgaatattacgaacgttacggcccaaaatattttccatgggcttgggagtaacaaaacaacccataaacaagtaacgttcgaaaatgtttgaaattgaaaaagaaataaaaatctgataagtatgtttagctgaaaagctgaggcaccgactaacaacagctcaactttcaagaatgtccacaaaaataaacagaaaaaaattagctaaaaaacaagaaaataaaaaaaagaaactgtaccattttttagtgtgcaaatgtgtgttgtgtgtggcacatcacacgtgtcgtagcatgacggcaaaggttgtcttgtgcacatggctcggttcgctcccaaatataatccccaacccatcctttttttggtgttaccgttagctcctcttacacaagatcgaaaaaacaaaagctatttttatattgaaatgtgttcttcaagaatccagtctaaaaagagtgggtgaattgaatttgtacgtgttgttttgtagatgaaaaagtataaatcaagtttgtataaaaagttgaaaaaactatattttagtttacttggtattaataataaataaaagtacattgttagttctaagttatatagttatgcattgcattctcactaaaccatatttttgggcgaaatttttggaccgttgataaaaaaaacagggtttattttgggtcccaaaaaagagtttattattttaggacaggtgtttaaaaggaagagagaactcatctgaaatacgtaaatcgaggaggtggcaaaattggtaaataaagaagcattttagtccacttttactataatctttcggtgcgccgaataagtctctcacaaacagatactagaagacaacaatgcaattgcttttagttcttttctgcaacatttgttcgtgtaaggctttttttactatctcttctatttactcaatttcttcttacacatttgttatacgtaaaaggaacatttctttgattctttttttgttgtcactaccaaaacgtactgatttgttttttgaataggtgggttcctagagtaaaaaagagaccgatatttaaacttttgtcccttgactaaaactcaaaacatttctgtttgttttttgttagttaaatatgtttaaaataaataaataatcatatagctatttatgaaagtattaatatacaaataactttcaaaagttattaattaaatttcaaacaataatcctgtgtttcaatatctacttttgcaattgttatttccataattccattaatacaaatttttagatattgatagctacctaactcacactttttaaattttagttatgtcgacaagttttttttttgttacatgatgttaattacgactaatcaggtttttaaagtaataaatcaatattaaaaagtgcctcaacaaagaaaaagtgttggaccatggtcgtctataattatttatcaaaacatagtcacacacacccttgccgttattgtctagaactctctctcgctctcccaaaaactcatctctcaccaccgtctcaaaccaagttcgatctaaaagccttttcctttagattctctccaacaacaaatctctttgaatcactcagtcatg

SEQ ID NO: 29596 - DNA, 3003 bp, Unknown
  misc_feature (1)..( 3003): 2750-1469P.txt file - cDNA_ID_3019465; gDNA_ID_2684230; Annot_ID_192222
gtgagtgtcgttttcgagaaaggagcaaacgtggtccgttttagaatcatgaatcatggatgattcgcaatctagtactatctctcttttagctagatttgcaataatgattatgatttcttgaaaacatggaatttgattttataatgttaaatagaatgatgattagatgttaattaagagaaaatttaatttgcgttagaaaattccatgaaattttgtgatggaattcggagttcaaggttcatcgctcctgacttgacttatgtcactttatgactcgatcttgcaccatggcccccactcttgtcgacgcgtactgatctcattatttagaaagtatcgcgtagtcatttgtgtatatgtgattacgggtagattttacaaaaaaaaaaaaacgtttataaaatttggattcatccattaacttttgcaaaagaaaattctatgaaaaaaagtcttgtaatagtgttttcgataaaaaaaaggcttgtaatagtgtttgaagtctaaccaaaatgtgaaacacaaacaaacagaacaattaattattttcttttttgatacaaaatagtcgaataacaaattgctcgcatttgatgtattcatttataaataatgatttcattcatgttcaattaggtttacactttatgaagaatgatatgaggaaacgtagtttttgtagctgctagtgacgggggcttgtagccgcaacactatttatcacaatttgaattccaacttattaatatgcgtgtataagttataaatcagaaatgataaaaaaaaaaactgagcatataagattatgaagtataaatcaatggaaattaatcggtaaaaaaaatgtttaacaataagagattgcatctatactattaatcggtaagagatatagtagtgagaaatagtggtacaaaaacaaataatggtctgtttttggtaagaaacagtgatatgtaaatagatgacaataccatattttctatgcgttgtaccggttttgttgaatcattttattttcctttttacatatatcacattagaactgagaacaaatttaaatgatatataaaaaacataggtcagtctttttatagctaaactaaaaaacttactccatttaattagtaatcaagttaacggtttatatcatataataaatttacaaatcaatatttatgttgatttgatttctaacatgatttgctcccattattgatacctttttttttttagagaggaccattattgatacttcctattcataatccactatttataatttatcgaggatatgtatatcgaatcaaagggcctacgaggatatagatggattgtgcaaatacaagtaggtgtccctcttgcgtgtacgcacaaacgattctcgacgtagatgctagcgttataatagcaccgagatcgatagaccaaacccaaaaatggtaaagaataatgttgctatttagatgtgtattgatacttaattctttgattaaaaaacacatgtgaacctaaattattcatatccacatatcttcacaaaagtgtatatggacaaagttaactgtttttctataatcataattttaaaacacaacttgtattacagctgtatctatgattctatatatacgttgttagcgtagtagcgtgtggtacatatgttacatgatttcaacaatattctaataatggttagacatcacgtagacatgtgtctcgttttaatccgtgcatgtatttaaacaaaaatcgattcatctgctgattttatagacacttttttatttaaaagacgatgttgtttagtttttccacagggaacgtttacatgaatctcgaagatatggttgtttgagtctgagtgcgaccggaaacgtttgtttgatggattgcaattatgggaatataaataaggaataacatgtgaatatgattataagataattatcatatatgacttatgaggattaagaatttccacgtggccggttaattgtttgtggtttacattcgctagattcttgtcatatccaacacggacaacacgcagaaaccaattatttactttctaactaattttcaatcaaaatttaaatatactttattcattttcaattatacctcatttcataaaaaaaaaaaaaaaaaattatgcttttttatcctcgcatcatcagtcatccgaaccacaaacaagtaggtggtatttttaagttgaagcttcttttcttccacaaaaaggaatcccatggactcatacaacaaaaattataccagatcgaactagggttctgatagtatgtttgtttcgtaatcgctcacgagtcacgacatcaacaatgaccaataactcaattaggtttgtttcatagttgcaacagtaacatcgactaatagtagtagatacataaaaacaaaagtctcgatgaaccaacaactataaaacgaacaaatcttgctaatcgtccttctttggacaattggattagtggtaccaatttcaatagtgaaagaagtctcatcatctatgttaattgaagagtaaatgcaaatccgagtctaaaaataggcgtcgatctataggactcaaaaagtagacgtgggcctctcactttctccgctactagcagcctcccgttccgtttcacttgacccttttgacgttgacgttccattttttcaactttctcttcttttttttccctctctctcttgaattattattaatatattttgtgtttacgcaatttccaaaaattaaataaattaaaagaatctctcgtatagacaaagagagagagagtctgagatcggtccttgacgagacactgcactttaacgggtttcaaagtttttttttcactctcttttctttctttctttctttctttctcttccaatcaagaacaaaccctagctcctctctttttctctctctacctctctttctctatcttctcttatcactacttctctcgccgatcaatcatcatg

SEQ ID NO: 29597 - DNA, 3000 bp, Unknown
  misc_feature (1)..( 3000): 2750-1469P.txt file - cDNA_ID_3019476; gDNA_ID_2684230; Annot_ID_192219
tgtgtgttatgttttctttcttggttgtcctgtttaaatgttgctaagaggctaatgggtttaagattttttcaggtacgagaagctaagtgagaagattgtgtcatgggaagataagaagaggaaaaaggcaaagagaaaacttcatagaacagaggtgcctcttcttttctttttcctccactttcctttggttccaaaaactaatccttaaataactatacaaccaatcaatgtggtgaatgtgcagagaagtgtagagaaaacaaagttgaaggcgacccagaggttcagggacgaaaatgaacgtattgagattatcgttgcaagtgcaagagcacatgcgtatgagagtcgaataaaagaagagttgaaggttaaggagaaagcaaacctcatgagaacaactggtaggaaaccctctacatgcctctgaatcctgcaagttgcaggaaatgtaaaaccaaacattctttactgctgataactattgtcgaacatgtaaaatgcagacacaaatataaggtgtttttatctatttaagtataagagagataacacacatgtgatccattatggcacaaatctgaaaaccaaaactttagacagttgcacaacaatactaaaaccaagagttcaaaatcacaaatacaatgctcaatcttgcaataaacaatattataagaaatgtgcagaactaccaaaaatcataaaaacttcttctgagttctgaccatcaaaggctccaaagtgctaaaaaagggttccatagtgaactacaatcacccagaatgggccgagcaaccaataataggagttatgagttcagcaccagtctcatgatgatgttatttcatttaccaacctttctagaataggataagcaaaatatagtacaagaccagctggaactgcgaaaagtattgtgaggaggaagtaaagggcaagaattatgaggctaccaggtatagcaaagaatacgatcagaaggaagatgatcacaaacggaaacttggaggtgaaagagatgaaaaaatcaagagatttgtgaaaggagaagagttgtctgcttggttggttactgtggtcatgatgtggcaaaaggtctgtagactggttacgcaataaaggcctcgcaaccagattgttgttgctgctgtggtttcccagagacatgctacacctcggagtcggagccgattgctggttatcagtgaccaaggaaccatgacttgtcctgtcaccatgacttgtcctgtcaccattcagactctcaaccatccagagaaggaagaaattcttccgagggaactttagattacccttgtaaacaatcctgaacgaaagcaactgacaccacgggcacgagacgaaaaacggaatccgaatatcttggcttgagagtctcaagacagcagattggagaccaaagacacaattctggcaaagagtatgaccacaccataacacataaggaacattctcaacaatgttgaaagattcccaacatatgggacattctaatccctcttcatccctgctaatatttgaaacctcatcatctgagcattgagaggatgcttgagctgaatctttaggggacttctttaaccccatacttccaatgacattcgacgcaaagccccacattttgatcaaacttgaaactgagaatgatcaccaaactttataaaacctgagccaatgtaccaacatttacccagtaaccttcccagattgaaaagagcttctttgaccaatacccatcattttaaagaacctggataacaagtgcaaaaatcatagatagtttagcaaacattatatatgaaaaaattcacaaaaacacaaactttcatgttattgggacatgaacaagattacagatcagaagaatggcaaaacaaaatgtgcccacgaaagctcaatgtacaatacatggtaactccccaatcaaaatcaaaacaaaggttaatgaaacctataaataaacaggcatctagatgcagaagacgcaagagatcaatctaggtttaaaaattcgatttttaagttccgtaacagatgaaaataatcggagattgaagtttacttaccgttaaatctttcaaaatcagatacgcagatgcattaaagaggagatcgaaacggggaagagaagaataaagcctctctctttttctctctctcgttgatccgccgtgttagctttttaatggcaaaacgctaaagaaaatatcggagcaaacgacgaaaacgacaacgtttagttggtagctcagactcagagagtattgaccaatgtgcacgtgccatcggtgtgacctccgtgacggttaaatatttttcacggctctgacttgttttaattattcttttcttaaaccttcttgatgatttagaaggtttcgaggtttgaggtatattcgcttaaacgacaactcaattttttgtcgtcgtagctggttttgatgtttccgatacttcatcgatccacagttgtagaaaattcttcgacatgaagttgaaattctgattagggtcttcctcgattcgcttttggtgaatcaaatttctttaatttcaggtgaatccttaaaaatctcacgacctctccgtttcttaattttttggtttttgtgataaaagctcaaggctttagattagaattatctgaaagttttcatctttttttttctttagctcttgtttttgtaacactttctggtttgtagactatggttgattttggaatttttagatttttgattgcattagtacgatctgattatctaatttcgatgattgtcgacgtaatttgacttgggcattgagaatttccaaactttctctgactgaaatttcatttttccttcatggaaatgattcttcctagttacttgttttgtctgtcttccatttccagtgaatacgcttttgacaggaggaccatactaagtcttgggaaaaccctcttcatagtgggtttgatctacaatg

SEQ ID NO: 29598 - DNA, 3000 bp, Unknown
  misc_feature (1)..( 3000): 2750-1469P.txt file - cDNA_ID_3019480; gDNA_ID_2684230; Annot_ID_192217
aaagatatttatttaaaaaatcatcttgtaatttattattttttaccttttattgtaggtttgagttaaaatttgtgatatttgtgcgggtgttgaagttagagtggagtaaattccaaatcacaagtacaattttaccccctagactcgatcatttgggacattaattttagaatggagaaagctacacgatcaaagaataatcattttcttcattattaactttagaaaaacatttatgtatgctgtaaaaaaaaacatttacttttacggagtacaatagatcgagtttacgtctccatttgtttgctaaacataaaacgcgttgtttcattaattggacaaatcatatctttctcctttaatttgtacttgcattacctattaaaaaaagttaatgctaagttttagcattgatgttcaaattttatccacaaattagaaaacatgtttcttaacaacttcttgaaaactccaaagagataaacatttgaacatggaattgatgataaactaaaaaaatatttatttcacaaaaaaaaataatggttcacttcatatctcaatgatccaaaaccatacattttgatgaatgcaattatgtaacttacgacaattcgtagttcacctcccacgcccaaaacgattaaaccatcacacttgttctagccgtatatcgtatttagatttctataatccataaaccattataccatcttgccaaaagtgaattaggtatttaataatgtaaacaaaaaaagttattaggttcattagaaattttgctattagacaatcctaaaagatgctattagaaaataacaaattttttgtataagctttaaacgttacatttaagaatccatcgttttactttaacgcctagtgtacttttaaaattctattatattcacttgatgttctgataaacaaaagttaaaaatatgccaatatttaactttgcttaaaaacaatatgaaatccgaaaccacgagataatatatggtccaaaaattaaaatagatgaaattcatctttgtccgcatgtatctgaaattgtcttgcgatttctttaaataccggttagacaaatgtgacaactatttgtctatttgttttcaattttccctgattggaataaaaaatgtttctatatacactgagcattaaaatcatatgcctatgaccaatatacaaattatatcctcccatgacttctccttattttataaaagaacactagtttgatgttaaaaagtcatgactttttcttaattccattatacgaatattattcttttcagaatattaagatcgagaagcttctgctttctttcgaacaaaatattcaaaaagatacataattggctaacaaatttagtgtaatcagaaactatatgtggtaattgaatattgtctccatgctttgtctcatgtacactaacacaagacttgaaatcttagttaacctctcctaaatgaagtaagaaaggataattaaagtaatgatagcaaaacccgaaaaagattagcttaacaaactcaatgacgttttaaaaagcttagacacttgataagattaagaccaacaagttaccctaaattacaagtttgatgataacaatacttaatttctaaatgaagcatcaattgtttaatgtttataaattaggttagatttaaagcttgaggggtccgaatgtcgacgcaactttgaggtttataagtttgaatgtggggtcaggaatttaatgaccttaattttgaagataattacggttttgggattgattttgtctacttttgtagttttgtttcttctgttcgttacagattggttgattttctacttaaacaaaatatcattaaaaaggcttcattgttgagattattacataaataggatcattcttctgaggaagcatattttctttcgaatttcgttacgtgtcataggtttgttggatatgaagatattattcaatctagatgttacatttgttatatagttttttaaaaaatcatcgaccgatagaatcatataagtcaacttggaatgtttaatgattatttaaacccatgtaccagttgtacaactacaaaccactggtatcaaacaaccatataaataaaacatatgtaattaaaatgattataaacactaacactaacggtaacgtgtttatgcattattaacacgttagaaaccgtatgaatttaatattttctctcttgtgtaaaataatcacaatgaccaaactttttcaagtacaaaatttattgtatctaacaaatggaataatgttattatgattgaaaagaaagattggctagatctagtggagaaaaagtagtaataagaagagataagactttaagtgcttcgtcttgtaaaccacaagtacatcatcatgtctttgagagagccgatgcaataattgattaaatgtttcgatggctctgatttattcgtttgactttacaaaaatgtaattagtttcgagcagagttacttgttctataatcgctaaataaccaataaaccaaggtgaaactcggtagcaccaacaccacgtccaactccgatgataacaataggtctttcgttactgttccaatccgacacgagcgatataattagagttatcgattcccaccactaatctgaaggcaacatcggaatcgacaagaactttttaacatttcatagcatagatagcaaattcagataatagcaaataagtaaaataaaaataaaaataaattatatataacaccaaaaacattttatttatttatgattgataacaaaattgtagaaacattaaacacgtgatattcttccacctatcctttctcgaccagataattttgtaacggattggatttttttgtgtcactatccgatttttatttttcctaactccgccgaatccgttcctctgtccttttctttctccactctctgtctctgtctcttcctcttttgattctccgatg

SEQ ID NO: 29599 - DNA, 3003 bp, Unknown
  misc_feature (1)..( 3003): 2750-1469P.txt file - cDNA_ID_3019482; gDNA_ID_2684230; Annot_ID_192216
tttattctttcccttttttggtatcctcttagagactgcctaagacagtgacatctttttttcagattacgtgtgtggttggactgtatatatggtgtgcggcttcagatcctgcagaccgtggagttttccggtctaagaagtaccttaaaattcctgaaaatgggaaatttcctctagcaaaggatataaaagatggatgtggatcagctacaggtggtgctaaatctcatgatggcacgtgtgtagaggatacagaaaatggaagtaacaagaaattggagtcatcagaaagatcttctctcctgcgtttgctctgctctccttgtgcattgctatgtagttgttgcagtggaaaagatgaatcttctgagcagatgagtgaggatgggatgttttattgcagtctgtgtgaagttgaggtgcggggaacatttataaacacagacatgtcttttcattggctttagagttttcttgtgacaagaaagcttcacatattctcaggagtagtcaacaattattgtcttccttttgcaggtcttcaaatacagcaagcattgcagagtttgtgacaaatgtgtggaccgttttgatcatcactgcagggtattcaaaggatttgcttaaaaatttcatggtttatcttaaatggttaaacccttccttctgttttaattattttatctttgtttttgtatgacttttgtagtggctaaacaactgcattggcaagcggaattaccgaaaattcttcagtcttatggtatcagctatttttttggtaaggttgtgttgatctttcatgatgtcctgaaagaatatcttctgtctatctttctgtcatgaaatgttctgaataattattccttggtgggtgaaatgaagagttagttctcataaagttagatgtattattaaccggtggaaacatcgttttttcccctgtggtttgaaattgcagctcattatgcaatggtcaactgggatttttgtgctggtattatgtttactccgaagaaaccaatttaatgcagacattgccctgaagttgggaagcagcttctcgctaattccatttgttatagttgttgtaagttaccttctcatacagttgatcttcccttatctcacctgaaagcaagatttgaaggtttcttctgtctcttgcagggtgtctgtacagtattagcaatgctggcaacgttaccacttgctcagcttttcttcttccacattcttctcattaagaaggtttgtttcccatgctcagttgctcacagacatgccaagctttgtcctttaactattcaattaaccaaagtaaattttctctaacagggaatcagtacatacgactacatagttgcgcttagggagcaagagcaagaactagaagctggaggcggtcaacagagtcctcaaatgtcaatgatcagctcatttactggactaagcagtgcaagctccttcaatacatttcatcgtggggcatggtgcacaccaccacgtttgtttcttgaggatcaggtaccattattcaccagtttcttctaccttgttgactatgatttgctctaatgcgtgtgcatatctgtatccagtttgacgtagtccctccagagaatgcttctgtaagttcatatgggaagaagtctgttgtagaggaacgtgtcaagaagaagccccaacctgtgaagattagtccttggactctagctcgtctcaatgcagaagaagtttcaaaagcagcagcagaagcaagaaagaaatccaaaataatccagcctgtggcgagacgggaaaatccatttgttggcttagaagcaagcagcagcttcggaagcagtggccgtagaatgttcccaacaaaatatgaaggtgttaataataacgggaagcagcgaaggcaatcaaagcgcatacggttaccagcagaactacctctagaaccgctgatgaatgttcagacaaaagcagcaatggagacatcaactagttcagggctagctccacttcagctagaagcaagaagcgcgtttcagacaagccgggcaatgtcagggtctggtaatgttatggtgacatcttcaccagagagcagcttagactcgcatgacattcacccgtttagagtttcgtctgaagcagaggatgcagcgcagcttaatgggttctcttctgctgttggtctgatgggtcaacagagaggacaacaacaacaacaacaactatcaatgatgatgatgccattgtcaaggtctacaagtgatggctatgatgcatctggtggagaagacagtgatcaggttccttctagaaacatccacaaatcaagatgagaagcatgatagaataattctagttttggcttcttcgaatcttcggaggtattctttgtgtaatggctgctgccttctatcaggaagaagtcaacatttgaggatcttgaaggtataaaaatgcctgccaaaagctcttaggagaagagcaccagagacttttgagaattcgagctcggtacccggggatcctctagagtcgacctgcaggcatgcaagcttgagtattctatagtgtcacctaaatagcttggcgtaatcatggtcatagctgtttcctgtgtgaaattgttatccgctcacaattccacacaacatacgagccggaagcataaagtgtaaagcctggggtgcctaatgagtgagctaactcacattaattgcgttgcgctcactgcccgctttccagtcgggaaacctgtcgtgccagctgcattaatgaatcggccaacgcgaaccccttgcggccgcccgggccgtcgaccaattctcatgtttgacagcttatcatcgaatttctgccattcatccgcttattatcacttattcaggcgtagcaaccaggcgtttaagggcaccaataactgccttaaaaaaattacgccccgccctgccactcatcgcagtactgttgtaattcattaagcattctgccgacatg

SEQ ID NO: 29600 - DNA, 3003 bp, Unknown
  misc_feature (1)..( 3003): 2750-1469P.txt file - cDNA_ID_3019486; gDNA_ID_2684230; Annot_ID_192215
tagtctactattgaaccaaaagcgttttccactgattaccttttgattattatagcacactaaattagtcaagagtaaaaaaaatgaaacatataaacaaaaaaatactcatcaaattattttctccataaccaatcaagtattaattgcccccacatcttataattgcttccattacccacagttcacatttcacagcctcacaattatcttgagttatatgtccataaactttacactactattaaacatttattttgtggggaataatggttttatattaatgaaagctacaaaaactaaaatagaaatagaagaagggtatagtgagtcacgggtatgggtagagagacagagaggggcacgtgcctgaaagaaaagaaccaagcaaatgagaacaaagtcactctctgtatgtccccatctaccattttgtagtattccttggtttggcattggatcatttgatatatatccctcgttttttcgacatttgctacatatcctttattcttcaaaatttgaacaatattacaattcattatcaaatttaatatttagtttgtcctgcccaaaagctgttaatattgtcctatctttttgtttatattgactttgttgctaccacggttttgacttctttttattacgtacgatggtttcgaagacatgtttcttaccgaagcgccattgttttcatacaaaatatagattatggtagatggatgtcgcgccaaaattgtaaatggtattggcttttagtatttcaaagattttagccaatcattattagctcaagcttggtaattcatacatgaacaacactcgttattggtgtatatctgtaaagctcgatacttataatctaatagcgctttagaatgtggtatgggttctcgattggcctatgtttgctgatgtgtatatctggtatattatatacatcggaatcgttcaacgttggttgcaaccggatatctcgataaacgagcacccgtattcaccgggcgtagcattcttattttattttaacaaagactattttttaaaactattcgtagattagtagtttagtactcaaaaaaccataaatactcaattacgtttttaggatttttataagaatgcttgtctctacctcatcggttttctacttttacgataaaactattaaattgcaatctcttataccaagaaaaaaaaagaatatgaagaaggaaaacgacatacataaagaggtccttcgaatttaatgcttcacatttactccttcacccacacaccttttgtcccttttttttaatgatcttattcagttttaaaataatttcttagtttaacggaaaatattcaaatagaatttcagcttatacattaaattatatttaaatttattatttttcatactcttttttttgtgattttacaaaatcttgtgtacgaatgagttttttttttttgctaagtttagagagaaagagtacaaataacataagcaatcgaaatttagcatgtataactttatttgcaaagaaaagattcatcaaaacatagcattgtcttcggccgttactttcatggtgttgtgtcagaaggatcgatacatgtttataagaatttctcaatcaattcaatgaggacagcaaaaacaattccacttctctttaaataaaccatgtatctgcatgcaaagtcgacgtatattaaactttttttttaactttatataatacacaaaagacatgtaatgtaagacattggctttcgatccaaatgaccctttttaagagaaatagcaagaaaaaggtaactaaaaacgcaaaccaattacaaacaaaaaaaaagttttatctttttttcttacaaaaagtccatttatctgacaatagagagatcataagagacatatcaccagctaccaaagcttttaaaaattcaaacaaataccataagattttagaaatacaaaaacaaatcctaaacccttataggaaaatttattaatctttcccggaccgtcgttttcttggtgctttgttctgtcactctcgaaccctcgaatattgaaaatcaagagctacttctattatattcctttcatttaaataatttctttggaagttcaaaattctctttaaccaaatcggctttgattcttgtaacatatttgaactttgtgcagagtagttaccagtttggaagactcaacatttaagacaaaatagtcatttggtacaacaaaacatttaatgtgtgatatgagacaatttattacacaaggacacattgtaattaagttaaatagagacatgtttaggctacctaatcacaattaaacctagttttactcattttatctctacaaattgaaacatgtcatgtgggatttgaagtaagaaaagatttagggtgaaaacaaaaaggcaacaaaaatcagtgggggtaaaaaagcaaaagagagtaaaatactgggagaaagacagagagagagagaagagtgattgcaatttaacaaaggagaaagaaaacaagtgttactggatttgccagcaacaggactgtgacacatgatttggccataggaaaaaggtaactgctttttcatctcttaattataactcctttcctctcttctctctctctcttccatggtgggttcttcttttagtagatctctgcaccacccaaagcccaaagctcaaagctttgcacagaagatacagagagaaagaaccacatacaaaaaaaaagagtctacttttctttttgtttctacttgctatttattacttttcacaccacaccctctggtcaaatgtctttctctctactcttctttcctttggtctgagacaacagtagcaagagtccgtgaaagaagaaaacaaaatgttagaattttgaagaagatgagggaaaaggaagcaactttatctgtttatttgacttgagtctcttcgatctacatctggattttgcagcatttcttcttgaggaaaaatg

SEQ ID NO: 29601 - DNA, 3003 bp, Unknown
  misc_feature (1)..( 3003): 2750-1469P.txt file - cDNA_ID_3019493; gDNA_ID_2684230; Annot_ID_192213
tagatttatttgctggatagtatcttgtctgttatgttgatgttcttcaagtttagtctggagggaacaaagacagtttcttgacactccccatgtatatatatatatgcaacttctcttttcttataagtttttttactgtgtttgacacgagctggtcggctcaacctattttagtttcacattctgtgaagttaatcatattcaattgcaatactttaaccacaaactatataagttaaactcaatcaaaatatggtgcaatggttcccatcacaaaaatagaaatggactattgaatctcttacctgttcgactaaaataaatattttcaaacaagaactgttatagaacaagattttttacctacagatacagaacgcaaccgatccgaaatggacatgcctaaaattaaattataactttaactaaatcccaaaacacaaaccgaaaacgaaccaaaaatccggatttatcatctacgactacaaacattcaaagtagtatgtacaatagatattgggccataagcccattaacccgtttgtgaattttgaaagagctcaggtattggggaaagctctagtctacaaatttgaaattcggaattcgaaattggggaaagtcttcttcatctgtctagagagtggcgtttgatttgagataacgttcttctccaaaattgcttgaggaagtggttttgttgtgtctctctgggtttgaaatatgagcggagatagacttgaatttgaaaaccctatagaggatgcggtttcgaggctcagattctcccctcaatcaaacaatctcctcgttgcttcttgggattctgtgagtttcttctcttctcttcttttttctcggatcgataccgtattggtctcagagatagtgacgaattgttgcttgcttgtgtaaatgtgtagtatctgagattgtatgatgtggagagctcttcgctaagtcttgaattaaactctcaagctgctcttcttgattgttgtttcgagaatgaatcaacttcatttacctctggttctgatggattcatccgaaggtttgcaattttcgcttttctattgtatgaagatagcaaatttaccttttcaatgaaaaagatctgatcttgtatagaatgataacaccttgcttgttaggtatgatttaaacgctggaacagttgatacaattggaaggcatgatgacatttcaacatccattgtctactcttatgaaaaaggtcagctttttacatttttaagtaagtggtgatgactgtttttacataagttgatttggtatcaggttttgagttttgaatctaagactttggtaacgttatgtatactgtcttatactaaactctaagtggtttgatgcggctcaggtgaagttatctcgactgggtttgatgagaagatcaaattctgggatacaagacaaagagaaagtcttgtgttttcgactgatgctggtggagcagtgggatgtgtcactgtatctggaaacaacttagttgtttgtgtggacgcatcgatgcatatatacgatttacgtaacttagatgaagcttttcaatcgtatgcatcccaagtggaggtgccaatcagatgtatcacctctgtaccttattccagaggtaaacatatatagttacaagaatctgtctttggtgttatttggccatagtttacatttccactgagaaaagatttatattttacattgatcaggtttcatgtttggtttggtttctaagatgtttattgttggtattgagcaggatatgcagttgggtcagtagacggacgagtagctgtggatttccccaatacatcatgctccagtgagattaagtaagtccacaatatgaaagttatcatttggctatccactggtttgtattcaatcttttctcttaagatgtgtaccataaattcatggcagatacagtttccgatgccatcccaagagtaggaatggaagacttgatggtgtatgcataaatgcaatcgaattcagtccatggtatatgtctctcattcaccatctaatggtacacatgattgatcatcaaactaactcttttcttgttgccacagtgggtcagggacttttgtaacaggtgacaatgaaggatacgtgatctcatggaatgctaaaagcagaagaagactcaatgaggttcaaacactaaacatgacttgttctctctagattccttcttgttcttattctcctctataataatttgtgttttttataaaagttgccaaggtactcaaatagcatcgcgtctttagcatttgaccacactggagaactcttggccattgcatcaagccacacttaccaagatgctaaagagaagtaagtcccacactcttctcaattcgtttcatcatcacaaacactctcacaatacatcattaaaacatttgtatcaatatatctccaaatgttttgcagggaagaagctcctcaagtgttcatacacaggctttgaaagattcgtaagcttcttgaatctcagtgtctacttgtatctatctagttatttttttgtgtgtttttggtagcacgttttagcttgatctcagaactgactcgtgtcaaccaacatgtaatgattgtatctctcacgtctctttatactacttgttctctaaactttgttttgactttttagtcaactatatgctttgactttaaaataaacagtagaataatcaaattatttaagagttgattaattaaatagagaatctcagaggccgcgtaagatttacgatctgacttttatttctttaagaaaaaacaaaaaaacgccgcacgtgtagggtcgcgtcagttgcacgcgacacgtcaaataaatctgaaccctagatcgctttcttcagtgttctataaaaactaaactccattcgctgacttcgcaaagaagaacactttctctctgaaatctcaaattcatctcttctcttccgatttcgctgaatcatg

SEQ ID NO: 29602 - DNA, 3003 bp, Unknown; identical to SEQ ID NO: 27178
  misc_feature (1)..( 3003): 2750-1469P.txt file - cDNA_ID_3019499; gDNA_ID_2684212; Annot_ID_191555

SEQ ID NO: 29603 - DNA, 3000 bp, Unknown; identical to SEQ ID NO: 14861
  misc_feature (1)..( 3000): 2750-1469P.txt file - cDNA_ID_3019499; gDNA_ID_2684231; Annot_ID_192258

SEQ ID NO: 29604 - DNA, 3003 bp, Unknown; identical to SEQ ID NO: 27177
  misc_feature (1)..( 3003): 2750-1469P.txt file - cDNA_ID_3019503; gDNA_ID_2684231; Annot_ID_192257

SEQ ID NO: 29605 - DNA, 3003 bp, Unknown
  misc_feature (1)..( 3003): 2750-1469P.txt file - cDNA_ID_3019521; gDNA_ID_2684231; Annot_ID_192277
gcctataaatactccacaatttttatatgattttagtagctcaatagagaataacaatagaaaagaaatggaaggaacaatgaggtgctcagcgaattacgtcccgctttctccgatcagctttctcgagagagctgctgtcgtcttcggctccagaacctctgtcgtgtatggtgatattcagtacacgtggcaccaaacacgtgaccgttgcgtccgccttgcatctgctctctctgaccttggtctctctcgccatgacgttgtaagtggttaaacgacttttatatattggtcatacttttttcttttgtttaaactatttcttttatcaggtggctgctttagcgccaaatgttcctgcgttatgcgagctttattttggagctccgatggctggagcagtactttgcgtgttgaacacgacattcgattctcagatgcttgcgatggcgctggagaaaacgaagccaaaagtattcttcgttgactctgagttcctctctgtcgctgaagaatctctcagtctcctctcaaacattgaagaaaaacctctcatcatcacaatcacagaaaatccaacagagcaatcaaaatatgaacaatacgaggattttctctccactggaaaccctaatttcaaaccaatacgaccagttgacgaatgtgatccaatcgccctcaacttcacatctggaaccacatcgactcccaaatgtgtcgtctatagtcatcgcggtgcctatctgaacgcaactgctgttggtgttatgaatgagatgaaaccaatgccggtttatctatgtacagttcctatgtatcattgtagcgggtggtgctatatttggacagttacggcttttggaggagtcatcgtctgtctcagggaagtcaacgacgaagttatatttgatagtatcgtgaagcacaaggtaactaactttggtggctcgcctccggttctcaacatgattgctaatgcaagagactcggtcaagaagtcgtttccatggaccgtacaggttatgagcggaggatcctctcctcctgaggtaaaactaactatcacagagttttgaattacatgtttgttcaatcaggcttatttggttgaacttccatattttgaggttatatataatcaatcccttgctttatacgttagctccgtcacagtacattaatatttaacatagaatcatagtaaagatattaatttatttggacaggtcatgttgaaactcaagaagctaggattcaaagtgatgatggcttatggatgctcggaggtgtatggactaggaacagcttgtttgtggatgcccgagtgggagactctacctgaagaggagagtttaaggctcaaggcaagagatggtctcaaccatttcgccaaggaagctgtcgatgtattggacccaaccaccatgaaatcggttccacacgacggaaagactatcagggtaattgctctccggggaaatacagtcatgagcggttacttcaaggacaaggaagccactgaagcggcttttcgaggtggatggtactggagtcgcgacatgggtgttatagatcctgatgggtaagtaaatgaatcatgcattactttgaatgtattactttgaatttatttatgcttatgatgtttccacatgcgaagctacatacaatttaaagataggtcacaagatgttataacatgcggaggagaaatcgtgggatcaaaggagatcgaagggattctctatagtcacccggcggtttatgacgcaggggtcgtgggtcgaccggacgaaactttaggagaatcgatgtgtgctttcgtgaagctcaaagaaggagctgaagcgagagaggaagagatcattgagttctgcaagagaaagcttgggaataagaacatgaagatgattccaaagacagtagtcttctcggatgttcctaagactcccactgggaagattcgaaagaatgttctgagaaagatggccaaggatatgggttatgttcaattgagagctgtggagtaaatgaaatgataatttatcaatgcatctaataaagttataaaaaaaaaaaaaagtgtaaactttaagctttagtttatatgttctgatgttctatgttattttgacatttataaaaaataatgaagtctcatttctagtagactgatcttaacataagacaaaaatatatatatcagtagatgataatgggtatgactcggcaagtattattctcttgatactattatgtagtttcattgtttaagcacactgatagtttaatactattatgtcgtttcattgtttaagcacactgatagtttgatatttttgtatcaggtgctgttgattgaattatgtttttttttgttcttgatttactttttattggggtagtattcatgatgattaatggagactatgttatgtatataatgttagaaacctggaaatatctttcacaagttttcacctttaagcaattcattttgatagaaaaataaatattatgagattaatctttcttccatggatcaaggcaagctaatagctatcatacaaacttataccagcccagatcaaattaaaccggagagaaattggaatgcccaatcagaaatgcataaatgggccaaatgtgaagaatacggcccaataattgttttttccatcagaatgataaacctgaaatgttttcttttcggcaagcttctctcctcttctaacatggtcgcatctgctagaaccagatacacataattgaaacgagtttcgataaatggaaatgttcgcttactgatttagagtttagatttttagtttgtgaagtaagttttcgccttttctaatctcgaagaacctcagaatcgagcctggaaagccatgtacagagctctgtaagttgttttggcaatttttttttttttttttgtgttgcctactatttcaataaatgttcattgacttgcttcgtgtttgtgcaatgaagatg

SEQ ID NO: 29606 - DNA, 3000 bp, Unknown; identical to SEQ ID NO: 9569
  misc_feature (1)..( 3000): 2750-1469P.txt file - cDNA_ID_3019521; gDNA_ID_1972155; Annot_ID_179467

SEQ ID NO: 29607 - DNA, 3003 bp, Unknown
  misc_feature (1)..( 3003): 2750-1469P.txt file - cDNA_ID_3019521; gDNA_ID_2684231; Annot_ID_137623
gaaatacagtcatgagcggttacttcaaggacaaggaagccactgaagcggcttttcgaggtggatggtactggagtcgcgacatgggtgttatagatcctgatgggtaagtaaatgaatcatgcattactttgaatgtattactttgaatttatttatgcttatgatgtttccacatgcgaagctacatacaatttaaagataggtcacaagatgttataacatgcggaggagaaatcgtgggatcaaaggagatcgaagggattctctatagtcacccggcggtttatgacgcaggggtcgtgggtcgaccggacgaaactttaggagaatcgatgtgtgctttcgtgaagctcaaagaaggagctgaagcgagagaggaagagatcattgagttctgcaagagaaagcttgggaataagaacatgaagatgattccaaagacagtagtcttctcggatgttcctaagactcccactgggaagattcgaaagaatgttctgagaaagatggccaaggatatgggttatgttcaattgagagctgtggagtaaatgaaatgataatttatcaatgcatctaataaagttataaaaaaaaaaaaaagtgtaaactttaagctttagtttatatgttctgatgttctatgttattttgacatttataaaaaataatgaagtctcatttctagtagactgatcttaacataagacaaaaatatatatatcagtagatgataatgggtatgactcggcaagtattattctcttgatactattatgtagtttcattgtttaagcacactgatagtttaatactattatgtcgtttcattgtttaagcacactgatagtttgatatttttgtatcaggtgctgttgattgaattatgtttttttttgttcttgatttactttttattggggtagtattcatgatgattaatggagactatgttatgtatataatgttagaaacctggaaatatctttcacaagttttcacctttaagcaattcattttgatagaaaaataaatattatgagattaatctttcttccatggatcaaggcaagctaatagctatcatacaaacttataccagcccagatcaaattaaaccggagagaaattggaatgcccaatcagaaatgcataaatgggccaaatgtgaagaatacggcccaataattgttttttccatcagaatgataaacctgaaatgttttcttttcggcaagcttctctcctcttctaacatggtcgcatctgctagaaccagatacacataattgaaacgagtttcgataaatggaaatgttcgcttactgatttagagtttagatttttagtttgtgaagtaagttttcgccttttctaatctcgaagaacctcagaatcgagcctggaaagccatgtacagagctctgtaagttgttttggcaatttttttttttttttttgtgttgcctactatttcaataaatgttcattgacttgcttcgtgtttgtgcaatgaagatggctttctccattgcgatttattgtgagctcgtcgtcgtcaaagttaacgccttacgtatctcgagttagttatctgttccctgtgtttcttcaattaaatttgaagacttattgcaatttgattaaatgggtatttgattatagggacgaggactaagtggaattgataatggggctggttgttcttgttctcgtagtgtcacgacaatgattggtatgtctgattttagcctcttcgtatggtctatttgtctcaatatctatttgatgttacttggattatgaaagacgagatttttttgacttaagagtgcatgtttccatatgcaggtaatgaattcattcgatgccaagatgagtcaaagatcttacagttgcagattgttgatgcccttcgttcaggagagaggcaaggagcgtcagcattgctttttaagttaatacaggggaattattcacttagtgctgatgattttcatgatattctatattattgtgctcgatcaccggatcctgtggtaagtttgatatatgacaaagtctccctttggctttgtttaatcttcgtttatctttcacaagttatatttcaatgaaattttggtagggctgagatgtaaatctgtaatttgtttctcataatacagtactcttgttgtctctgacctcaaggcagtaatttgttcctgtagtttgtcatggagacttacagtgtaatgtgcaagaaggaaattagtctggacagcagatctttgttgttcatagtaaaatccctttgtaatgggggacacttagataaggtataattattccactcgaaagccagtatttccttacataatgcgactaaaagagatgagtaaatagttttgggcatacttgttcaggcatcagagtttattcacgctgtcagagaagatgatcgtatatctcctcttctgcctatctataacttttttcttggagcctgtgcacgaacgagaagcgtatatcacgctagtaaatgtttggaattgatggatcaacggagagtggggaagaatggaataacttatgtagcacttctcaaggttagttaagaacatatcatttttcagtgccttaatctttttgtttttttcaagagctggtcgtatgccaactttaaaatttggagtgtagaagatctggagaggacttatctttttgttattgtctccatttctgtcttagctttgctgtcccttaaggactttcgtttgttccttgacatggaggtttcattttcattgatctgcataattatcttctttttctttgttatctgattaatattattttcagcttgcagtttttcagcgcaatctatcaactgtcaatgatatctggaaacactatgtcaaccactataacctggatatactttctctcagaagattcatatggtcctttacaaggctaggggatttgaaatcagcatatgaattattgcaacacatg

SEQ ID NO: 29608 - DNA, 3003 bp, Unknown
  misc_feature (1)..( 3003): 2750-1469P.txt file - cDNA_ID_3019525; gDNA_ID_2684231; Annot_ID_192270
taatcaccccaaaatcaaagagtttgtattaataaaccgctctcattcttgttgttgtttgaaacagatcttgagcctgatcagactccactaagctggtatactcggatgaaaatcgcggttggtgcagctcgtgggatagagtatctccactgtaaaataagcccgtctgtgatttaccgtgatttgaaatccgcaaacattttgttagataaagaatttagcgtcaagctctctgattttggactcgctaaggttggtcctgtggggaaccggacacatgtgtcgactcgagtcatgggtacttacggatactgtgctccagaatacgcaatgagcggaagattgactataaaatcggatatctatagctttggtgtagtgttgcttgagcttatttctggcaggaaggccattgatttgagtaaaccaaacggagagcagtaccttgttgcttgggtaagtaagattaacaattgtaaccagattaaaccggaacttaatctctcgtttaatttaaccgtgttttttttttcattttcgcgttaatgcaggctagaccgtatctcaaagatcctaagaaatttggacttctagttgacccgttgctacggggaaagttctcgaagaggtgtcttaactacgcgatttctataaccgagatgtgcctaaacgacgaagcgaatcaccggccaaaaataggagatgtggtggtggcatttgagtacatagcctctcagagcaaatcttatgaagatcgaagaacggctcgcaagtctacggactctaaccggttaagacgggaaacaaaacagagttattaattaaattgtatgagtcctaagtgaaacctctgctagaatcagaaggttcctgataaggccgcataattaatgtttgtactttttttccgggtgtttttgtttagtcagatttaagaatgggatttggtcggataaagaggtttttttttttggcttgaggtaaatggtgctttgtaaaaaaacttaaaaataaaaatgaactcttacgtttaaatatatattataggtatatactatatacgatgttattggtgggtcattaatacaaatacatatgcgtacactgtacacaagtgatagttttgataaataatatttcaagtgagctagttagattttaatacaaataatttcaaaatatatcttcaaattttaaacgtcgatttcagagtagatcaagattgtgacatcgtcaagggctaatcttttgattctttcttgcaaagaagaggacatgaaatcataaatgcaagtaggtgactaactgatttacgcggacgtcgaattatcgattatactatatatttatgtcaacttgcattataccacttaatccgatttacacatactatttcccatgtctacattacatagatatataatattcgcatattgcaggtttatgattgaagaagaataaaataacatctccccacgttttacatcggtctacgttatacatcggtctagtattactactataatatgcaatgtttcaaactttacgtggaccgttagtaaatgtgtttgtgaaagaaagaaagtcacacacatgtgtaatcgactgtttttttgtcttttgctacaaatgttaatattcattggaatgaaagttgaggtgctacaaaacagttagacctatgtatatttgttttttggcaaaaaaaacaaacaataaaacaatggagttgggacaaataaagttgttttcatcggagagccaaaaagccattaaagttgtaatcgactgttaaacgaaatgttttgttttaaccaaatatcaacatatcttatcttgctcagtgaattcacatatatagttgttagcaaaacaaaagatcataagataccacatacttttgaattttcttagatttatcatatatttttaaaattttctaataaagtttccatatgctgtcacgtttatatactcggacccgccattgctaaacactgttcttcttgtttgacctcttcccactgatatttttttagtttcttctaataaatgataccgtatatcatgataataaagattttcatatatttccgatactatttactgttttgtttttccacacaagataagaaagaaatttgttcactattatcttgcatcactcgatatctacatttttgtgagttctcttgttacgtcattgaggtgacgtatatgatcgttataatagtctatattgatcatgaacgaatgtgaatggtaatttggtatacgaggaaaaagaagtatggtacgaccgtacgagcacaagttgtaactttttttttgtttaaaaagaaacaatacagtagttacctacgaacataactttaatgttatgatactttttatttgtaaaaacagttaaaggaacttaaaaactatggttcatcgtatatattttcgatctgccacccaatgagtgagcacggcctttgactctggactaaaattatattgaatattcatatacttgatatccaagtaaatatgaaattatatacatgtcaagaaaattgtttatcgtttttggattatttatgttatcatctagtagttttattgaaatagtaaaactcgagatacacaaatgagaaaatgtaaataagtagtctgaatcaaggactaattgacgttgaaatttttggaaataaatgtatatttcaacatcaaccaatcaataatcacgacgatatcaaatacacatatccttttataaaattaataatgaatatttccccaaataaagagttttgcttggtctttcctctcttcttctcagcttcttcctcctcaatctttcaattaaaatccccagaaaagaaagaaaaaagggacagttggagaaaaagattctctcaatcttatgatcgttaagggtgaaacaaagattactaaaaacagaggaaaaacagagtaaagattactcaagagtcaagagctggtttgatcttaatg

SEQ ID NO: 29609 - DNA, 3003 bp, Unknown
  misc_feature (1)..( 3003): 2750-1469P.txt file - cDNA_ID_3019525; gDNA_ID_2684231; Annot_ID_137616
atttgagtaaaccaaacggagagcagtaccttgttgcttgggtaagtaagattaacaattgtaaccagattaaaccggaacttaatctctcgtttaatttaaccgtgttttttttttcattttcgcgttaatgcaggctagaccgtatctcaaagatcctaagaaatttggacttctagttgacccgttgctacggggaaagttctcgaagaggtgtcttaactacgcgatttctataaccgagatgtgcctaaacgacgaagcgaatcaccggccaaaaataggagatgtggtggtggcatttgagtacatagcctctcagagcaaatcttatgaagatcgaagaacggctcgcaagtctacggactctaaccggttaagacgggaaacaaaacagagttattaattaaattgtatgagtcctaagtgaaacctctgctagaatcagaaggttcctgataaggccgcataattaatgtttgtactttttttccgggtgtttttgtttagtcagatttaagaatgggatttggtcggataaagaggtttttttttttggcttgaggtaaatggtgctttgtaaaaaaacttaaaaataaaaatgaactcttacgtttaaatatatattataggtatatactatatacgatgttattggtgggtcattaatacaaatacatatgcgtacactgtacacaagtgatagttttgataaataatatttcaagtgagctagttagattttaatacaaataatttcaaaatatatcttcaaattttaaacgtcgatttcagagtagatcaagattgtgacatcgtcaagggctaatcttttgattctttcttgcaaagaagaggacatgaaatcataaatgcaagtaggtgactaactgatttacgcggacgtcgaattatcgattatactatatatttatgtcaacttgcattataccacttaatccgatttacacatactatttcccatgtctacattacatagatatataatattcgcatattgcaggtttatgattgaagaagaataaaataacatctccccacgttttacatcggtctacgttatacatcggtctagtattactactataatatgcaatgtttcaaactttacgtggaccgttagtaaatgtgtttgtgaaagaaagaaagtcacacacatgtgtaatcgactgtttttttgtcttttgctacaaatgttaatattcattggaatgaaagttgaggtgctacaaaacagttagacctatgtatatttgttttttggcaaaaaaaacaaacaataaaacaatggagttgggacaaataaagttgttttcatcggagagccaaaaagccattaaagttgtaatcgactgttaaacgaaatgttttgttttaaccaaatatcaacatatcttatcttgctcagtgaattcacatatatagttgttagcaaaacaaaagatcataagataccacatacttttgaattttcttagatttatcatatatttttaaaattttctaataaagtttccatatgctgtcacgtttatatactcggacccgccattgctaaacactgttcttcttgtttgacctcttcccactgatatttttttagtttcttctaataaatgataccgtatatcatgataataaagattttcatatatttccgatactatttactgttttgtttttccacacaagataagaaagaaatttgttcactattatcttgcatcactcgatatctacatttttgtgagttctcttgttacgtcattgaggtgacgtatatgatcgttataatagtctatattgatcatgaacgaatgtgaatggtaatttggtatacgaggaaaaagaagtatggtacgaccgtacgagcacaagttgtaactttttttttgtttaaaaagaaacaatacagtagttacctacgaacataactttaatgttatgatactttttatttgtaaaaacagttaaaggaacttaaaaactatggttcatcgtatatattttcgatctgccacccaatgagtgagcacggcctttgactctggactaaaattatattgaatattcatatacttgatatccaagtaaatatgaaattatatacatgtcaagaaaattgtttatcgtttttggattatttatgttatcatctagtagttttattgaaatagtaaaactcgagatacacaaatgagaaaatgtaaataagtagtctgaatcaaggactaattgacgttgaaatttttggaaataaatgtatatttcaacatcaaccaatcaataatcacgacgatatcaaatacacatatccttttataaaattaataatgaatatttccccaaataaagagttttgcttggtctttcctctcttcttctcagcttcttcctcctcaatctttcaattaaaatccccagaaaagaaagaaaaaagggacagttggagaaaaagattctctcaatcttatgatcgttaagggtgaaacaaagattactaaaaacagaggaaaaacagagtaaagattactcaagagtcaagagctggtttgatcttaatgggaaacatctgtcctggctctggatcttccactgttaaccacgaacctgtctccaccaaacccctcccaggttcatacacacatctctctgcttttttctttttttttggggccgaatccaaatactttagatctatttaccttttttttttctttggtatttttgacgattcttgagtttctttaagttcttgcattaaccccccaaaaaaaaaaaacgctttcctggatttttttgtttgtttcattgtgccttttcaattatgaaaatgtcaatgcttgctctgttttaacttttctgttaaagtctcaatgtttttattttcattaaatcaaactttcgtgtgtatcaatctatacagtgagacgtgtgcagaccccagagaataaaaagtttcctccgccgctggtggcgatg

SEQ ID NO: 29610 - DNA, 3003 bp, Unknown; identical to SEQ ID NO: 27259
  misc_feature (1)..( 3003): 2750-1469P.txt file - cDNA_ID_3019529; gDNA_ID_2684231; Annot_ID_192268

SEQ ID NO: 29611 - DNA, 3000 bp, Unknown; identical to SEQ ID NO: 14877
  misc_feature (1)..( 3000): 2750-1469P.txt file - cDNA_ID_3019533; gDNA_ID_2684231; Annot_ID_192267

SEQ ID NO: 29612 - DNA, 3000 bp, Unknown
  misc_feature (1)..( 3000): 2750-1469P.txt file - cDNA_ID_3019537; gDNA_ID_2684231; Annot_ID_192265
tgtgagaggctgatgggaaagactgtaagaaacccagcaacggtttcagttctttcgaaagatctttcagtaaactgtcagtggatttgcgagctgctttgcaggtttgaatgtcaccagttcttgagagatcacgcagcgatgcttcaagcttatcatgtgtggctaagcatttttggacgatgctttggacttcctggagtgttgctaggacctgataaacaaatggagccgtttaaatatcaaccattcagagaaagagaatatcagtaaatcgcttgaaaatatacatgagaaaaggttccaatgtacctcatcccattgaagtttcgccaaataactcggagaggacttggagattgagatgtcagcccgtgtgtatatgatgcaagtgatgaacaaaatgaaaaatccagagattaacatcaatggctcactcagcagattgatgttgctgaacttatagtagacctgtacagaaaacaaatatcataatcaattaaagtaggaatattgtggatgtagaatgacagcatttctgacgtataatataattacctggatatgctgattgtgatcagggacaacgttgttcttttcgagcacaacaactggtctaccagctatatctaaatgtgaatatttgatctgcaaatgaacaggattgcaacatgaagaattaaaatatcagaatcaaaatcagggaaagacttataatcaccagagatagtatccagacaggataaatcaggaacagataaagccaagactttgttacctcttgagactgcttgacggcgaatggagtggtaactgatatatcctttgacccctcaggtaaaaccacctacaatggaagaagaacacacaaaagaacatcaagctacgacaaggaaactttcactcaatgttggcgcatgagatcatccatattggtttatcatttggtcaatccagtcacgataaaaggatactgcttcgattgatttgattccacatcattctaaagctaaagaaaatcaaactaagaaaggtaaacacacttataagttgaaagtgtataagaccgacctgtacaataagtttttcagtgacaaggtcaagtataggggagccaaaggagatattaaggaatcgctttccttccgaagcaaacaagaagtcggtaagtggcaaaccataacctatcgtgaaaaaagttttccacccaccaaacaaaggaaacctaggctcaattagtagctctgtctgcaaccaaaccagcaaaaagatcaaaacacatacaacagaatatttggaagaccaaatctcgttaatccaaaaataccaacctttttcgaatcacttttcatctcagacgtggagatatttccaatatcatccctgtaatatatggaatgggctctggggggtaatctagcaagtaaatgcctaaaggcagatgctccacggggattaggtctggcttgaaaatctaacctgcggttggaatataatgagaatgaagcaatcaatttgtgcgttagaatagtgattaaaacgaagattaaagctttagtacgaatattaaccttgaaaactcgcccttgagttgagccccacggtggacaacattgtaattctccgtgacctgcacattcccccaatgagacacttctatctctcgcacaagcttctcagccacagcaaatgcagccttgctttcaaagtggacaacaattggagagtatgaatacgactggagattcttgtaaggaccatatttgagctctgatccctggagctttgtattctcgaatttggtgtaagattcgattctggcattcggtagtttgatagacaatgactgagactcaaccgcgtaaggagagagatattgtgcgctttcttggagcataacaagatggatttcaccctgagttatcttttcaggaaatggctgaagtacattggtgaatgcagcaactacctccagcgtcaaagtatcgcctttactcagtggtttgggtaatgcaactgagtaaacactaattgaatcaggtaaacctttctgatcagcttctctcacagagagattcactaaagttcgtttagatttcccctttccctcactaggagcaaccgatagataagccaagttgttaccaagaaactttgggaatgtcaaagcaaactcagaaactgattcagagccagaatttacaacctaataccaaatttgaaaccaggacttagagacaccaacacaacatataacttcgtgactaagatagtctcatagaaattaccttaagggtcttagtaacacgagcaatctgtgaagtcacatcgatctgcaaaaaagcaacaaactttgatgaataaagcatgaaatgaagctaaaagactctcgaaaatgatttcaattctaacgagattataagaattccatataaaggttatatcttttgaactgatttcgaagtgttaaagcacagatcaacaaatgcaaattgtgggacttgattcaggaacctcatgaatccaaaaccagatcgaagatattatgtggtgagagattgagagacttacacgacgttcgactttggataaaaccagatcggagaacgccggcgtcgcaagaagagcgatcgccaggagaagaagtaacagatcgacgacacttgattgcttcatccttgtcagatttttcggaccagtcttcgaactagcttactcactcagagaaccagagaccttaacaaaatattggctatttccccgggtcggatctagtcgaagcccatatatattgggccctaaacatgggcttaagggactagattggctcttttactaataggacagctggcggtgagttattggttggattatggtgaaccttggtgcagaggatgatacagtagtcgaagtgtgcaaaaactaggtgaggttttggttttgttgactcagtgaggattttctaggcgattttctcgagaaaatcgtttgaggaaaatg

SEQ ID NO: 29613 - DNA, 3000 bp, Unknown; identical to SEQ ID NO: 14889
  misc_feature (1)..( 3000): 2750-1469P.txt file - cDNA_ID_3019558; gDNA_ID_2684232; Annot_ID_192309

SEQ ID NO: 29614 - DNA, 3003 bp, Unknown; identical to SEQ ID NO: 28315
  misc_feature (1)..( 3003): 2750-1469P.txt file - cDNA_ID_3019565; gDNA_ID_2684232; Annot_ID_192307

SEQ ID NO: 29615 - DNA, 3003 bp, Unknown
  misc_feature (1)..( 3003): 2750-1469P.txt file - cDNA_ID_3019569; gDNA_ID_2684232; Annot_ID_192306
taagaaaaatttcaaataaattatatagtaactaactaaaaaatcacgaagaaaaaggaaaagaaacattcaaatcgttatatgtttcttcttgttaattagagatcacacatttctgaatgtagaattttcaaatattataaattaaaaaacgatgtaacaaaaagaatgattgcatcgaaatagacatgatatatacttccctaacgatcttttcaagtccaaacacaatatcttttgcaaataatgcgatttaacttttggtatttgatattttctttattcatttgcgaacataaaacaagcaacaaagagaatgaagagataattattcattgattaaaccttaacaaaagatccgttcatcagatatgaacggcaacaaatatcgcatgactaaacgaaccaaaacgaaaaacaaataatcaaagaaaaaaaccctaattaatcaagaacaaacaaagaagaagagaaactagcaggtgacatggcaagtgtaacgaacaagaggaacaaagaaagggtcgttgaagaatccccaagcgacgtcgtcacattcacttttcatgttgacaacaaggttgcaacaatagtcactaacttgaaacaacctcgtgtagaaactgacttccatctgcatccgacacatcccaacaggtcccatgtttatcatacatctctcgatgtgttcccatggattctgttgatgatgaggtggatttgatggagatgatgagtgatgacttggtggcggaggtggagacttcttgggtgttggaggtggaagagacggtgttgaaggagacttcttgggcgctggaggtggaagagacggtgttggaggcggagatggagacttcttgggcgttggatggggaacaaacggtgttaatgaaggcggagatggagacttctttggcgttggcggtgggggagactttttaggagctggaggaggaggagacggtgttgatggagttgacggaatcggcgttgatggagaaatagaaatggcaggagcagatccgttgctataagtacatttccagactttggaatctccatagccgaaactatggccagtgttcaaaagcatcagttcgtttctagtgatttcagacgggtttggccatccttcgatttttggccagtattttccgacggttgtggtcggaaaagccacaagacaaagaaaagctgccgctacaagcacgatggaggttttcattcttaaagggaagatttgtgagtgtatacaaagaaatggactaactcgttctttatatatagaaggatttaacttcttttttttggttggttacaaatatatcaaagatctttttaacaaccaaaaaaatatgaaaaaatccatatctcgtaactattattttttaaaatttaaactgttgtaaatattatctcttggaaactcgaaaagaatatatttttttattttttttatctaacaactttctttcaaaactcaaaacatatccttgtttacaaatgggattaaaaagtatggacaaaaatgtataaacaccacggggtcatgggcgtaggcagtgtgtaattagggggtcaattgacccctatgaattttaaaatttctactatattttattaagagtaattataatgaccccaatgcattatagtttttgatccccatatcaaactaattcaactaaaacgacaaaaaagccaaataagtttggttcattagaattttaaaccaaattgtaatgtaataaaattaaaaatccttgacttatttaaacttaagttcaactaatgatctaatgttataattatatatataaaaaaaacacaatttgtttttgcttttcttagtctttgtggaccataacaaaaagttgtaattattaatttagttgattttcagatatttttctcaggtgtagattatttctaaacaaaataataataaattttatataatatactatttttattaaaattctgatccttataacaaaattttctagctccgccactgcacgggatgttacatcgaattgaatttttggcgtagagcatctgcacaagtattctgctcacgatgtttgaaaacaaaactttggtgacttgaaacttcgcgtccatccacttatcgtagttagatagtgttgcagtcgtggtgatgatccattgttgtttttgagactaattcggttttttatatatagaaggatttaacttctgttttttgttggttaaaaatataataaagatctttttaacaaacgaataaatatgataaaattccatatctcgcaactattatctcttaaaacttaaactgttgtaaatattatttcttggaaactcgaaaatgaatattcttaacgagaaaaaaaaaacataacgaaaatatgtatattgcaattataagacttaaaaaaataaaaaatattaaatgcagattaacaaaaagaaattattagatgcagatttgtgtagatctttgaaaagacctattaaagcccatttaggcccattaaacgacaacctattaaacccatttaggcccataataacggcgtagtttcagaattagacagtgaggcaatggagcataaagtaacacccgaaagatccgacccggagaagagagatccggacaacccgacccaaatatttgacatttttggttcgatgttcttcttcttcctctattgatttttctgatcttcccgttcgatctcactctgtttcccaaaaaccttcgtgtaccttcgtattctctgcattggatttgaagcaaattgatgaactagtaatctcacacggatctaagagcaggtaaaaccaaaaatgaacactacaaagctatcaacgaattttccatttttttttgaaattttattttctttcgaagatcagatcagtaatcttattatcagcttctctcgttctcttgatcgatctgaatcgaaattgtgacaatgatcagccgtattttgtctttcagaagttatg

SEQ ID NO: 29616 - DNA, 3003 bp, Unknown; identical to SEQ ID NO: 27269
  misc_feature (1)..( 3003): 2750-1469P.txt file - cDNA_ID_3019578; gDNA_ID_2684232; Annot_ID_192298

SEQ ID NO: 29617 - DNA, 3003 bp, Unknown; identical to SEQ ID NO: 27275
  misc_feature (1)..( 3003): 2750-1469P.txt file - cDNA_ID_3019626; gDNA_ID_2684233; Annot_ID_192341

SEQ ID NO: 29618 - DNA, 3000 bp, Unknown; identical to SEQ ID NO: 767
  misc_feature (1)..( 3000): 2750-1469P.txt file - cDNA_ID_3019639; gDNA_ID_2684233; Annot_ID_192318

SEQ ID NO: 29619 - DNA, 2479 bp, Unknown; identical to SEQ ID NO: 14945
  misc_feature (1)..( 2479): 2750-1469P.txt file - cDNA_ID_3019670; gDNA_ID_2684234; Annot_ID_192384

SEQ ID NO: 29620 - DNA, 3003 bp, Unknown; identical to SEQ ID NO: 27287
  misc_feature (1)..( 3003): 2750-1469P.txt file - cDNA_ID_3019687; gDNA_ID_2684234; Annot_ID_192374

SEQ ID NO: 29621 - DNA, 3000 bp, Unknown; identical to SEQ ID NO: 14929
  misc_feature (1)..( 3000): 2750-1469P.txt file - cDNA_ID_3019691; gDNA_ID_2684234; Annot_ID_192373

SEQ ID NO: 29622 - DNA, 3000 bp, Unknown
  misc_feature (1)..( 3000): 2750-1469P.txt file - cDNA_ID_3019695; gDNA_ID_2684234; Annot_ID_192368
tagtctcatagtagtcgtctaaaccaaagctctagtcttgaaagcttatctttcccatcttcacgttgttcattcacttcatgggagattcgaattacattcttttaagaggatattagtttacgctctaatcgtactatattcatggattaagaaaacatctacaatctccaacatattttaaacagaggaccaatgcagacaaggaaaccttcaaggtctcaaaaaaaagtcaagaaaatttgaattcgtgccaactaataaaacggacatacctttgattttaggtgtccgaccaggtcgcacttatttgagtgatggatatagtttgattagaataaaatctagtaactattttgttaagtcagggtattgggttgcgcaagaactttctcgccctacttgtgactacccttttcagggaccaggaatcactccctttttggcacaagtatggaagttaaaaaccacaagaaagcttaagcattttgtggtaatgtttatcagggtacttggcaacaaaccatacactattctaccgacacatcggtaaggaaaagcattgtcctagatgtggtgctcaggaggagacagttaatcacctcttttttgaatgcccaccagtgcttcaaacttgggctctttcaccaattccatcactgccttcctccttttctgattagtccttattctccaatttggattttctttctcgaaagtgaaaggaatgatgaatggtaaagaaattggacaccttttcccatggatactatggtatgtatagaaggctcaaaatagctttatacagtagaaactctataaattagtaatgttgggatcatgaaattttattaatttataatgatattaatttatcctataaattaatatttattaacttatacgataagttaataaatattaatttatagaaatatttacataaaatacaatattatattctttttaaaatgtttcttaatttaagtttttatatgttttgttgtttgcatatataattatgttagttttagttttttttttacttctttaatttatttttcagcaagatattgtgtctatatatctacgccattaacgtcaatgtaaacgtaaacatgaagcttaatccaatttctctttactcaaatcttagcaatgctttctcaaaaagattttacaaaatcaactatgacggatcaaatacgcaaatagttaattatatgagtataacaaagatcataccagttgtattttaaaaagagttgtaattgtagcttgaataaaaatttcatataaaaattagtcttaaaatatatacttaagatctatgattattaatttataatattattggattttgaaattttgaattttttttcattttttatttatttattttacattaggtttcttccctcttgtaacaatatttgtgctgattgtctagctaaaaaggtaagagcatgagggtctcttttctcccatgtaaacacatctgcttaggattgtctttctttagaagaaaaattccgtccgataacttagtaaaatggtgttcgactaaaaagaaaaaaaaaacatttaaaacaagaaagtcaaataattatttgatataaaattttaatgacatatttataattaaaatataatttaacagaaatatagttatatactagataaaaaaacatatttctttgaaaattaaaacagatgaaatatatgaaattaatcatttctaaaaagctttctaagtaagctgtttcgttcctttacatctgtctttttcatttactttttgggttgagattattagtttcttgttcatgaagcttcgcatctccatcgaggatcatgtgtacggacccgagtgcttacccaaataaaccgaattaccatagcatttacaaaaaaaacatttggagagttggttgtaccattctaattatatatagttcgtcttttaatattgtggttagctaagaaaattcaatattaggtctactttaagacacagattgagaaaaaatatatataagttaataacttttggtgaagaatctgttgtcaacgagccaaaatatgagaatttttgggtataggttacttgcttaacacgagagtttgttctgtgcgtgaagatatggtcttattgcttcaccaagttggtccaacatatatatatgatctaacatttatctatgagatctctttatctattgtatatttcgtaaatgaatcctactatacatacatgaaatattgatagtcgggcataacttaacgttttccattgcataattcatcacacgatctttttcttggattttttttatatatataaaatataatctgttaaaggatcaatcaagatcatgttatggcatatgatatattgaatagaaaataaataaaactggcaaaactttaaatagtttggaaaagaaaatgagtttgaataacgacactccatctctcgtcacctttcttgattttgaagagattagttttctctattttttttcgttttttcttttataaactccatatcctgatttagtttaatgatctcttgaaggggttttcctaagtgtggttggataccattagttaaacattttcacacaactctagctataacacattcaatatttcaactgtgaatactagaaaaaggttaaaatggttcaaattaaaatagtcataatcaaaatgttgaaaaatgcatttaaaagttatttgttgcaaacgtatgtacatacaccattcataaacttgacgtccacgcaacctcccaaaaatattattttattacaccattttaatttaatatactataattaaattttagttccaaaacttaacattcacttgcccctctttctatatcacctcctcatctttagctccctctctctcgttttatcttttgatagttctgattgtaattagattttggtaggtcacttgtatagagagatcagtaaaataagaaggatg

SEQ ID NO: 29623 - DNA, 3000 bp, Unknown
  misc_feature (1)..( 3000): 2750-1469P.txt file - cDNA_ID_3019698; gDNA_ID_2684234; Annot_ID_192363
aaaatgggctaactccttcagctaaagtaatttatgaattagcttagtacacttcgtttataataactcgaatttaaatcatacaaagagttaaatgattttatcttactatttaatattaaaaaagtgatacatttaccagacgttatagttaaaacaaaatctaaataaaatagttttggaattctaaatttacaccaatgcacaacaataaattatattgatctaaaatcatggaatgatcatagtctaaatttatcccatttgagagatttaagaataaaaaatttacacacattagtaataagtagttaagtatatttattcgggacaaattttcgaatttaccagacggttaaatcgttatggtgatgttcttcgaagcatacaattttcgtagataatttaacctcgagagtgtaacaatttgataaacatcattttgttcgttttttccaacatgggatacatgctttcttctaccattaaagtatgggctcgacgttaagcatcatctagttgagccactcttatccctagcttattttgaatttgagttggatgttttgtcacatatgatatagaaatctattatggtgacattgaattcaccttggagaccttaaagaaaagaaaaagaaggaaaaaaacttctccactgtcactaatttggtccggatcaaagataaagtgtagtggtggaccgatctatattccaaccagggatatataagatgtaaggtgcatactcaaagaaaatattgtcaataattggctgtttaactgtgattaatatataatcgtactcagtcaagaattggttgtttaaaattagtggagatattatttcttataacctagttaaaagttgaatttgaatatttttttagagttcatacgacgaacattatgtatttgaaatgagaataataagcaataatagataaagaacgatagaatatgaccattgaagaaattgaaagtagatggtatgatgaaaattgatgagcatcacaagataggaatatggaaaacatagtggagaaaagctaagttatattccttccttgccaatatctccttcttttacaccttcttgtatcttaaaagaaaataataataacttagtattcacgacacttgtccaaattctttacccaagattcctttgttatgcttgtttgttttttcctccaaaagtaatgcaaatttacattaggtacaaacaatctcattgttaaaactcattgaaaggatataagaaaacaaatgggtccaaattattttaagaaatgaccaattgtcaagcgcaaccaaaattacggttatcaatctaattgacttatcttgaaaatataatacgttacatttccaatattccttttttattatcaaattacgttacatgtagtcgtagacttgagcactaattagccgttgaatcaaaatctttaacgtggttctactacgatgctatcataaagtctatgtcaatttatcaacaaaatatacattctcgaaagaaatgttatcatgaatcgttttttagtttttttttcctacgactacaagtacagctacgcaaagttgcaaaccactcccctccatacacattaacttggactaaacccgatgatcatacaatgtcacaaattttagcgttactacattagtcttaacattttctaatatttgcaaatgttccatccctaaaatggatggtagttttaatttcaaagcctttttttacacttttttgtttggtatttgttttaattttctcgtatgtataaaatttgcttagctttagcctatcttgaattctatcatcgcatattcgcatggttatattatatcttacaaatcgtgtgacccaaactctgattttggaaaaattcttggcgacttccctaatgtattacatagtctaaagaaaaacttaaatttctaactcaaatagtatttaaatttcctcaaataaggagcaagtagtgtatggagccaatagcattgaagaaaatgcctaattttctaaagcatatgtgcaacaaaaaaaaaaaaaaaacataattgaactctggttagtttagaaaacaaaacaaaaaaaaaagattatttacacaacaaatagtaaattttaaatgctcatttaatatttcttaatataaataaatgctataaagagaaaaaatgaacaataaaaagaaaagaatccataataaacagtccaaatggcatttttttccaaaataatcattaaattccttaaacatttccccacaatttgataatttttaaatttttatattttctcataaattagtacattgaatttagctcataaaaaaggaaaaagaaaagtggagggtgaagagaagaagagaatccagcaacgtttctttatttcctttgtgtttttttttcttcataatctctctctttttatttattcataatttttactctctccatttcttcattactcttctttttattttccggagatttttctctttgcctttgttatttgctgcttttgctgcagctacagtgtaagtttgattttctgggttccttcaaactccaaaatctcgcgtcgctttttgcttcagaatcgatttgttcttgttacttcgatctgttgttctttttaactctgtgcatgattcaatttcgtgttcgtaacctgttttttgctgcttgtttagttcgacaattaggtaaaaaaatgacgatccctaaaacttatgatccttttaatcttcgtttagctacttcgttcgagatcatctagggcttttgttgcttcatcgattttgggttttgatttactgtaaatgttttggttttgtttatgtaatctaagcatgtaccaatgattcatgagtgatcatgtttgttataggagcagaactgatgtgaagtgtgtattttgaatgtgtttttggttttgtacagagaatcttgtgtttttgtggtggggaggtgagatttcttatg

SEQ ID NO: 29624 - DNA, 3000 bp, Unknown; identical to SEQ ID NO: 29623
  misc_feature (1)..( 3000): 2750-1469P.txt file - cDNA_ID_3019698; gDNA_ID_2684234; Annot_ID_137675

SEQ ID NO: 29625 - DNA, 1118 bp, Unknown; identical to SEQ ID NO: 14924
  misc_feature (1)..( 1118): 2750-1469P.txt file - cDNA_ID_3019704; gDNA_ID_2684234; Annot_ID_192358

SEQ ID NO: 29626 - DNA, 3003 bp, Unknown; identical to SEQ ID NO: 21808
  misc_feature (1)..( 3003): 2750-1469P.txt file - cDNA_ID_3019743; gDNA_ID_2684236; Annot_ID_192431

SEQ ID NO: 29627 - DNA, 3000 bp, Unknown; identical to SEQ ID NO: 9729
  misc_feature (1)..( 3000): 2750-1469P.txt file - cDNA_ID_3019747; gDNA_ID_2684236; Annot_ID_192428

SEQ ID NO: 29628 - DNA, 3000 bp, Unknown; identical to SEQ ID NO: 9729
  misc_feature (1)..( 3000): 2750-1469P.txt file - cDNA_ID_3019747; gDNA_ID_2684236; Annot_ID_137718

SEQ ID NO: 29629 - DNA, 3000 bp, Unknown
  misc_feature (1)..( 3000): 2750-1469P.txt file - cDNA_ID_3019759; gDNA_ID_2684236; Annot_ID_192421
agatggactcactccaagtgctgtgttttctcagatcatgaatccaaagggacgttagagaagtcttataacacggtacaacactactacctttctaaaccggctccatccaaaggagaccggttcgtttctcttttttatattttttttcctcttaactatttattattattctctttgctgttatttatttagaattttggatttgtgtatttgatgccacgatggagagtgtaaaaaataatgtatttttttttcttctttctacaaaaacattaaacatgaatcgcgtcaatgtactatttggtttgttatctataacgtttttggtaattgttgcatctttactctattacacgtcgtactcttatgaacaaactagtacccatttattacaaagtcgtactcttatgaacataaacggaagtacatcaatcacttctctgttttactatatagacgcattttaacggaatcctaccaatagtgtcttttcttgcaaatattttgatttaaacaagaagggtcaaagttgtatatttctgctgatcaatacaaacaaacactttgaaagaaaaaaacaacgagtagaagaactatgtgtaatgtttttctcttgattgcataagaatttaaaaagagtgaaacaggattatttttccaagcagctctcttgtttttaactacaacaaacaggaaagaaaactcaaaaggagtcagagtctcagagaggagagaatagatcaggaggagagtcaaaagcattgtcgaagatgagagattgaggagattcatcatcaatgttaagtagccagtttgtatccttgacatctttaacattcaagagtgcgtcgtaacgagcactatcgttcttgttctctgtgttgttcccttctttcgttaagcttcttccatcttcctcttcatggttgctgctgctgcagctgccttcactactaccacacggttttcttagacccgaagaagaagatctgatgctgtgtggatacaacattgggcttgaaaacgtatgtgtactaactttaccatttcgtgccaagtcctgcatttgaagtgacactattatcgtcaagcaaaacctcataaaaaacgttactatactattgaccacgataaacgttataaatgacaaaaatatttagctataatcaaataatgacaagagaacgttattaccaagtgattgatagccatttgaacagaagctcttgacaacttccttcctggcctagttgaatcggcaacagtggcagatggctttatagacttgggagttgttgttgtatgtgaggtgcctgaaaaagtcggaatcagagaaggagaagcagagcgtcctttaggcctcgttcttgtaacatccggtgaggtgtttcgttttggcgagttaacatgacccactggtctaccaaacgctagagtgactgtttcttttagtcttggcggtgtccgaggtgttgctgaaactgttgtgcttctatcaggacgtgatgttacagacgaagaacgcacattggtcctactacttgcatttgctgcaatctgaggctttgctcttggagtcaacgatcttgatctttgagcatctccagctgttttgaaggaaggagtggttgaagtagttgtactgattcttgaaggagttgaggttggtgatggtgttttgcgtgatgagggagtcaaagatcgagagacagttctttttggagaagaaaccgaagctgaagcttgaatttgtgttgttgttgtcttcttggggaccgaagaggatctgatagtgggaatgttggagggacgaattgttgaaccgcttctcgttggtcttgaagatggatcactctcgctctacatgaaaaaatataaaaatattacatgagcatatatgatacatgaaattatagcgagcttgttgcatcatacccttaaaggaacccttgtagtggttatggactgaagcttggaagttgtgtttctagcttctagaaccaatctagaaagatctcctaatggaacttctgcaatggtataaagcctaaggaacaaagattataaattataataacttgtttgcattgtctatttcaggtttattattgcgtataaattcaaatgagggattacataaattcttacggttcatttgcatgtatattgtgattattgtcatcatcaggtccatgcttagcaactttagcttgttggaaagaatgtcttcctggtttaatcaaaactgcataccatatagatcaacatgctagatcacattaatatggatgacttattggaagacgaattattgtatacaaagattggcaaaaaaaactagcaaattgaaatgagaatagcatgaaagcgatcttagaatgcaaaacgtgatagcaatctaaacacaactggaagaacaataacaatgtgtgttggtgtagaaaagcaaaagataagtcaaatggaccaaataatagatgatgataccatccaaagaagttccacggttgactgagaagagatccaaattctcatccgcctggcgattgcttttaccggggagagactttttcagactccgatcactcatcgacggtttaaaaacacacgatcaaagaacagggaaataaaacagaagtcatataaagacaaaagagagatagagatagagaatgtttcaaaatttggttaaataaaataaaacaaaggcattttccattcccgtgtggttttggttttcatgtcattttcttccattttttataaagcatgagaggaagataatgtgaacatagaaacttaagattagctgattatattatgacgtgtaaatagacgtgtcacaatatatgctgcacggaaataaagtagttatctacatgtgtgtgttacatttatttgataatctaatttattcggtttgctttgattcggccaatttctgtttaccaatttttcaaaaatacaactataccgcggatttatttcacaaagatg

SEQ ID NO: 29630 - DNA, 3003 bp, Unknown; identical to SEQ ID NO: 27300
  misc_feature (1)..( 3003): 2750-1469P.txt file - cDNA_ID_3019763; gDNA_ID_2684236; Annot_ID_192416

SEQ ID NO: 29631 - DNA, 3003 bp, Unknown; identical to SEQ ID NO: 27301
  misc_feature (1)..( 3003): 2750-1469P.txt file - cDNA_ID_3019767; gDNA_ID_2684236; Annot_ID_192414

SEQ ID NO: 29632 - DNA, 3003 bp, Unknown; identical to SEQ ID NO: 27305
  misc_feature (1)..( 3003): 2750-1469P.txt file - cDNA_ID_3019771; gDNA_ID_2684236; Annot_ID_192412

SEQ ID NO: 29633 - DNA, 3003 bp, Unknown
  misc_feature (1)..( 3003): 2750-1469P.txt file - cDNA_ID_3019774; gDNA_ID_2684236; Annot_ID_192408
acagaggaggagacaaagaagtataggttcacattgcatagccagtttagttttgaaggatggatatatgaaaaaaatatgaagagagagaagagagaagaagaggaggattaaagagggtgaggccagcttttgtgctttggtagtagatgaggtttaaatgctccataccttccatttccttctctcttaccctaatttaattcttcctctcctttataactccccacagacattctcacttctcctcctcacacttcacatcaacacttctttcttgttttttcattttacaatgtttcctttgatatccgcactttaagcatgagagagtccctttgatattggcctggttcactcagatcttacctgaccacacacgtagatatacattattctctctagattatctgattgagccgcgccaatatctcagtactctctcgtctctattttggactttgtggtcttgtagatcgatttgtatgtgtgtgttgaaatggagacaagtacttgtaacttctttgttgttatattgtttacctataggctgatgtcataaactcttttgatcttgtttctaacttccagattcttgaaaaatcaagtcgtgtgtgtgtctccatggaagccttttccatttcttcttttccaaggtatccccttaatcagcttccttgccaagtataaatctgttgtagggttttgcttcaaataatctatatggatccttttagaatgcatattgtgttgataccaattttgagacagaatgtgtcagcgaaactgatcttgtttattagtacaaatgcaggatgttagagagttagctaataacatatacaacaaaatcacaaaaccggtgaagcaatgtaaaatgtcacaatcacaagatgtttttttcaaaaacaggggaaaaagcagagttaatgagagagaagctgacgagcacgaaccctaacctgcaagcgagcaagagcatgcatacaatgtaaagcaattcgtgcttgtctcctcacaagcactcctctagccaccgcctgtaacttcaccagactcttcaatgctttaaacgctcttcttgcctgcaaaacactttaatggttttaccaattttgttttttcaggttttcaaaatctacagagatagaaaatgtaaattaccaggtgccctctgaaaaaggcttggattttaacggcggcaatctcttctcgagttgtttctggagctgaagagcgaatgattgtgattctgctttgagatcgtcggagaagtttccttcttacaacaccaaacaaacgtttggagttggccatgtttatgggtggatcttgtcttcttttggttttggttttggttttaaaagaggacgtctaaggaaacgtaaaatgtgaataaaaagtgaagacggtggctttaagggatatatggaacatgatgtgctctcctcatttctaactaacgaacgtgctcgcatgctcctctctttacacttggtttcgttttgtttattagtagttttcaagacacacgagtctttggtcttttttacatttagttattgaattatagttatgttatgcctaactcaataaaaagaagcttattgagattttgaaaaggttattataaagggtgattgttgcatttcaatgctcaaaattaccatgttatgatatatcttataatcacatgtgaaatctacactatttttaaaatttatgatttagacaattttttcgaaaatgtcactctatttttcaacaagaaaataaaattaggtcattggtattgtggtttgtaatatactaatgacccccactacaatcctaccgacaaagcgtccactctttgtaatgaagttctttgatcatttctctattcaatcttgacactatgaatgtaatcgcgcagcggaagaatggttcatcatactcttacactgttacacaggtccagccctgaactaaagtgtttgtgtttttgtatcggatatgattagcaattgtgcatcaagttagttacggtctcttctcaaatccagtaaaccaaaaaatatataaaaaaatcatactctataataaacttacatcaaatgtcctttttttaacgtttatgttgggagtacgtagtgagatttttcagatatgataaatgtttatgtttgaagttctattttgagtatcatcattttacacgtctcctatcttttcttcaatcaataaagcctttgagcccacaacttcgtaataccgttaaacccaattgttattgggcatgaaaacaaggcccaactcaagtctatctcccccacttgttcatcttctattgtcttgttgcgagtttgcgacttaaacagtaattaaattactaattacgcaataatggcggattaatcgaacctactctctctctctctctctctctctctctctctctctctctctctctctctctctctctctctcgtgcatctccataaactatcttcaaagattaaattttgaagatcttctttttggcttattacccgattctgtcactgtctcttcttcttctccaatcccaatgtttgcttgagagaaagagagagagtcaaaccaaaacatgggcgtttgttgccctttccttcaaccctgggatcgagctcgtgatcaatgtctcctcaacctcccttgtctctccgatcctggtaccaatttcctctctttttaccctaatctatctcacgatccggtgtttcattaggttcttatgattctgtatctaattgctatcttcttcatctacccagttcgaagatcttctctacttctgaaattggcactagtagctctccacctcgtctttatcggctttctcttccttttcgatgctgaatttattgagaaaactaaacgagatccatggttattactccttatctctctctgcttattcaattactgtatccttgagcttaatgttgattactctgtgattctttctctgataggtatatg

SEQ ID NO: 29634 - DNA, 3000 bp, Unknown
  misc_feature (1)..( 3000): 2750-1469P.txt file - cDNA_ID_3019837; gDNA_ID_2684237; Annot_ID_192452
cgtcgtggataagaggcttggataggcggcggtgggcggcggaggagtcgtcatataggaggttaaagttgttgatgagaagaatggatggacggttgggatcgtcggaggtggcaccggacggagatgaagagggcttggtgagatttgatgggaagcaaagatggaagtttttccacatgactcttggcattgtttttgtttttgtgagaaagagagtgagagaatatgtattgagcatgtggatttagctaggttgtcttaatttgttttgatactattattgtatcatgcttgtatttatatgtacaaatatttatattatatacgtaccaccatgtatttgtataatgtattatatttacacaatgcatcgtgctttgctgtgaatcttaagaccaaaataattttaattcttatttttacttattttgtttgtataatatacagatctacaaaagtatcttattattaacggtcatcttagttttttgtctgttcgtttgaaggttttaagttataccaactttcagtaattcatacacttttttttttatagatttgttttcttgaaaatggttatatatcacttaaaactaaatttttaacatatttgatataaaattcatatttattgttgacaatgaaaatttctattttattattaatatacaatcttgataaaataaattaaaatattaatatcttaaatgtgaattagaaatttcaattaattaaatacaataagagggtaatttacgagtttttgtcgtatatagtataaggtaaaatgactcaaaaagcaaatcttgatggtaatcgaaactttaaacatgaaaaagcgcctacgcgtaaagtatttgttttttttcttagatttgatagaagggaaataaggttatatacggacatgcaaatatttatatgttttctccattatcaacatatacaaattatatgagtaaacttcaacaatataatccaaaattgtactgtttatctttatattttcacgctttttttttcttaatgtcataggcaaaaattctgcggggagagcaaaacctttattgtttagtaaataattttcttcaattcatttacgaactctagacataataaataaattaacgccaaataagaggaattattgtccttgcaaatatatacagcaagaactcacgaggaggcaatgtttggactaacctaaactggccatctcatgactcaaagacgaaagatcgatgtttgtgcaaagtacactgactcacttcacttctcattgatcaatcttaactaatatttgttctcttccctttttcagtttatcttagaccattgtttctcctagcaacaaattcaccgaatgatcatgtcgcgattagttttgggataaaatcataaaattgcttctcatcaagaattgctccgcaaaatcaatgttcaagcagattactagaccaaaatttatgatcgagtagtccgaatataatcttttgcatttaaagcctctaaaatttacaaatatctaaccaatgttacaacatggcatgtacctagtacaagctactaggttacaacttcagagcgaagaattaaaaaatgagaatcctatattaatgaatattctcgcttgagaaatctatgcatgacaactttctatcatcaacaataataattagatttgatcaatctctgtcgacgagaacccgccaaaagtggtgactgagagacatgtcacacaacatcgccctatttatacgtagaaatatcgatctatatatatatatatactagatcgacaataatatggtaagtttttttattttaaatatggtaagtaataaatgcttgtaatacgaaaggcctttatgctctactcattgtttggtgtataaaaaaaaaatggaatcaaggtgtcagatatgatggtacagcaatttttagccccacacgttgtcatttttctttggaaggtacattgagatcaatttctatttttgtattattttgaaatcatcatatagtttcattggatttatcacaagaggaatcttataaaaatgcgaatgggtatatctatctctctttcaatatctatgtcacacaagtgttgttgctatattgtagggacatgtcaaaacttgtcgacaaaagctccatgaatgggaaacattgacatcaagatacaaaatcacatgattcttcaacttgtgaaagttttcgagtgtgaacatcagactcacataaaactccattgtagatatctcttgtcataagacactgtcacattcaatatcgttttcaaactctccaaaatactgcctgattgcaatgttacaattttgtcatggacccaccaatccctgtgaaccaagccggttactgtttattactccgacccgacccgggctttttaaagataggcccaagaaggcccaatgattgaaatgtgaaatgtttgatacattgatgtttttgatcttcgctcaaaccctacaataaaactttggttcctccgaatttcgagttcttgttcttcccaaggcccctacttcggccctagcatcaaccattgtcgttttaaagctccaggttttcatggccaagaaagaagtaactatcgttgagatcttctgaaattaatcagtcttgaagtctctggagattgtacgtttctcttcttcctttcctcgtcggttttaatggattccgtttgcctgatttgcagtttctgcttcaccgtgaaatcgaaactcgttttgctcttaaacaaatattatgcatgcgtttcaatttgggtctttttcttgacaatattggttctgtttggattaagaaattgaaaattagttttgtagctgagccttttctcttgtgtgtataggaactgagctatatcagtagtgtatctagcatatttgattaatgttccttcatgttgttcttattgaagctgcttccattggttttgtgattgagtgcaggtcttataacatg

SEQ ID NO: 29635 - DNA, 3003 bp, Unknown
  misc_feature (1)..( 3003): 2750-1469P.txt file - cDNA_ID_3019855; gDNA_ID_2684238; Annot_ID_192504
agctgagaacaatgaagagaagaggagaagaagaagtgtttggaaacggcctggagctccatcggatcacgaagcccatctcggcccattatcactctatgggtcgggcgattaggttactggcccgtctattatcatttaatttcgttttgtataaataggtgtctgggagttttgtcctgagacatctagtcgacattgattgatcatctttatatttttaatatgtctaatttgaaaaccattttggttttattcgccaactttatgataacgatttttaatttagttttcatataagtataccaagagttattgatatgtaatatatttttcattcaaataattttgagttattactatatgatattgaaagtttttaatcaataattttagtagtaagaaaacaatataacagtgaaaataaccaaaaaataaatttacttttaaaagataatttacacttacaattttgttaagtattatttttggtaaatttgattttagttataagaatataaatcgatccatcggacgggtccttatctagtaaacacataaactgttttcttcaaaagaaaataaagagttttaagcataattataagacataagcagaagtgtaggagaataagaggatcttaggcagcaatggtagagccacaagattgacgtctaagcatccaagtcattctcaaatttgaggtctccaacaacaagaacatctatctgcactctttgttcataaataaatccatcgcaaacatgtaaagatcactacctttctcaacctcttccatggagttcaaacacttcatgcattccctaaccaatgcacttgatggaatcttctccaccacctcgatattgatcctttgacatggcgcaggagttacagttttcacatcttgtgactcttcaacaccaacaccgttaaataccacgtaatgcagagtaggctcaagattgtcatcatcatcagctccaccttcaatccatgtgactagctcgtttaggtctagtgttaatcaaatatattttcctatgaatatttcttcttttttagaagataagaagattaacaaataaaaataataatataagtttaatatatttcatatattattttccaaaaatttacatttctatttttcatatattgtttttttcctttttacaaatatctttgtacataaaataataataaaaattaaaatattaattaatgagatgactaaaatattcaatgtgattgctaactttaattggtcgttttaaatcccatgtagacggccttaaaagctcatcacttcgacttttataattaaagttggaataagaaatttttgtaagactaataatgatgtttttataataaatatcctattttctaaagtaataaaatttacaaataaatttacattttgttattttcatttttatgaatttcataacaaaattatattcagaattatttcatatttttagatttttggtttataaatttaataatctttacaatattaaaactttacatttgattacttttatattacatttttaataacacaacatcatagttagaaatgtatccatatttcaaatatttcttttattgtctttttttttttttaattttttacaaaaaattaagagattatttttagacgtcttacgttttttttttttttacatatgtttttctttaaaaatttacattttttcatatctattggtatttttgctttttaaaagtatcttaattaagtaatttataacttttaaaatgtcagttgatgcaatggctaatccggattggtagttttaaatctcatgacagcctaaggagcttataggctcgacttttaaaccatacataatgaatctatgaaagtaatgattatcgagctaaacgtattttatatatctagatgccttctatgatattgaacttctttctatttaggtcatgaggattactcctttcacgctgcaagtaacaacaaaactcaagaaatcaaagaagtgaagaacaaagagaaaaatgaaatttgtatcataaaactgatcaatgtgtaaatttcacatataaactacaattcaagtaaggaaacgattgttaagcttgcgaaattttaatcaaatccaaaagcagtccatgcaaatcaaagacgaattgtaatggtataacacatttgctaaacacacttgcaaaagctcatcttccatccatggcaagctttccaatgctcatactaaaaaaaattggcattgtatagtcataagtgtaacacccgtaaatagaaaaatcggttagggtttatacttaaatcgtccggtttaatcggttgggttaattggaaatcctagagtgtgcctataaaagaaagaaactcaaaattagggctttagttagccacttttcgttttataaaagagaaaaatagagagaaagagaagaaccagaatcattagggtttgggaggaaacggttgcgacatatcaaatcgttttcaaaggtaacgaaatttagtagagttattcccaagtattttatcgatattctccagtttacagaagtggatttggattataattggttgagttattcgcagtttcgtgagacacgttttctcagacgcgaattaggaccagcaaggattgtaactaacatcgtaatatcatctggtttccgatcggcacgagttttcgtgagaagctttgtaacgtctaaagctagcgtttcaccagagggatttaatagttaacgactggtttgtagtttagggttttgtctttgagactgtttgtttctgtttttcatgtccagtttgcttcaaggttgcttttggttgtgatttattgtaggacgtttctggactgtttcagacgcaagaaatgtctctcctgggtttaattgttgttagaatcaatttgttaaggtgaatgcgtgaccatgagcttatctaagcgatcggattgtgtgatttgttttgtgtgatg

SEQ ID NO: 29636 - DNA, 3003 bp, Unknown
  misc_feature (1)..( 3003): 2750-1469P.txt file - cDNA_ID_3019948; gDNA_ID_2684239; Annot_ID_192534
aaacaccaactggaagaagcatagttcttcgagagcaatacgatagcgatccttgattctctaatcgcttccgtgagagctggggcgatgatttggcttctctcgatcctttgatcatcgaacattgtaattccattgtagttaaattgtttgcgtaaatgactgagaaatgttttgcggacgtctggtccatggaaactcgtgaagacattgtatctccaggtgcgacgtgaagaagaagaagaagaagaagccatgagaggttcaaaatcacagattcccagagagcgtgaaatgtttctttggaacgtaaacgaaagtagagaagaaaaattcaaagtcaacgtgacttcgaagaaatgggaatgtgggctccggtaataatgcaaacgcgcaatggaaggtttcttgttgggaagattaatgcatgctatgtgacatatgtgtaaaacagatttatcgttagaaaaaaaaaaaaaaaaacagattttaatctatttagaaatacagctcacaagtggtgaactcgtaaacaccaagttctcttttcaatctcttctttcaccttggctcggtgtgaagaggtgattcagtttcttacaacgagctcaaattcttgtgattcacgtgttgtttctaggttgatattttgaatttgcgttatcaaaactgaacacagagtcacatagaagttctcattatatactgtctagctattgttgatatatatggaatatggttacatgcacaattgatggctcagatgatatatattagagatgggcttatttacttgtacattaggtcaagcctaatatttaaagttttagaagaagattattaagaacacaaaaatttaagaataactctcatattagatatcaaatctaatatgtttattgtgactggtcatttttttctaaaatttataagggtgatttgcatgaataacactttttgagagaaaaattaagaatatagcactatatatgtaattattaagtaattaacttaaggggtaggtaaaatgatctaaggtggtggtggtggtggttccagcgacgatggcggtggtggttccggcgacggcggcgacggtgattccggcgacggcggcggtagtgattccggcggtggtgattccggtggaggtggttgtccggcgatggtggtagttccggcggcggcggttgtccggcgatggtgcggtggttgtccggcaacggcggcggtggttgtccggcgatggtgacggtggttgtccggcgatggtgacggtggttgtccggcggtggcggcgcggttttccggcaacggcggtggttgccggcgatggtcgttatggtggtgattccggcggcggcggttttccggcgacggtggttgtggttgtccggcgacggcggtggttgtccggcgacggaggtggttggccggcggtggaggtggttggccggcggcggtggttagccgccggcggtggttgtagtggtggttaatggtgttagtagtggggataaaactgtaataatatatattacatatgttatattgttaggttgtttttattggttagtttgttaatttataaaaattttaaggttatatctgcaaattatccaattaataatgtatttttgtttttataatttaattaaagttgtatattatttttggaaagatatctttttgttaatttcttttttataagatgaaaataacttggtaattcgatttgaatacgaaagtaacggtatattgaaattagtgacacccatacccgatccaaacctgatgggtggttatccgaatccgatccgagatctataaatatccgaacggatcctatacgtctacacccgaatatccaaaaacctaaaatatccgaaccgaattcgaatgggtatccgaacatccatgcctatttgttacttttgatattttattgacgtttagaagaaaaagaaatattagtagaactggaatttggtaatttgattaggagaaggaaatagtggtattcaattgtaaaaatataaaatcttacatttttaaataaggaattttagtagactcgtaaattgactatataacacttctttttccaaaggcattgtaacgtaatatcttacaaaaaccaagattgtttttaattaggtacttccctaacattaatatagagatttaagaaaaatcaaaaactgccagttaaattcaaaacatatcaacatatcaaaatgtctagagtttctttttgtatattatatgggtcgagacataagatatccagcatgccatcttatgtgtgtacgccgtttgccaaataatcaacctagacaacacttgaatcaaaagaaaatcacataatcgcaccgagtaaggacgaatgaagaggttgagaacagaggttggtgtttatgataatgagttctatcaagatagcttccacgcatgcattaatcttcctaacattttgttaaaaactttcccaaggaaaaaaacattttcgaaccatttaggaagttaagaatataatacctaatatggttgtggtttactctgtaaatgacaaaaattcttcaaaatctcttcgcaatttcttctctcaaaccccacttgttttctaaaaccacatttaactcttctgaaatttcttttactttgcaaagaaacttcacatccatgtctctcttaacaagtgaactcagctttgctagctattttctcgtccgcataatggtaaaagaatgatcctaaacacatctggccaagaatggacagtatatatacaaattgttatgtacgcttcattatgacttttcttttctttctttttgtttttctccatattcgtttgtaataatacatttaaactttcgaaatttctttaactttgcaaagaaacttcccatttctctctctctattaagtgaacactattttcccattcttatccaagactcaaaatctgtgattttgaaccactcaagatcatctctcatg

SEQ ID NO: 29637 - DNA, 3000 bp, Unknown
  misc_feature (1)..( 3000): 2750-1469P.txt file - cDNA_ID_3019955; gDNA_ID_2684239; Annot_ID_192532
tccaaagaccaactggaagaagcatagttcttcgagagcaataagatcgcgatcctcgattctccaatggcttttttgagagctggagcgataatttggcttctttcgatcccgttgtcatcgaacatagtaattccattgtaaataaactgttgacgtaaatgactgagaaatttaatacggacgtctggtccatggaagctcgtgaagacattgtatctccagttgcgaggtgaggaagaagaagaagccatgagagatgatcttgagtggttcaaaatcacagattttgagtcttggataagaatgggaaaatagtgttcacttaatagagagagagaaatgggaagtttctttgcaaagttaaagaaatttcgaaagtttaaatgtattattacaaacgaatatggagaaaaacaaaaagaaagaaaagaaaagtcataatgaagcgtacataacaatttgtatatatactgtccattcttggccagatgtgtttaggatcattcttttaccattatgcggacgagaaaatagctagcaaagctgagttcacttgttaagagagacatggatgtgaagtttctttgcaaagtaaaagaaatttcagaagagttaaatgtggttttagaaaacaagtggggtttgagagaagaaattgcgaagagattttgaagaatttttgtcatttacagagtaaaccacaaccatattaggtattatattcttaacttcctaaatggttcgaaaatgtttttttccttgggaaagtttttaacaaaatgttaggaagattaatgcatgcgtggaagctatcttgatagaactcattatcataaacaccaacctctgttctcaacctcttcattcgtccttactcggtgcgattatgtgattttcttttgattcaagtgttgtctaggttgattatttggcaaacggcgtacacacataagatggcatgctggatatcttatgtctcgacccatataatatacaaaaagaaactctagacattttgatatgttgatatgttttgaatttaactggcagtttttgatttttcttaaatctctatattaatgttagggaagtacctaattaaaaacaatcttggtttttgtaagatattacgttacaatgcctttggaaaaagaagtgttatatagtcaatttacgagtctactaaaattccttatttaaaaatgtaagattttatatttttacaattgaataccactatttccttctcctaatcaaattaccaaattccagttctactaatatttctttttcttctaaacgtcaataaaatatcaaaagtaacaaataggcatggatgttcggatacccattcgaattcggttcggatattttaggtttttggatattcgggtgtagacgtataggatccgttcggatatttatagatctcggatcggattcggataaccacccatcaggtttggatcgggtatgggtgtcactaatttcaatataccgttactttcgtattcaaatcgaattaccaagttattttcatcttataaaaaagaaattaacaaaaagatatctttccaaaaataatatacaactttaattaaattataaaaacaaaaatacattattaattggataatttgcagatataaccttaaaatttttataaattaacaaactaaccaataaaaacaacctaacaatataacatatgtaatatatattattacagttttatccccactactaacaccattaaccaccactacaaccaccgccggcggctaaccaccgccgccggccaaccacctccaccgccggccaaccacctccgtcgccggacaaccaccgccgtcgccggacaaccacaaccaccgtcgccggaaaaccgccgccgccggaatcaccaccataacgaccatcgccggcaaccaccgccgttgccggaaaaccgcgccgccaccgccggacaaccaccgtcaccatcgccggacaaccaccgtcaccatcgccggacaaccaccgccgccgttgccggacaaccaccgcaccatcgccggacaaccgccgccgccggaactaccaccatcgccggacaaccacctccaccggaatcaccaccgccggaatcactaccgccgccgtcgccggaatcaccgtcgccgccgtcgccggaaccaccaccgccatcgtcgctggaaccaccaccaccaccaccttagatcattttacctaccccttaagttaattacttaataattacatatatagtgctatattcttaatttttctctcaaaaagtgttattcatgcaaatcacccttataaattttagaaaaaaatgaccagtcacaataaacatattagatttgatatctaatatgagagttattcttaaatttttgtgttcttaataatcttcttctaaaactttaaatattaggcttgacctaatgtacaagtaaataagcccatctctaatatatatcatctgagccatcaattgtgcatgtaaccatattccatatatatcaacaatagctagacagtatataatgagaacttctatgtgactctgtgttcagttttgataacgcaaattcaaaatatcaacctagaaacaacacgtgaatcacaagaatttgagctcgttgtaagaaactgaatcacctcttcacaccgagccaaggtgaaagaagagattgaaaagagaacttggtgtttacgagttcaccacttgtgagctgtatttctaaatagattaaaatctgtttttttttttttttttctaacgataaatctgttttacacatatgtcacatagcatgcattaatcttcccaacaagaaaccttccattgcgcgtttgcattattaccggagcccacattcccatttcttcgaagtcacgttgactttgaatttttcttctctactttcgtttacgttccaaagaaacatttcacgctctctgggaatctgtgattttgaacctctcatg

SEQ ID NO: 29638 - DNA, 3003 bp, Unknown
  misc_feature (1)..( 3003): 2750-1469P.txt file - cDNA_ID_3019959; gDNA_ID_2684239; Annot_ID_192531
taattatgtcgtgattgatatgtaaaattaaaaatttacatactatcccatgcacgtatgcatgggtttaagtaaaactttttaaagtgtaagataaattagattttttttaaaattattgttgatatttaatcaatattttggttttggggacttttttagtttttaggcttataaataatagtgttcaatgtcaattataataatttaatatggacgttttggtatatatatatatttttttttcagctcagattcgtatttaatcaactacgtaaaaataactaatcaaagacacaaactcaagtatcgatctccggttcggtatgcttgtccgacctctctggttacatgcgttgaaactcatcccctaagatttgacgttttcaaaactaaaaagactcattatcatcacagctgactagtattagcacatatcctcaacaacgtttgacatgttcattacgtctatacattcattctccttcttactcaaaaatatgtaccaataataatacgaattttgttaatttgacatagatccaattctttgatttctttaattatttaattttaacttcaaactttccaggctctaccattcctccatgatggttttctcttcaaagttttgataagcataacctcttcaatagggaaaagtacccagagacaataatacctcgaattgtgtttcagtcagatcatattccaaatagctcctcagctcacatggcaaggtatcttcataatcgggaaaggtaatgattgaccggtgttgtggttaaatagctatccgttaaccaataagacagacgaagctgttgataggatataagatttcatattggacttggggaattttgcaagatgactagcagacgaatatatattaagtcttaaaacttttgcatgtttattattgaaggaaataccgatacatttgattagattaattcatcttggacacatatttatcttttaaacatttatatgacagcaacatgcgtagatcttatcacatacgccaaaatcatatttgtttggcaagcttctacaaaaggtagtgcacttgtcgttcccaccaccacgaggacaatattcaaatcctccctcgcaagccacggagtcaaataacattccataacctgtttataattaaacaataaatcattaaaccaatatgcacattaattaattatatcaacaaaatcaaattaaacccataattaaaaagtgaggtataaaaataaagcagcacctgaagttgttgtacgactgtgaacaaaagatatgatgaaaaagatagtgaaaacaaatgccactaaagttctcatggttatggccatttttatgatatttgttcttaagattggtttaatgaatttttctagcttagatgactgattatatatataacacaaacatatgtaaaaaggtaatttttctggtaaaaaataaaaaggaacatgaactttcaatttatttccttatagatatatagtcaaaagaaaatattgtagaattgatttcttacgaaattagtcggtcaatgaccaaaatatattcaatgaatatttcagtagacaaatataatgttcgatggaagaaaaacaattcgaaatattgaaagtgatacatattaaatggttcagtttgaggttgctagagacatctataaatcttggtttctcaaaattagtcattaacataatcacaacatatgttaaacttaaattataacattatatactgtcatttctcaagtctacatttgttaataaatttggcagaaaacacataattacgttttggcgtagaatctctctataaaatagctattgccgtaaaatctcttatatatatgttcactttagctgtagatctttttgctagctttgttggttgtgacttagctattttatccaaaaaagaactatgttagttgtagatgtagatgttatttttttcctttaaatttcaaaattttttaaaaaatatatgattaagagagattaaggattaactgtatatgtaaaaattgttatatatatatatatattttttttttgcatttcatttattaccataaaagttttctcttttaaaggatttttacaaaaactaacatttacaatcccatacgacatttttttgtcagtgtcgtacaactaaaaagtcatttcggaaaaccgatccaaaacttgaagatgatgcatgtacagatgtactcatcaagaacttgtattcgacatctggatcaatactgcaagatgatcaagaaatatggttctgtcaatctgcacgagtgataccaaaaaaaaaagaaaaaaaaacaaagttttgcagtaagattttgacttgaagttaattaaaaaaattaaataatgaactctagtgttacttgtttctttattttgtaataagaatctaattgggttaaataatgaactctaatgttatctttttcattattttgtaataagagtctaattgggatgttgatcttactgccaaggtccgagaggcgttccacaaagaggaggcaaaccactactccccatccatgatcaacgagtggagcagttatgggtcaaatgaaataagctaaatggcgcaaacgaagatatttttgaaagttttaaaatggatatttccgatgcattaaataatgcgggttccgatgagttgtaaaagaaatcggaaaactgattattgtaacattttttttttgtatcaaattgtaatgctttatgattcgatctacacaacataaaacatgataactaattctgaccaaacacatatataataatgtaggttacctcttcacgttgttatagtttaaacaaaacaataacgtagattgagtatctctacacgttgtcattcctgaagagtgtcgttgactttttagttttttgttcttttcctcatattttccaatttttgaatccgatcaaacaacttgtgaaaacttttctttccaaatttgtttccatg

SEQ ID NO: 29639 - DNA, 3000 bp, Unknown
  misc_feature (1)..( 3000): 2750-1469P.txt file - cDNA_ID_3019966; gDNA_ID_2684239; Annot_ID_192529
gttcatgttcctttttattttttaccagaaaaattacctttttacatatgtttgtgttatatatataatcagtcatctaagctagaaaaattcattaaaccaatcttaagaacaaatatcataaaaatggccataaccatgagaactttagtggcatttgttttcactatctttttcatcatatcttttgttcacagtcgtacaacaacttcaggtgctgctttatttttatacctcactttttaattatgggtttaatttgattttgttgatataattaattaatgtgcatattggtttaatgatttattgtttaattataaacaggttatggaatgttatttgactccgtggcttgcgagggaggatttgaatattgtcctcgtggtggtgggaacgacaagtgcactaccttttgtagaagcttgccaaacaaatatgattttggcgtatgtgataagatctacgcatgttgctgtcatataaatgtttaaaagataaatatgtgtccaagatgaattaatctaatcaaatgtatcggtatttccttcaataataaacatgcaaaagttttaagacttaatatatattcgtctgctagtcatcttgcaaaattccccaagtccaatatgaaatcttatatcctatcaacagcttcgtctgtcttattggttaacggatagctatttaaccacaacaccggtcaatcattacctttcccgattatgaagataccttgccatgtgagctgaggagctatttggaatatgatctgactgaaacacaattcgaggtattattgtctctgggtacttttccctattgaagaggttatgcttatcaaaactttgaagagaaaaccatcatggaggaatggtagagcctggaaagtttgaagttaaaattaaataattaaagaaatcaaagaattggatctatgtcaaattaacaaaattcgtattattattggtacatatttttgagtaagaaggagaatgaatgtatagacgtaatgaacatgtcaaacgttgttgaggatatgtgctaatactagtcagctgtgatgataatgagtctttttagttttgaaaacgtcaaatcttaggggatgagtttcaacgcatgtaaccagagaggtcggacaagcataccgaaccggagatcgatacttgagtttgtgtctttgattagttatttttacgtagttgattaaatacgaatctgagctgaaaaaaaaatatatatatataccaaaacgtccatattaaattattataattgacattgaacactattatttataagcctaaaaactaaaaaagtccccaaaaccaaaatattgattaaatatcaacaataattttaaaaaaaatctaatttatcttacactttaaaaagttttacttaaacccatgcatacgtgcatgggatagtatgtaaatttttaattttacatatcaatcacgacataattacgtaacttacatacggaattttaatttcttaaaacagatccaatatgtaatcatggatctttgcttactcctgaatcctttcttagaatcgacttcaatggtttcaaagacataacctcatgctcatcgaaggaactaaaacttcctttcgatgtcctcctcttgattctccttgaacttattcgtatctcatcaacttcatcctttatgctcacaatttttcttggagccttttctttttgtacacttaactctactagttctcgatcgactgataatgtttccttttcttccatgttttctccaacattacatgtgttattagagccaatatcagaattttcttcctttgatacaactttaccaagtttctgtggttggccaagtgttactttcttcaaggcctgtgtggctaataatttcaccaagcaatcgtagaatcgtctccagatattgataggacattgaagttctcgttctgtgtttttctttttttgatcgactaaagagaaaagcatgttttggtttttggagtttatctttggctcaaaatgtaaggaaaacaaaaaacaagcagcaatataataatccatcgtcaatgatgaagatatggttaacttgtaagagtgggcgactttagggagaagaagaagatcaagaatcagcggaagaaattaaacaagtttggaataatttgatcctttcattatacttgaagatatatatatatatatatatatatatatatatatatatatataattgaatttatgttttaagttttatcattcgcttcactccatatgttgatgtatagcctaattttgatttggaacttacattattacttattgttaaacatcatttgacatcattgctgacgtcatagaagtccaacacttggccgacgtgaaccgccagttccgttgcaagagagagaaccacccaaatggccactggcgcagcgaccacgagcgtatctgtcaaatgtgcagccgtggcgactatcctttcatcattagttttcaactcttcactttttttttatcaagtggaaataataaatcattctctagggttataacacgagacacattcgtaagctacgttctagtgaattcacaactttttgggaagcataactcattgtgtctagggttatgttggttcattgaatctcagagttcatctgatcaacctttggatccttgaatgctaattatgccaatagttttcattttgtttcgtttgattgttgtttactccaaaataataatccaaatataagaccgcttttcctaaaaaggaaagaaattaatctgtcttcttccccaatcccgaaactttaaccttaaccccattattttcccaaattgaatatactcattcccaattttatctccttcttctccatcgcttaactgatctaatcccccaatttataaaaccctaactcttcattttgattcatttctccattctccagatttccgtttccctcttcgaattctcatctctaaccatg

SEQ ID NO: 29640 - DNA, 3003 bp, Unknown
  misc_feature (1)..( 3003): 2750-1469P.txt file - cDNA_ID_3019976; gDNA_ID_2684239; Annot_ID_192525
gttaggctcgtaaacgaacataccggcgttgaagtacaaaggcggcttaggaccaagcttggcctctggccatgtcaccttgtccggacactgttggcaataaccgatcttgtactgtggcgagtgactccatgtcttctcgcaaaaacagtccataactgcatagaattggccgtttggaagatcaaacaagtgatctatgttgtcgaacacttgtatgtcaccgtccaagtatatcatcttgttgtactccacgaactgcatccatatataattttattatatataagaaattaaagatataaaaataatcactataaggtctttttttatataaatatcaacttcttttggaacaaacaatgaagtacataataatattttggtcatatatagaatttactttgctagattttatattcttataaataaaaaacttaacaaacaatacatatttatatttgtacctcccagatacgaagcttagagtagttaatgacatagtaagccatagcaaactcggtttgattctccggtggataaaccggctctatctccttaacaacacagccttgatccaccaactgtttccggtgatcctccggtacatccggcaaaaccgccaccacgagtgggtacttgctcttagctttccttagccccttagcaagacccaccacccctttcacgtagtctccagttccagcaaggaaagtcacgtacgccctcttttctccgccggttgctgagtggaccggtacggtgagtttggtattgatctcaggtgccatcttctttgtcttttagaaaatacttctgtgtttgtgtttgtgtttgtttttgtttcgtttagtttgtgtgtagtgtgctgagtatgtgggtgatgcttaatggtgctttatataagattttgtcttaattaattaaaagattaatcgctaattactttggataattaaatacgaccgactactaaacgtttccagagaaagattttgatccaacggctattcaacaatatggtggaatctaacggtttaggatacgcgcgcgaagcttcgttttgaattaactatttacagtgggtcccagtataatccaggtgctgccacggcgttacataacgacacgtgtcagtatctagactgttcgactcatcaaggtttttaaatcgagctcgtggtggttgatcggtcatttttatgtgtttatcaatgggttccacttcagatatacgacgtcgtatggggtatttaatacactatattagtgtgggattttctgattggttattatgtggacacgtgtctacgtggaacgtagtaggcggtgatgatacacgtggacaaggaaaagtcttgttgggcccatttcccgtttggtctattttccatgtttaaatttctttcctatggtagtttgtctgaccgatgaccgaccgactatttacggcatatgtggacgttaaaatcatatatattttttaattgcatgactcaaaaactcataaggttatgtttcgttatttttatttttattttattttagtttgtttctgtcaagtaggtattacttatctgcattcaacaaaaaaaaaaatttgtgttaggttccataaaaaaaaaaaaatgtgtgtagttcctctcaatttgtattttttatagctattaaattaacttttaatctaacattttatcaattatacttttaaatttttcggaaaccaatcaagtctatgaaattactcacatctcgagttttatttttttttcttctagttttcttctttttttggtaattgataggtttcttaaagccaaataaatggattttttattaaataaatgaaaaagtccccattctacatttttataaaatttgccccgatgtaccatgcatccgcaagtggcgttcactacctttaattccccaagtaatttagaaaaaaaaaaaaaaaaaaaacggaaaagtgtcgttgtgatgtaaatttctcaatgggccgaccttgtttactatacggatgacaaaatcagaaaaataggataatgttagtttattatggctttatggagtagaagttagtgtaaggtcacttcaattccttcggttagtttttgtacaaactagtctatccacgactctgagtctttgactaattcttgagtgtagaatattctatggaatcttttttttccaactcgttgtgggatctaaaaaacgaaataggcgagtaatgtcaaatgtgtatgactcttgtaatatgttttttttgtaataataatcataatattctattgaaataaaataataacaaaaataataataactgctatataaaagtttaaagctttttcaataaataaataaataaaagtttaaagcataattgtgttttactcaaaacattcaattaaatttagtagaaggttttttatatatagtagtaaatttttatttttagtattttttcttgttattttatatgatattattatcaaggcatgtatattcaaaaaaaaaaattgtttcattaagacaacatattagatcaacttaactaactaaattgtaaagccacatatggatttggtcacgacatcgaataactatgtgcgtggttctagctagctaggatcaatctatttttcaggccattaaggtagtttataatttgtttcttttccaaaattccctttatcttttgaataattgttagcttattgatccttgaatttgctgtatttgtaaattttcaatgttttatcatcccatttttttagtcttggtttggttaactttttggtcgttttcagattgtttttatctcttgattcaagtatgtgttaatgttttaacttagatgacctaactgctcgcgaaatcccaattaaacactaatgggccgtaacgtgacgctgacactcaagatgacgttgatattaggcccatttgagtgaaaagaccttatcggcgataagctatactcatcgtgacgctgacatg

SEQ ID NO: 29641 - DNA, 3000 bp, Unknown
  misc_feature (1)..( 3000): 2750-1469P.txt file - cDNA_ID_3019980; gDNA_ID_2684239; Annot_ID_192524
tctgagtctgaggacagaaatggtttgaagattcactaacccagaatcggagatgagaaagatacattgaagcatctctaacctcgatgcgtgaatctgcaattgctcagctttcttctcttcttcgtcgattttgggatttggcttggaagtacaatactctgacccagtcagaggcttcgaatactctgacccagacagaaatgatgattttatcttggctcttgggctttatttctggcgaggcccaatgaatatcatgggccttctatagtttttaacgttagttttagtttttgtaactttggcttgctataggattgaattttcatcgtgttattacgtctccgatttgcgtacctcacgactgttttataaattataccggtatggtcgatctgagatcacttgtactggtgatgaattgatataggtgtttgataggtcccaatcaaaacataaaggaacaacacaataattttttagtttgtagtttttgactctctttttattttttggatttcattgattgaataagaaaacagaaacaaagattcaggacaggtcatccgtagacacaacttgtcacacaagaaagtaaatatctagaagaaaaatcatagaaggggaatattttcctattaataagcaacgagaaactttataacaaaaacaagactttttttttttggctgataacaaaaacaaaaacaagacttagttttcgctagtcgatgtaatgcgggtcactcttcacgtgaatgagcctagtattacgtacgttgcatgtcagcgtcacgatgagtatagcttatcgccgataaggtcttttcactcaaatgggcctaatatcaacgtcatcttgagtgtcagcgtcacgttacggcccattagtgtttaattgggatttcgcgagcagttaggtcatctaagttaaaacattaacacatacttgaatcaagagataaaaacaatctgaaaacgaccaaaaagttaaccaaaccaagactaaaaaaatgggatgataaaacattgaaaatttacaaatacagcaaattcaaggatcaataagctaacaattattcaaaagataaagggaattttggaaaagaaacaaattataaactaccttaatggcctgaaaaatagattgatcctagctagctagaaccacgcacatagttattcgatgtcgtgaccaaatccatatgtggctttacaatttagttagttaagttgatctaatatgttgtcttaatgaaacaatttttttttttgaatatacatgccttgataataatatcatataaaataacaagaaaaaatactaaaaataaaaatttactactatatataaaaaaccttctactaaatttaattgaatgttttgagtaaaacacaattatgctttaaacttttatttatttatttattgaaaaagctttaaacttttatatagcagttattattatttttgttattattttatttcaatagaatattatgattattattacaaaaaaaacatattacaagagtcatacacatttgacattactcgcctatttcgttttttagatcccacaacgagttggaaaaaaaagattccatagaatattctacactcaagaattagtcaaagactcagagtcgtggatagactagtttgtacaaaaactaaccgaaggaattgaagtgaccttacactaacttctactccataaagccataataaactaacattatcctatttttctgattttgtcatccgtatagtaaacaaggtcggcccattgagaaatttacatcacaacgacacttttccgttttttttttttttttttttctaaattacttggggaattaaaggtagtgaacgccacttgcggatgcatggtacatcggggcaaattttataaaaatgtagaatggggactttttcatttatttaataaaaaatccatttatttggctttaagaaacctatcaattaccaaaaaaagaagaaaactagaagaaaaaaaaataaaactcgagatgtgagtaatttcatagacttgattggtttccgaaaaatttaaaagtataattgataaaatgttagattaaaagttaatttaatagctataaaaaatacaaattgagaggaactacacacatttttttttttttatggaacctaacacaaatttttttttttgttgaatgcagataagtaatacctacttgacagaaacaaactaaaataaaataaaaataaaaataacgaaacataaccttatgagtttttgagtcatgcaattaaaaaatatatatgattttaacgtccacatatgccgtaaatagtcggtcggtcatcggtcagacaaactaccataggaaagaaatttaaacatggaaaatagaccaaacgggaaatgggcccaacaagacttttccttgtccacgtgtatcatcaccgcctactacgttccacgtagacacgtgtccacataataaccaatcagaaaatcccacactaatatagtgtattaaataccccatacgacgtcgtatatctgaagtggaacccattgataaacacataaaaatgaccgatcaaccaccacgagctcgatttaaaaaccttgatgagtcgaacagtctagatactgacacgtgtcgttatgtaacgccgtggcagcacctggattatactgggacccactgtaaatagttaattcaaaacgaagcttcgcgcgcgtatcctaaaccgttagattccaccatattgttgaatagccgttggatcaaaatctttctctggaaacgtttagtagtcggtcgtatttaattatccaaagtaattagcgattaatcttttaattaattaagacaaaatcttatataaagcaccattaagcatcacccacatactcagcacactacacacaaactaaacgaaacaaaaacaaacacaaacacaaacacagaagtattttctaaaagacaaagaagatg

SEQ ID NO: 29642 - DNA, 3000 bp, Unknown
  misc_feature (1)..( 3000): 2750-1469P.txt file - cDNA_ID_3019984; gDNA_ID_2684239; Annot_ID_192523
accatatagttatacatatactatatgagattgtgttactattttaatttttatgggttttggaggattttttaaatttccacatccgtttttacttatcatatactagcttgttgattaggaacaatgctcccgacaatattgtaaagtatacttgtttaagttgttatccatgagaatacaaacgtatatagttcagttatatttatattcttcataagtatcttctccaactttcgaagacatggtttttataaagcacagagtattcgttctttttatgtctttctattctagccaccataaattttgtaaaaaaaaataaccttgttaaaacgctttccaaacacggattgaaacgagggtaatattagaacgtaaccatgtaaatgaaaaaaatagccgttaaagaaaaaaaaaaacgaaaaaaataaagaattgtcagtttttttattagtaaataatcatataacagtataacaaaagataaaaaggtcctgcaagttgaagtacattatttatttatttgtgtaacatctatatatatatatatatatatctatatagtgaagtatattttggaataatcattttttttgaaattcctagttctttaattagtactgatcggaatgataactttcactcttcaataatatctctttaattatttctgttaactattatcttaagaaaaaactccattatcaaaaaaaaaaaaattgtaacatctttatattaaaatttaaaatagtacacaaaagtattattaacaattaattattatttttgaacttttcattttatttcatatgatttattagtatagctacaagtaggggtgccaaaatgggtaatccaactcaactcaactcataatcaaatgagtttagggttaaatgagttatgggttgacccaacccatttaacaaaatgagttgggtcaacccataaatcatttaattattataggttgagttgttaaatgggttaacctattttagtaataatttaattaattattattataaaacaataataaataataattattattaattcattatcatcaaacttaggatatttacggattctacattttacgggtttacgtttttggcggcaaaatcacgggtttacgttttcggcgggaaaattataggtttacatttttggcggaaaaattacgggtttacgtttttggcagaaaaattacgggtttacgtttttggagggaaaatctcgggtttacatttttggtggaaaaatctcggatttacgtttttggcgggaaaatcacgggtttacgtttttggcggtaaaatcacaggtttacgtttttggaggaaaaatcacggatttacgtttttggcgggaaaattacggctttacgtttttggcggaaaaattacgagtttacgtttttggcgggaaaatcacgggtttacgatttttggcgggaaaattacgagtttacgtttttggcgggaaaatcttgggtttatgtttttggcgggaaaattacgggtttgcgtttttggcgagaaaattacgagtttactttttctcaatttcatcgcttgtatatttaagaaatttggaaaaatatttattttattaaattggtttagatgtgttggttaaacttaaattggcattggtttagagattttagttggtttaattcaattttacaaaactcgatgggttaattgtgtaaaccattgaaaccattaaccattacaacccaactcattttactcatcaaaccaattgactcatcaactcatttgacccatcaactcatttgactcaaaattttcaactcattagggtttagggttcatgggttgagttgagttgagttgacccatgaattttgacccattttgacacccctagctacaagattacaattgaaagtatattgttttgctctctatttatataacctactttaaggaattttacaaatttgttaactgattatctccctttaatcctttttatttatgcaccaattagatcaattatggattctaaaagaacaaattagcccatatgatacaataaataaattaaaaatgtaacaataaaacattgtggttttgttataacggttcaactaaatcccaagcttcaaatcatatgaaaatttagggttaaaatttttgtttgatttaagaattttagattgaatttggggatttagttaatacactattaccaaacgatatcgctctgtttttagaaacaataacgttttgaattaaaggttctctgttaaaaaaaattaactccgttaataggatatataatctacttaatagtatgcctaaatcaggtcaacaaaatttggatatttatttggaaggttaatataaatttgatatttactttgttttgtggagaattgaggatttaaatcaacgttttcattaacttgaggattttagtgatattttctccgaaaatgttttgtcccaaaaaaaaagaaaaaaaaaagtctcagtcctctcatttctccatctctttttcgatttaataaacacaaggaggcttagggtttaaatctgctcaaccacgattcacacaggtgcgttctgtttctttgttgttttggaggatttcatgcttttaatttcttaatctatagaaaaagtcatttgaaaatggaagcaaattgaaaattagttccatgagttgtgttcctaatgagaagtatcttagtagctcgaattgtcccttaacgtccttatatttttagtatgattaatggattctgcttgatttctctatgtgtgatttatgggttttgctttagttctcatatttctttttggtttctacttgttcctgatgaaaagtagctcgatttttcctcaacgtccttttacttttttgtatgatttatgggttttgcttttagttctcagatttctattttctcttatacagattttaattttgtgtttgtttaatttcaggtttgttgagatg

SEQ ID NO: 29643 - DNA, 3003 bp, Unknown
  misc_feature (1)..( 3003): 2750-1469P.txt file - cDNA_ID_3020000; gDNA_ID_2684239; Annot_ID_192519
tcaagggcactaaatcataaaaaacccaaaatctcagatctatcaagaaaacgactattccaaaaatggaaattataagaacaaaattctttggacagagatcaaacaagaaaggaacgagaaaaatgaactttaggtaccttagattatccaaatttgtagctgcaaaagttgttcctgtgttcaagaaagaaagacctgtaaaatgatctggatgtgtttggttatatatataagaagacttaaaagataatgacttaatctcgtaacgagtcacacggacgtgacgctgaaactcacacacgttggtgccacgtctttgtctttcctcttttgctctacttttttctcctcataggtgataggtcccataagcaatgaaataaaaaaaatggtaattgacttttctccaaacattttcgaatctgattttctttttcaaggttttataacctctacattccagaatatgactaatgacatcattatccaattattttttatactgtaaactcattattatgaatattctttatttcaaaaaattaccattgatttataagtttattagtataatatataacatatggaataaaacttttatttaaaaaaaaatatttttccccaaaaaaagtaggattaataacctgattaataaataaaaagtgttatatttttaagcattgtatgcatttactttatcatagttgtcttgtttttaagagttaaaaaataatgatgaacaatttcacggacaacgattccacgataaagctttccctgcaacactcagattttctaaagacggttttgcattgcgttttctgggattcgaaacccaaacatgatgtacaagtattaatgaactcttagttaaccattagattaaaaatattttcactattaattttctcttaaaaatattaataattttttgaaatcaaaaattatagttattttattttaataaacgagaaacactacaaaaaaagttaactgcatttagataatttaataaactaaaatatccacataaaaatttcaaatttatcaaaaataaaacatcaatttgttttttgttttaaattaaagatttgctattgattgcataaggaagaaaactttacaaagccgaaaggcctaagagcccaacacacacaaaagaagaaccattttggatcaagggaaccgaccatgggtattagaagtagtggtataaagcccatcatatcccaacacataacccacgaatgtttaatattaaaagtttgttgttcggctcatgattagcgatgatcatacagaaagtttgtatctaatacgtgccttgaattttatgtgtacaacaaacaaattaaattattcaaaaccataaattataaaaaataattacagaaataaaactatattaagagcgagcctaccatccggtgtgcaactttctagtttatatacagtggcggatcaacgttaatgaggcaaattggttcaaattcatctaaataagactagagttcacaggttcgattcctccttataacaatttgctcccaccaattttttttgctgggtccgcccctggttatatatatacttctacaccaggtttgggttcgagtccacacataattaacgacacaattatagtgcacgatagaatgaactaaaacagctagagcgtagagggctcattgtctataaaaatccttcgttaacttgcaagaaaccaagagtagagggctcacacttaagtctcctacatgacgattatatttcgtcaaaaagaagcaattagttagctttacagcatatcatttcgcctaggttttccatcgtacacgtaaattttcatgcaagaaagcagaaatatacaaatactaacttttagatactgaaaaatgagatcagattctagtcaaattttgttaaaagtatttataaatttaaattgcaagtcctcaaaaagtacgactaaaaatgcttttcttagaaaatgataataaaccggcgttttatatataagtgtttctttttctcttctgtccagaagtaaatcattaagaaccaatatggcttttcttaaactaatctccgtgataatcaaatctttgatcattctccacacaatcccatcaacaacatcgatctcactagatgcaccaacaatgattctaatcggcactactaactatagagatagttgtcccaaaaaaaaaaaaaaaaactaactagagagataaatcatattcaatacatgtactatttctactatacttaagaaaatttgtataccactatcttaactcttaacactgaacatactatacactatcttaactcccaactcttgtaaaagaatatctaattttaagaaaagacttcaaatgcttgttaaatttctagtgaagatgcacattctaaaaactggtaaaatggtaagaaaaaaatatataaaaaaatagccttattaaaatttatatctcctatttctctatccaaactacacggatgaagcttattgttattcatccaccctttttctcaattctgtcctatttcttgtgcatgaaacttctccatcttgtaatcggataaatcatacccaaattttttctttctgaaaacatatatacccgaacattaattactatcgtcctttctcctaattttgttaagaaacatgtttgtttgtttttagtactgaaaaaggatggagatacttgctagatcctatgaaccttttctctctaggacaaatcagtaaccaaacaataacttagcaaattaagcacgacagctaatacataaaatgtggatatcaaacatgcacgtcacttccttttttccgtcacgtgtttttataaattttctcacatactcacactctctataagacctccaatcatttgtgaaaccatactatatataccctcttccttgaccaatttacttataccttttacaatttgtttatatattttacgtatctatctttgttccatg

SEQ ID NO: 29644 - DNA, 3000 bp, Unknown
  misc_feature (1)..( 3000): 2750-1469P.txt file - cDNA_ID_3020003; gDNA_ID_2684239; Annot_ID_192518
aaacaaatacgaacagcaaaagaaattttcatgcacaacctttaatagcatgtaaaaacagcataaagaagttgtaacaatgatttgtactcatttaaacaaatttttttttttttttttaataccgggtattaatcaattttctgaatagaaaatagagagaacgaagactattggtagtgattatagatattcatatttgtgtgtgtgtgtgtcggttagtgtgtgtgtgttcgtaaataacataccagctcttacaggaacttggtgccatttgccttctccatacttattaatgcactgtctcaagagactatcttcttcagtagtccaagcaccttttcgcagccctttggacgaaccctccatggaacaaagatagatacgtaaaatatataaacaaattgtaaaaggtataagtaaattggtcaaggaagagggtatatatagtatggtttcacaaatgattggaggtcttatagagagtgtgagtatgtgagaaaatttataaaaacacgtgacggaaaaaaggaagtgacgtgcatgtttgatatccacattttatgtattagctgtcgtgcttaatttgctaagttattgtttggttactgatttgtcctagagagaaaaggttcataggatctagcaagtatctccatcctttttcagtactaaaaacaaacaaacatgtttcttaacaaaattaggagaaaggacgatagtaattaatgttcgggtatatatgttttcagaaagaaaaaatttgggtatgatttatccgattacaagatggagaagtttcatgcacaagaaataggacagaattgagaaaaagggtggatgaataacaataagcttcatccgtgtagtttggatagagaaataggagatataaattttaataaggctatttttttatatatttttttcttaccattttaccagtttttagaatgtgcatcttcactagaaatttaacaagcatttgaagtcttttcttaaaattagatattcttttacaagagttgggagttaagatagtgtatagtatgttcagtgttaagagttaagatagtggtatacaaattttcttaagtatagtagaaatagtacatgtattgaatatgatttatctctctagttagtttttttttttttttttgggacaactatctctatagttagtagtgccgattagaatcattgttggtgcatctagtgagatcgatgttgttgatgggattgtgtggagaatgatcaaagatttgattatcacggagattagtttaagaaaagccatattggttcttaatgatttacttctggacagaagagaaaaagaaacacttatatataaaacgccggtttattatcattttctaagaaaagcatttttagtcgtactttttgaggacttgcaatttaaatttataaatacttttaacaaaatttgactagaatctgatctcatttttcagtatctaaaagttagtatttgtatatttctgctttcttgcatgaaaatttacgtgtacgatggaaaacctaggcgaaatgatatgctgtaaagctaactaattgcttctttttgacgaaatataatcgtcatgtaggagacttaagtgtgagccctctactcttggtttcttgcaagttaacgaaggatttttatagacaatgagccctctacgctctagctgttttagttcattctatcgtgcactataattgtgtcgttaattatgtgtggactcgaacccaaacctggtgtagaagtatatatataaccaggggcggacccagcaaaaaaaattggtgggagcaaattgttataaggaggaatcgaacctgtgaactctagtcttatttagatgaatttgaaccaatttgcctcattaacgttgatccgccactgtatataaactagaaagttgcacaccggatggtaggctcgctcttaatatagttttatttctgtaattattttttataatttatggttttgaataatttaatttgtttgttgtacacataaaattcaaggcacgtattagatacaaactttctgtatgatcatcgctaatcatgagccgaacaacaaacttttaatattaaacattcgtgggttatgtgttgggatatgatgggctttataccactacttctaatacccatggtcggttcccttgatccaaaatggttcttcttttgtgtgtgttgggctcttaggcctttcggctttgtaaagttttcttccttatgcaatcaatagcaaatctttaatttaaaacaaaaaacaaattgatgttttatttttgataaatttgaaatttttatgtggatattttagtttattaaattatctaaatgcagttaactttttttgtagtgtttctcgtttattaaaataaaataactataatttttgatttcaaaaaattattaatatttttaagagaaaattaatagtgaaaatatttttaatctaatggttaactaagagttcattaatacttgtacatcatgtttgggtttcgaatcccagaaaacgcaatgcaaaaccgtctttagaaaatctgagtgttgcagggaaagctttatcgtggaatcgttgtccgtgaaattgttcatcattattttttaactcttaaaaacaagacaactatgataaagtaaatgcatacaatgcttaaaaatataacactttttatttattaatcaggttattaatcctactttttttggggaaaaatatttttttttaaataaaagttttattccatatgttatatattatactaataaacttataaatcaatggtaattttttgaaataaagaatattcataataatgagtttacagtataaaaaataattggataatgatgtcattagtcatattctggaatgtagaggttataaaaccttgaaaaagaaaatcagattcgaaaatgtttggagaaaagtcaattaccattttttttatttcattgcttatg

SEQ ID NO: 29645 - DNA, 3003 bp, Unknown
  misc_feature (1)..( 3003): 2750-1469P.txt file - cDNA_ID_3020022; gDNA_ID_2684239; Annot_ID_192512
atactctatcaaaataatgaatgtacatttaaaaaaaataaaagtaatattagactaaaaactcccaaattctcttcaaaattccgtttttcctcgtatgtttttttttttttaaattcataccataacaaatacacatagttaacaaacatcactgaaagcccataaggcccgtcgataccatcacaaggtaaaaaaagagttatctctacccaaaacgtatcgagagatattggagtataacaatgccaagtgttgcacaagaaagtgatatgcttttccatcatcctctgccacttggactctgattccggtgaataaaatcaataccggagaaacacgacacaaaaagaaaatattgaaaccagccaccgtctatgaaaaccgactgatggtggaaaaggaaccgggccttgtccgggcacaaagcggaaatgaaaaaccggatataaatggaattggaaattaaatagaatcaaaaatcaatttgcttagccacacttttggacttcagaggcggaagaatgggaaaaggtggactcgaccacacctataagacaagttgaaattaagagaaaagtgaagctaacatacttatcataggtttttaggggttgggactgaagagccttatacaaacaaaaaaattgtccaatacttgtgagttgtgaccacatttcacaaattcacaaaaccaagttacttcggctattttgctaatccgtcattttcatgttgttgaactctttaaaaatactaataaaattaagggctggaaaatattgtaataaaaagtagacaaccaaaattaaggaagtaatttgcaagttgcacccttatcaaaaaaggacataaatagtcttttctcttgcgaaataacattggcatcaggtaacaaattaacgccgaagtaatgtaaattcgtttatttcacttactattagcaaaaaataaaagatatcaatttattcgataacatattattttatataacatattattttatatgatatgaaattaatatatgttgacatgatgcacggtatattttcatttggtagacaaatgttactttacacgatgacgctatacctaataaaatagcaacaaccatggttaccaaatttagcttgaaagtaattaatgatatttcatgtatgaactaatataatcaaaataaaaataaaaactgctaacacttgtgtgttgagaccacttaggtaatctatcttatgaatgtaaaatatagatctacatatatagatagatgatgcataaaacgtcatatatatcaccgatgaaaacaaaaccatgcataatatatcctggctcaactcagtcaataaactatctcagtttcttttcagaaaataagaagtcttagttcgaatattttaatagtgatatcgtagaagatatgtttcctaagaatttatctctaatctcaacatccctttttaccgctacttgctagtctaaagatactatatatagttccaatatttcatttttaggctctattttttatgtgagtatgagacctcttaattcatcgcatgtgagatttggctaacctattacctataaacccctaaagtagattattgtagaatctatgtttagtacaagaatgtatctctaacctcaaaaacccttttttatcgctagcctcaagatatatatccttactagataaggcccgcctatttaggcgggtgtatccgaaattttcaaatattcgaacgggtctaaacttgaaaacccgaaaaactcgaacccgaacccgaatagatatccaaacatatctcaaatataagtataagtataactaatatatacttatacataaaaaatattaggacttttttgatattttagttatttttgtgtatttttagatatattcgagcaaaactactcgtgttgttttgggaatttttgaaattttcaagtaatttaatagatttgcacacacaatttgatatttcaatatataaataaactcgaacccgaacccgaacccgacccgaaatcttaaattacccgaacgggtcctaaacttctaaactcgaaaacccaaacccgaaatacccaacccgaatacccaaacgcctagagctaataattaatagaaaaacagaaatccacaaaaatatttagaaaccaaacattgttgaaaatataattttatatatgccgtaatcttgtaagttaattttaacatcatgcaaatattaaatgagttaaaattaataaatgaaaataattgaaaaggtaaatcctataagctaagctatttttctcaaaatgttctattttcacttatgattacatgagttaaagacaaatttgttaattttccttttattgaataaatgttaattgtttataaatatatagacatataaattagtatatgtaaatttgtttactttttaagattttctattctttttaaaaaataaaaaagttaaattttaaatgacacatgtaaacatctgatcgtttgacttgacacgtggcacgatcctatgagttagcaactttgaaaaccatactttatataataagattactagtccaaaagatagcattacctcttcattcctcgcgtgtaagacgatttggctaaacctatgaaaccctaaagtctaccacatacatacataggaataggataatgatgtccattactctttttatagtttattctctttgtataccttcaccactgatgtatatatatacacatgtatatagctcatcattcttcatctcctaagacattcacaaaaaatgtcattacctaattcactcttctatacatttttcttgatcttattctcaacgattcgaattgctcaaagcatatatttaagtccatcaccggctccaaatccggcttacaatgataacgacaatattgcgccaaccgtcttcgacgtgacttcatttggagccatcggcgattgctcgaccgacgacacgtcagcattcaaaatg

SEQ ID NO: 29646 - DNA, 3003 bp, Unknown
  misc_feature (1)..( 3003): 2750-1469P.txt file - cDNA_ID_3020026; gDNA_ID_2684239; Annot_ID_192511
gatatatttatgcatgtaatattgagattgtgcttatgattgtttatattcttgaaaataaagccaaacaaatcgtgcaacagagtgggaaagggtatttcactacccttgaaaataaacaccatattgatgagctttaaacctaagcacctctaccctacccacttgggccgggcctgattggaaatcttcaaaatacatcttggtcacgataaacaaacatgaaggatcttgcgtctgttttccgagaaccagggttgcctcttttagtgtttccactagatttcttacaccttcttacgaaaaggcatttgtaggtgttttactttctatatcttacgagctatcaggcattgacgtgcttattagtcttgtacaaacccttgacgccatatcttagtaagctggcatagtggcatgtgtcgaacttgctgatatactctatatttaccgctttatcacggtttttaatatcattttttatcgtattttattggtattttccttatgttttgtctatttagagtccaagtgagttttcttccattttagaagttctatagtgtttttgtgtgtcttttcgtgtgttttgtatgtttttgtaagttattccaggacaaaataaaaaaggacatacatttggatactatttctttaaagataataatcatcaaaaaacagtcccagactcggatgaaggtgtacccttgggatttgtttcctcgaaggtccttacgaaagtcaatagaaacttgagttagcttttcagtggaggtcattgtgggttaatccgagctgtggttaaagagttatggccggttaactgaaaatgtatcaatttgatgccagtgtcggtcttgtcatttttcggggaggctttttaaactgttaaattttctatattttgctaattgtgggttataaaaaaaaaaaattcacaatgaaacaaaatgctattttatttttactaaaatgggcttaaattctttcatttatttttaagatactcttaagacactattaatattttagacaaaatgggccacgaaattagaggcccaatacctatatgttatatgtatgtgtcaagggcaggacctgggtgtagagggacattctcacgatccaaagtccatgatcagacccagatctgttatgtgtcgatccggaaacttctctactctaaaagttgatttagatccaacctcttcttttgatatgagctttcatatctggaaggcgtttgtgaaaatagacttgttattaatgctcattgatcatatagacaaacataattagattatttgtgaagttgttagtgtcacggaagtggaattagtcatatttgtgagtttcatgttctggttaaacgtcttacttcattgcatgattgttaaattcattttcatgataataaaactcatagtttaatgcttttatcttattttacttcttgcattttctctatattagtttgaagctcgcatatttagtgttgcaatctttattcctggtgggatcgatttctaaattactataacggttgcgcttgcacttgggtgatttagagatacaaattttataacttgtgttttgaaaccaaaaatatttctacaacatttgctatgtattaggaaacctctatggctctatcgatggtaatttctctcgaggcttgtaaggtcctcgttggatgaaattcacaatgtcacaactatttaatactctccaccttctagtgattaacttttttttttttttttggggcaaaacctgtcatgcaaaattttggttttcgatcgtctatacatgttcctgtgcaaaattttggagcacagttaaaaaaaaaatatactagaatttgatttgcaattttcatctttctaagaataatataattctctatttaagactcgtctttactaattattcactacactttattctgctgttatgttttctttttttgaccatgcagtgcaataaacctgacagttacttctggtaactaaaacatcatcatcgtcctcacatgtgaaccttacacattcccatgatgttctgaataatgtaattgactaattgtaatgcaaggcaagacatctctcctttgtctctctcaccataaaaattaaagaaaacaaataaaaacacttaaaaaacctttcactacctaacacttgataactctatctcttcttcttctcttattaccttccaccagatctcactccccacatttcaaagttttctccctttttgtcgatttccttctcttactcatattaaacccaaaacttaataaattctcttaaattatctattcactggctgggccagagtgtttatttgaatatgttttattacagttttagtgtagttgttgtagttacatgacagctccttacaagcttagatctctccacagttctttcgttatcttccttccacattgacacttgccttaagaagagggccaaagaaaggtctcttgtctctttgtctgagctgttcattttcttgattttcttgcatcttggatttgcttcattacattctttctcctgaaattttatttagtgtttttctcacttctctcaaatttggttctaggatctggaattctttcttcttcaagatttgtaaatgggtgttagttcttcaaagatctaaaatatcaagatcaggtaattaaacattaaattctcatctgctttggtacttactctgtatgtgttgtctgtttatatttattttaagaccaacattattgcttgtgttctttattatgtccttgattttagctacttcagttgtcctctagtgtgttttcctgggaaatttttgtctttctatgagtaaatttcaatgtggataaacttgggaccacaaaacaaattcgagactctatcattaagctcattgcattttcatgtatcaacttggactctgtttatatcaacctgattttggagatttatttgtaaagtttaggaagaaatg

SEQ ID NO: 29647 - DNA, 3003 bp, Unknown
  misc_feature (1)..( 3003): 2750-1469P.txt file - cDNA_ID_3020032; gDNA_ID_2684239; Annot_ID_192509
gaagcatgaagtagctagacaatttatgttggttaatcggttaacaaaaaaattatgttggttaaaataaagatcgacaagacatatctcataatcaaacacaataaaaaaatagggctacttgattctattgtatgaaatcatgtaataacgaagctgcctttaaggtacttcggattaaaaattcatcaaatgattgaattatattggaaaatcatataattcattgaaaagactttcgaatcgaaattgcagacatacaagcttttaacgagtatcttttgcttatactattaaattaagtcgaacaacacgttattgaaaaaaatattatgctatatactaatattatttcctcccaaaaaaaatcatcatcctcttcatcaatcatatcataattagcatgacaatgatccgccgtaagccttccattatatgaagaaggtcggattttgaggtattgattttgattagattcgaatgatgcatgcaattataatatttttggtttatggagcaaaaactttgctttacttttttcactgttcaaaaggattcttataatgaacttcataactatttttctgagggtggaattatggtttctaacataaacctagatggtaatttgtggtgttatccatgttatatatatttgtactttaatattaggagatgataattaattattttggcttttcatttcgaatctcaattccttttgtattggttatgcaagtttgttttgcagctaccatgtaagtaaaaatgtcatacgaactttagtcaaaactacttttaaatttaagtctttgcaatttaactagttgtgtatataggaaaaaaaaacactacttaattgatactgtaaactgttttaataattgaagatatcaaaatattagtggatgttatattggccattttttttttatatccgcaaagtttggaaccaaactccgtagattttcataaaccaaagtgagtgaattcaccgcttcacaaatgaaacttaaactagagggctctaggatgaccctagtttatttgctactagaccgagcaacacttgatattgaactaaacttgataaaacagagattttgatacactcaacatatacttttatgttgagtgtatcaaaatctctgttttaagttggtgaagcgtgtacccgacagtttcatgtccacatagctcaacattgttgtatttattgatttatgtgggcgtttcaataatctgtgtaaatccaagatatcattgtcgtaaaaaaaggcgagggtcagatttgtatagcgacactccccgtgaaacagttgtgcaattttacatgtttacatagaattccaagtatttaaagaccaaccctttggccgatatatgtataattgtacataactaaattctataaaacgtagacgataaaatcataatgtggattttatgcatgtcgttaaatggtatggtgttatttaacttgttcatatatgtttttttattaacgagtttacttgataaatgttattcacttatttcacgtaatattacggttattatacaagtttaacaatcacatggaaatatgtactatttacgattttttcatcgcattttttgtcaaacaaaaaggtagaattaagttataaaaaagccctacatatcaaaaagttatattgctgaagacgaacgaatagttgccatgcttaacatgcattgcattggaatggtcaaatagagatgctatgaatatatgagctgtcctctcaagtcaattgttcaataactcgttatattatatgtaatttataagctaatcatcactgtccttttcgtttgtctttgtcataagattgacagaaccaataaaatctgaggacgattaaattaatatataaagaaactagagatttaatattttgaactgaataaaagttatatagattacatgaaggatcgttgtcattatcactaccacaaaactttaacatcattcaccgacaaatggaaaacattaagctgttcacttaattaacacgcatctcatatattatttccctcgtatatattaaactttatagatgagatttaatttctttcaactacctatgcaaaatttattttatttgatgttttgtgacaattatattaatctttgataattagttttggttaaacttttttttttattatccatttttgtcaaccacgtaattaaattaaaaaaatatatcttaatagattatctaatatgaaagaaccgagtttacgaaatttcatttttaaattagttttgactaatgggtctctaagttattacacccgactaaatatgtggagtcgataagtgatagcaagttagatttacttgttctaagctaaactaacaaatatagataagttaagtagattaaaacttacataattgaatatttacatgtttggaaaaaaaacttgagtaaaagaaaaaaaacttgataaaaatcactaaaaattatgtttacacttgagttaaaagcaaacattttatctacataagatgatactaatacaaactaatggcctatatatatttgtaatccatgaaatttaattttatttttgtaacagacattatgattgtaacattttaatttctttgcccaaaaacaaaacattttatttttaagttattcgacttcttatttgtgttcatcccatttttttgtttccaaccgatgaacaacggaaggttgcgtcaaaacgcaaagggttgtgttgtttgtgttgaagtggagctccttcattttaggaacaagcagaggacgttacacaatcaaactcagtttcttcccttatttaacgtaaccactaattctattttcttgttcttttacaaagttcataaatggaaatgaacacgtaagaagaaataaaacaaagttcaaaactaagaaacagaaaaacaaaaaaaaacataaaaaaacatataaaaaaaacataaaattacagaagaaaaaaatg

SEQ ID NO: 29648 - DNA, 3003 bp, Unknown; identical to SEQ ID NO: 27320
  misc_feature (1)..( 3003): 2750-1469P.txt file - cDNA_ID_3020087; gDNA_ID_2684240; Annot_ID_192561

SEQ ID NO: 29649 - DNA, 3003 bp, Unknown; identical to SEQ ID NO: 27321
  misc_feature (1)..( 3003): 2750-1469P.txt file - cDNA_ID_3020091; gDNA_ID_2684240; Annot_ID_192560

SEQ ID NO: 29650 - DNA, 3000 bp, Unknown; identical to SEQ ID NO: 14998
  misc_feature (1)..( 3000): 2750-1469P.txt file - cDNA_ID_3020099; gDNA_ID_2684240; Annot_ID_192558

SEQ ID NO: 29651 - DNA, 3003 bp, Unknown; identical to SEQ ID NO: 27328
  misc_feature (1)..( 3003): 2750-1469P.txt file - cDNA_ID_3020148; gDNA_ID_2684254; Annot_ID_193079

SEQ ID NO: 29652 - DNA, 3000 bp, Unknown; identical to SEQ ID NO: 15022
  misc_feature (1)..( 3000): 2750-1469P.txt file - cDNA_ID_3020164; gDNA_ID_2684254; Annot_ID_193070

SEQ ID NO: 29653 - DNA, 2931 bp, Unknown
  misc_feature (1)..( 2931): 2750-1469P.txt file - cDNA_ID_3020164; gDNA_ID_1972137; Annot_ID_179138
aagcttttctctacacatcttcttttgtattgtcaaggaattcgtacgttacaatataaaaatcgcagcttctttcttacaaaagagttcaaattatatctgaaattattgtgaaccgtgtttttgccattgctggttttggtcatgacattctaatagagtcagatagagaaagtagcatccatcaaaattttcaaatacagtatatatatatatatatacacacacatttttctcataaataaaaacctaaaaatatacacataaatacgcacacgtgcatgtatatttgagtgtatacatgtcaatttccaatgtcgtatattagacttccatctaaataaactactaataaaaatttggtaaagaggaatatttaaggtaaaaacaagaattattaaaaacacaaaattaacttagagcttttataatgaaatgaaagtgctaggaaagcaaaagggctttttgattgcaagcttgagactaaggtcatgatgatacggccagcctttcttgagtctttggtcggtccgacaatctgtgtgttttgtgttcactctctgtttttctttcatttttttcttatagtttatttacttatatttcggttatagtgtttctcaagctctagctcatatatcctataactataaggggatgtgatttaaagcaaattttggaccaatcactatgaaataaaatattactaattttgatattttatttccctgatagctacactccttagttgagctttccgtaagttgaaagcaaagacgacttgcagagcaactttccaagttgcaaaccacacatccatctatagagacatatcatataaacaaatttatttaggaaaaatcctagaaattgtcaaggtttactcattagatgatactctaaattacacccataatatattggcttgctaagttgcaaactatccatacatttatccatatacatcgtaagaataatttatataggaagacctagaagttgtaaaatgtgtatgaataaattccaaatgaagacctagagcttgtaaaatataaattttaaatctagatatatatatatatataaaatccataatataaaccttttgtaaattatgttataagttataacaattgtaactttaagacgagtttactattagcacttgacactagtattttgcaagcatttaattttatgttaaattttgtttatttataggtgacaatatgggtaatccagtccaatttgatccataatgtttatggggtgaatgttaactaggtgaacgaagaacgtaagccatttagtaaataggttgaccatataaaatgttctagtttctggtatgaggggaggtaaatgcctattaatctatctaatttgatgggtcgaaaatcaaaatgataaaatagttctacccataaaatatttttgtaataatttatcacatattttcataattaatagttattacaatcggtatcatatgtgatacgttcattgtcttcacatcatcatcgcattatcatttttatcatcatcataacataacgatcatcatttcataccatctccattatcatcataattttgaaatcacctttatggcacaaaattttggaatcgtgcttttgcaaaacaaaacaaaaatatagttttctctgcaaaaatcatgtttttacgaaacattgaatatagcggaaaattgtggatttgtgtttttagcaataattattatgaaatacttttagctggaagttgcgaaattacataattcacgattcattgaaattcagtttttgaccaaaaaaaacaaattgtgaaattatatgatcatgatgatgataatggggtatgatggtgatgatatgataatattatgatatcatgaatataataagaaacgaatatcatttacttttttttttagtttttaacaaaatgtgggtaaatattggtgaatcataaatcttttacaatctaactcatttagcccattaattccttatggtcagaactcatttgccttatcaatataatagggtcataatatttagttatgaggatttgaattcggatgatgacataaggaaacattagtatcaattattagattacatgaatttggttaatatttgttaattagtatcatggttttatatcaacgagaaaacaattgaccaaaaaaaaaagataaccaaatcactatcctacacaatgttatgtgctctcccataactagttagtggtctaatagaagacaaataatcaattttttgttgatacctacaaatttgtaacgtatattatgtggtctctaatacctagtttagtgctatagcgtagattttatttatataaatcaattaaatctgtatagtgccgactcatatattttcgatgctctgaaacaaatttaaaagatatgtattatgtgtcattttgtatatataaattctttttgtgtctttttatatatacaaattatttttctgtgtatggatatttggcgatcgcattgcttgtccatatacttattagaaatagaaatagaaatagaccgtgaagtactaaatgcgtaaattaaaagatagataatctaaagaatcttaaacccattacctttttttttttacctttttaataattccaccacaacacaaaacacaagttgcaaactccacatatcctgcaaaccattggtaacaaacaaacgcatgagtttcctatatatgtctgcgtctacaacatttgaaagcaaacttttgtctctttttaactctcttaactttcgtttcttctcctaccttcttttaccaacctttcctttctcttacacacatatatatatacatatatagagagagagaagaggacaaagagttgaaagatgaagactctcatgtcttcatagaaacaagtgatatg

SEQ ID NO: 29654 - DNA, 3003 bp, Unknown
  misc_feature (1)..( 3003): 2750-1469P.txt file - cDNA_ID_3020180; gDNA_ID_1972137; Annot_ID_179148
cacttaaataagtgatagtcttaatactagtttttagactagtcattggagaacagatgattgatgtcttagggccggagaaacgcagacggcgtaccacacaggaaaagatcgcaattgttcagcagagctttgaaccggggatgacggtctccctcgttgcccggcaacatggtgtagcagccagccagttatttctctggcgtaagcaataccaggaaggaagtcttactgctgtcgccgccggagaacaggttgttcctgcctctgaacttgctgccgccatgaagcagattaaagaactccagcgcctgctcggcaagaaaacgatggaaaatgaactcctcaaagaagccgttgaatatggacgggcaaaaaagtggatagcgcacgcgcccttattgcccggggatggggagtaagcttagtcagccgttgtctccgggtgtcgcgtgcgcagttgcacgtcattctcagacgaaccgatgactggatggatggccgccgcagtcgtcacactgatgatacggatgtgcttctccgtatacaccatgttatcggagagctgccaacgtatggttatcgtcgggtatgggcgctgcttcgcagacaggcagaacttgatggtatgcctgcgatcaatgccaaacgtgtttaccggatcatgcgccagaatgcgctgttgcttgagcgaaaacctgctgtaccgccatcgaaacgggcacatacaggcagagtggccgtgaaagaaagcaatcagcgatggtgctctgacgggttcgagttctgctgtgataacggagagagactgcgtgtcacgttcgcgctggactgctgtgatcgtgaggcactgcactgggcggtcactaccggcggcttcaacagtgaaacagtacaggacgtcatgctgggagcggtggaacgccgcttcggcaacgatcttccgtcgtctccagtggagtggctgacggataatggttcatgctaccgggctaatgaaacacgccagttcgcccggatgttgggacttgaaccgaagaacacggcggtgcggagtccggagagtaacggaatagcagagagcttcgtgaaaacgataaagcgtgactacatcagtatcatgcccaaaccagacgggttaacggcagcaaagaaccttgcagaggcgttcgagcattataacgaatggcatccgcatagtgcgctgggttatcgctcgccacgggaatatctgcggcagcgggcttgtaatgggttaagtgataacagatgtctggaaatataggggcaaatccaataccttcacatgattcttttttctaaaagaacaaatttcaatcattcaagatatgtcattatcaactttcacaaaactttcataaattactatttcacaacaggaaaagagttagagaggatcttaacctgtttgtaatattcttctccacctttcaacgcagtgagaaccatgtagcttctttcacaacagtatatagaaatgtatctatcaaacaaacgaagagtcttagaaagtcaaagctggtaatttgtatcaataatacagttaagtgttcgaaaatgaccgaaaagttttagattattgaggcataatgaattgggagcagaaaacaacaaagagttttagctggcagcttgctaggagaggaccgcactcacgtagatgtgattctcaagtcactttccacattgtaatctcaaatccaccatgcacgtgcagaagcaataaacaggtaggtgataatgaaataagggtcgtccaatctaattctatgacccacaaaatgtgagagaatgtgactcagtaaatgcacaacacattggaccttgtctaccaatttcaaattccaggaagaccgaagaaacaaacgagtaaagacgaagaaacaaacgagttaaggcaaaaaaacaaacagttctgtgaaactattagctgcacatgctcaattgataatcgaaaacgaaatccaagggaaagattaagacgagtagcaatgctttcttgaaaacaaaaaaaacaacgatcactagtaaatctctcatattgtgtgaaaacaataccattaaaaagcaacactaaccttaaacctttcatcaaaaaatctgcatcttcgagaaactggtacaatcaattaacgaaactagaattccataatcataagagaagagttataaagcttaatcagtttattaaagtaaaagctgacataattacattagattcaggtaacgaggttaaagacagaaaactctaaattccacttgttaaaactaactgaagaacctagagatacaattctaaaaacttcaagaaagtttatcgaattaccaaacaatcctgaaacctaaaagaggaagaaagtggcagcagaatttaaccccttgttgtttctcctcattattcaaagttcaaactctctcttgtagaagaccaatggacttgttcatactctggagttaaagctcttgttccagtttggaatccagagctcaagctagctgaacctgaaaccacaaaacagattatctcaacaactattgatctaaaatgtttgaactgaaaactaaattaacctgaaaacaactcagtatgccaaactaacaatatcattaatcaactccctaaatacaataccacgtcaccctatctaccaaagacaaattctcattccattgcatgataccaaatttgtttttttttttttttttgaacaacaagcatgataccaaatttaacactgaaagcaatacgaaagaaagaactcatatttgatagaaagtgtttaccaatgcgcagactccagataatgttacgccggtggtgcaatgacttactcgatcatcgactgaatctgaatttggtattcatctccgtcgggtttccgcggcgggacacggcgtagatcgatgtaggggattggtctcgagaaatcggtgactaggcaaatagtgttatgggcttagtttgggctttaataaatgatg

SEQ ID NO: 29655 - DNA, 3000 bp, Unknown
  misc_feature (1)..( 3000): 2750-1469P.txt file - cDNA_ID_3020207; gDNA_ID_2684255; Annot_ID_193103
acatcctaaactctttattgatgtattttaagagattcgatcacaaaacattgcatcatatccaatgattttcgaaagttattcggcaacatttttttttctcggacatccggccgtcctggtcgacgaatcctcggacccggtcgatgaagtctcggacctggtcgacgatttcaacccctggtcgaccattcctcgaacccgatagattttcatcgcccattcatcgtcctggtcgagggatccgccgtcctggtcgacgaattctcggtcccggtcgacgatttcaactcctggtcgacaaatcctcgaccactcctcggcctggtcgacgaattctcggacccggtcgacgatttcaacttctggtcgaccattcctcgaacccgatagattttcatcgcccattcatcgtcctggtcgagggttccgccgtcctggtcgacgaattctcggacccggtcgacgatttcaactcctggtcgacaaatcctcgaccactcctcgtcctggtcgacgaattctcggacccggtcgacgattccaacttctggtcgaccattcctctatcccgatagattttcatcgcccattcatcgtcctggtcgagcattccgccgtcctggtcgacgaattctcggtcccggtcgacgatttcaactcctggtcgacaaatcctcgaccactcctcggacacggtcgatgaagtctcggacctggtcgacgatttcaacccctggtcgaccattcctcgaacccgatagattttcatcgaccattcatcgtcctggtcgacgaatcctcggacccggtcgatgaagtctcggacctggtcgacgatttcaacccctggtcgacaaatcctcggacccggtcgacgattcctcgtcctggtcgacaaaccctcgaccactcctcggacacggtcgatgaagtctcggacctggtcgacgatttcaacccctggtcgaccattcctcgaacccgatagattttcatcgaccattcatcgtcctggtcgacgattcctcggacccggtcgatgaagtctcggacctggtcgacgatttcaacccctggtcgacaaatcctcggacccggtcgacgattcctcgtcctggtcgacaaaccctcggacccggtaaacttttctcgacgattccaagtccagatcgacgattcctcggacccgattgagaaaacaactctatggagttttttttttttttttttttttttttttttctttttcttattcttattcttattacttattcttattcttattcgcgcgcgcgcgtgcgggcaaaattcccgctacacacacccacccctatatagctttatagcccttttccctcttggcaccaacatacattgaaatgtctgaggagacaccggttccaaaaaaaaatcaaatacttggacccggtcgatgaagtctcggacctggtcgacgaatcctcggacccggtcgatgaagtctcggacctggtcgacgatttcaacccctggtcgacaaatcctcggacccggtcgacgattcctcgtcctggtcgacgattcctcggacccgatagatttttctcgacgatttccactcctggtcgacaaatcctcggacccggtcgatgaagtctcggacctggtcgacgatttcaacccctggtcgacaaatcctcggaccctgtcgacgattcctcgtcctggtcgacgattcctcggacccgatagatttttctcgacgatttccactcctggtcgacaaatcctcggacccggtaaacttttctcgacgattccaagtccggatcgacgattcctcggaaccgatttttttccctcgacgatttcaagtcctggtggaggaatcctggacgattacttgctagttcttagcttttacaactttcttagcttgagaactatctcacacttctatctccccaagcattctcttttgtttctttttgaacaagtctgtctcttgacttactcttctcactatgcaccttcgtgagtgtaaccccaagcattctcttctgtttctttttgaacaagtctatctcttgacttactcttctcactatgcaccttcgtgagtgtaaccccaagcattctcttstgtttctttttgaacaagtctatctcttgacttactcttctcactatgcaccttcgtgagcgtctccccaagctttctcttccgtttctttttggacaagtctatctcttgacttactcttctcactatgcaccttcgtggtgggcgttttggacaagtctgtctcttcacttattattctcactatgcacctttgcgagcgttgcgggttttcaaaacacttggcgaggtccggaatcttaccaagtaataacatttaacctcgagagacgagctcgtgtaaagttgggaattcgttaaggagctgttgctttgttagtgtagaaacacttgtgtagaattggggattgttttttttggagtgatttaggggagggtcgaatcttagcgacaaagggctgaatctcagtggatcgtggcagcaaggccactctgccacttacaataccccgtcgcgtatttaagtcgtctgcaaaggattctacccgccgctcggtggtaattataattcaaggcggtccgaacgacgcttccgccgaacggacttagccaacgacacgtgcctttgggagcctaagctcctactgagggtcggcaatcgggcggcgggcgcatgcgtcgcttctagcccggattctgacttagaggcgttcagtcataatccagcgcacggtagcttcgcgccactggcttttcaaccaagcgcgatgaccaattgtgcgaatcaacggttcctctcgtactaggttgaattactatcgcgacgcgggcatcagtagggtaaaactaacctgtctcacgacggtctaaacccagctcacgttccctattggtgggtgaacaatccaacacttggtgaattctgcttcacaatg

SEQ ID NO: 29656 - DNA, 3000 bp, Unknown
  misc_feature (1)..( 3000): 2750-1469P.txt file - cDNA_ID_3020211; gDNA_ID_2684255; Annot_ID_193102
acgcttctccagactacaattcgaacgccgaagacgtccgattttcaagctgggctcttcccggttcgctcgccgttactaagggaatccttgttagtttcttttcctccgcttattgatatgcttaaactcagcgggtaatcccgcctgacctggggtcgctatatggactttgggtcatctacagctttcggacaagagcgaccgataaaatgtaatggatcaagttcaccaccgcatgtcggtacgctccaggcgtccttggctcggatttaggccaaccgcgtgcggtaacacacgggagaccagcttccgtcccgcatcagcaaaggatggtgagggacgacgatttgtgacacccaggcagacgtgccctcggccagaaggcttggggcgcaacttgcgttcaaagactcgatggttcacgggattctgcaattcacaccaagtatcgcatttcgctacgttcttcatcgatgcgagagccgagatatccgttgccgagagtcgttttagacttcagttcgcggcacagcatccgcccacactccgtctccggggaggcgaatgccagccgttcgtttgcatgttccttgacacttttcgtgccggggttttgtgatatccggaagcaacgcgcacgacaagaccgagataaaagctcccgatcatgccgatacgcgaaaccacggatccggcgggcaaggaatcggctaagaaaccggcccaccgagagtggtgatctttggttcgcgggtcgttctgttttggacaggtatcgacaatgatccttccgcaggttcacctacggaaaccttgttacgacttctccttcctctaaatgataaggtttagtggacttctcgcgacgtcgcgggcggcgaaccacccacgtcgccgcgatccgaacacttcaccggatcattcaatcggtaggagcgacgggcggtgtgtacaaagggcagggacgtagtcaacgcgagctgatgactcgcgcttactaggaattcctcgttgaagaccaacaattgcaatgatctatccccatcacgatgaaatttcaaagattacccgggcctgtcggccaaggtgtgaactcgttgaatacatcagtgtagcgcgcgtgcggcccagaacatctaagggcatcacagacctgttattgcctcaaacttccttggcctaaacggccatagtccctctaagaagccggccgtgaagggatgcctccacgtagctagttagcaggctgaggtctcgttcgttaacggaattaaccagacaaatcgctccaccaactaagaacggccatgcaccaccacccatagaatcaagaaagagctctcagtctgtcaatccttactatgtctggacctggtaagtttccccgtgttgagtcaaattaagccgcaggctccactcctggtggtgcccttccgtcaattcctttaagtttcagccttgcgaccatactccccccggaacccaaaaactttgatttctcataaggtgccagcggagtcctataagcaacatccgctgatccctggtcggcatcgtttatggttgagactaggacggtatctgatcgtcttcgagcccccaactttcgttcttgattaatgaaaacatccttggcaaatgctttcgcagttgttcgtctttcataaatccaagaatttcacctctgactatgaaatacgaatgcccccgactgtccctgttaatcattactccgatcccgaaggccaacacaataggatcgaaatcctatgatgttatcccatgctaatgtatccagagcgtaggcttgctttgagcactctaatttcttcaaagtaacagcgccggaggcacgacccggccaattaagaccaggagcgtatcgccgaccgaagggacaagccgaccaatgcacaccaaaggcggaccggccgacccatcccaaggttcaactacgagctttttaactgcaacaacttaaatatacgctattggagctggaattaccgcggctgctggcaccagacttgccctccaatggatcctcgttaagggatttagattgtactcattccaattaccagactcgaaagagcccggtattgttatttattgtcactacctccccgtgtcaggattgggtaatttgcgcgcctgctgccttccttggatgtggtagccgtttctcaggctccctctccggaatcgaaccctaattctccgtcacccgttaccaccatggtaggccactatcctaccatcgaaagttgatagggcagaaatttgaatgatgcgtcgccagcacagaggccatgcgatccgtcgagttatcatgaatcatcagagcaacgggcagagcccgcgtcgaccttttatctaataaatgcgtcccttccataagtcggggtttgttgcacgtattagctctagaattactacggttatccgagtagtagttaccatcaaacaaactataactgatttaatgagccattcgcagtttcacagtctgaattcgttcatacttacacatgcatggcttaatctttgagacaagcatatgactactggcaggatcaaccaggtagcattcatcgatcacggcaattccccgccacatcctctcaaacgcaatggaaagagagaaaggacgaggtcttgaccgtcatcttttgcccgaaggacggatgagctttggcgggactgaatcacttcgagtcaccgtcgacaacttttccgcatccgagatatcaacccgcaactcattcaccaatgcgagcaaggcaacaaatgcgatgacgagaggtgaacaagcgccgatgtttgtgcccacgacttccccacgaaggagaagccgcgggcatgggtgtaaaccgaactcaacaattccttcaaattaggtacgaaacacaggccccggaactcatcatcgagcgtaacatcgcccgtgaattaactgagaaggataggtggtaggtagttcgatgcgcgagcatg

SEQ ID NO: 29657 - DNA, 3000 bp, Unknown
  misc_feature (1)..( 3000): 2750-1469P.txt file - cDNA_ID_3020285; gDNA_ID_2214666; Annot_ID_189007
ccgaaaaaggtgtacggaggagacggtggttcgtactttgcatggtgccctgaagagttgccaatgctccgagatggtaacattggagcctctaagctcgctcttgagaagtatggcttggctcttcctcgctactctgactcccccaaggtcgcttatgttcttcaaggttcgtgctttacaatcttccttttgatcacgtcactctctttttaatgttttaaccaaattttttctagatcatgagttttgtttgttctctgtccataaaatatttttgttcagatctgatcaatcataaatcagttgcttatatatatatatatatatatatatatatatatatatatatttttgtatctacgatgtgttagttgtttttttttttgcttgcattaagccgcgatttggaaaacaacaattatatgatttggtaattatagtatactgtaaataacgtaagagtacccacaatctaggaaaattagtttattacgatccaaaataatttaattagggttaatatttcatatattgattagtcctttttgtgaaatatgatatgatttgtagattattatattgtgatttagccaataaatatagagttaaatgatccataaaattttcttgttaccatttttaggagctggaacagctggaatcgtgctccctgagaaggaggagaaagtgatagcaatcaagaaaggagactccatagctttaccttttggtgtagtgacatggtggttcaacaatgaggacactgagctagtcgttctcttccttggtgagactcacaagggtcacaaagctggacagttcaccgacttttacctaaccggatccaatggaatcttcaccggtttctctactgagtttgttggcagagcttgggatctcgatgagaccaccgtgaagaagcttgtcggatctcagacaggtaacggtatcgtgaaggttgatgcgagcttgaagatgcctgaaccaaagaaaggtgaccgaaaagggtttgttttgaactgtttggaggctcctcttgatgttgacattaaggatggaggaagagttgttgtgttgaacacaaagaatcttcctttggttggtgaagttggatttggagctgatcttgtgagaatcgatggacactctatgtgttctcctggattctcttgtgactcggctcttcaagttacttacattgttggtggaagtggtcgtgttcagattgttggtgctgatgggaagagagttcttgagactcatgtgaaagctggtgttttgttcattgttcctaggttctttgttgtctccaagattgctgattctgatggcttgtcttggttctccattgtgaccactcctgagtaagattttattcatctttttcgattgattaaagaacattttggttgtttttacttacatatttttatgggtttttggcagtccaatattcactcatttggccgggaggacttcggtgtggaaggctttgtcgccggaggttttgcaggcagcgttcaaggtggatcccgaggttgagaaggctttccgatctaagaggacctctgatgccattttcttctctccttccaactagataatgaaagaagaagaagagttatggtgtagttgttttatggtttaagcaagtattatgttttttttttcctttggtgtttttggtttgggttttatggaccggtgttttcttctcttttgttatgtgtgcttcaaaataaataagaaatgaaaaaaatatttcttctaaatttattgagaatccatacgattaaaacaaatatttctcttacttctcataagtttataaaatcaagttaaaatctactaattaaataattataccaagtctaatataaaatttacttgcgcatattttattacagaaaacaatatacaaacagattattcaatatattgaaattcttgttaaattcatttttactgaaaattaagttcaactaaaataattttattatctattaaatcataattttaatatttaaatttaaaatttcaaacgtaattaaatccgcgaaatatgcaagtattatgaagttgtttgataaaaagcaaaaaaatgtaatttatttctaaattaatagaagtagtttagtcaaatctaagctataaacacggaacacgtaacagtcagtcgttaatcttttctatccactttaaaatttttataagacaataaatttaattcacacaggattcggttacggtttggttgattggttttcggtgaaagaaatttgtctaaaccaggactcggtatagtggaaatgtaagaaccggaaaatttactttactcttctctcactcacaatgctttgccagattccacaattcaatgccgtcgtctgctctaaagtttgtggctttcatcacgaatttaaccgatcaatggaggtgggattgtgtaagtcttgggtattataatcaaaggacttggtttggtaatggagattggagaaggtgttcacaagacgttcgatgaaatgcgtgagagaggaaaaatgcaaccaacgatcgtgatttacaattagccttattggatttttatgccgagacgataatctctgtcaatcagcgacctttttcatggtaagatcagatcattacttattatgcattctcgtttagtttatattagcagatagatggaaaagctttaagctttgggttatttaacattacagcttagcaattttgaggaactaatattcaaatattgtggagaagttatgattttttctcttcttttatatgattcttctccaaaaccaaaccactagataatgtgaaaaaagtgaccacctgctccatttcatcaactccatcttcttgtattaactatctcatttcatgtatgtatatatactctttgagaatttgattctatcatcacaatcatttacttcaaacaacaatctttgcttctctctgagtgatcatctttcttgttcaatg

SEQ ID NO: 29658 - DNA, 3000 bp, Unknown; identical to SEQ ID NO: 13902
  misc_feature (1)..( 3000): 2750-1469P.txt file - cDNA_ID_3020310; gDNA_ID_2214666; Annot_ID_188998

SEQ ID NO: 29659 - DNA, 3003 bp, Unknown
  misc_feature (1)..( 3003): 2750-1469P.txt file - cDNA_ID_3020339; gDNA_ID_2214667; Annot_ID_189042
gtaactattcatagcccggtggtgggtgatgcaaacatgtattaatgttttagcattccagttttgaatagttgcatctattttcaatatcattttataaatattatattgtctaaaatccatttatgattgatatgatatcccttatttaactcctttgattaaaacgttatacatatcttatcaactttagatattgacttttccatattaaatatttgatttccatatatttgattgtgttattattatttttactaaaaacgttgcaatataatttttctttttataagattccatatatctaaatctttgtgttattattatctaaatctttttataagatttgcatatatttgattgtgttattattatttttactaaaaacgttgcaagataatttttctttttataagattcttttctctaaatctttgtggtatctaaaaaaaaaaaaaaaaaaaaaaattgttcatggttttgccctaattttgcacgaaattattttacccaaatcttgcacgaattcatattaccctaaataaaagttttgtcaagatatatgtaaaatccagattttgcacaaaatagttttattctgattggttttacaatattgcattaaaattgtattagtatataatacttgattattttatgaaataaattgattgataaataacttaatttaaaggtataatcacttatagaaattttcatgaatgactagtttaatgtatcttaagaagatatcatatttttgatggtcaaagttttttcaagagcttaaattatcaccagaagttgagaaaataaatataaaaaaaaaataaaaaaaaattctaacgatgaaataatctagtatatcaagtagtataaaatcttattaaaagactctagaagagcatatacattgttttctatgggaatacaaaattaaaatcatcgatgcggtatagttctccaaatctcaaagttaatatgatgagatataaatacattatgattctagagtggaatttaatacgagatggatgaacttgaagtttcatcatctcgagaaggagaagtaatgaatggataataagtgacatatccagaagattatgttcaatctttgactactaaagatctaaaagttgtataaagcaattcttatatgaatgtgttattagataaaataaattataattagttattactaaaacttcaagacttgaagtctctttttgaatataactcacattgttaagagaatatttctgatgcgcagatggtaaaacagaagattaaacttttacgcaagtatcgttgtcctgtagacacaatatttgaaagaaatttaagaactattatgaacttaaatcgagtgtttttcaaaggctaaaaaaaatatatgagttattgatgataagtaatactcatattctgaagtgaatataagatcttacatagctagtcaaattaaatttaatatcgtttatattagaatctaaaattttaattattatctcgttattgttttattaacatatgattgattattaaaatacatggaagtaattttgattataagatctcattaagggagtaactgataagcaatgaaaagtaaattagaagttttgaaagaactagaagtttcaaaagaattaaaagtttcaagagtatatttggcttaaccggattggtcatcctggtttaatgatgatgtgaaagtattgagaatgctccagaatataatgagtgtcctgtaaggaccaatttcaaactgctatcgagtcttaagatcgcatgaagcgtaatagaccttggttccaaatataaatattctcgtaaaagtgaaggagcacaaaattaaaaatgaccaaattgaggaaataaatattttgatgatctcttgaagagagtgaatgatctctaaaagagacataaacatgacaaatgaaacattcaagtacttgacaatgaagagatctagctagctatgtcatgtcaaaatataatggaatcaaaagcaaatcgacgtcgtaatatatttgcatgctatgagcagttgatattatagacaaaaaggaggatcatgaaagaaagtctattgaaaagtgtacacaaagtaatgattagccaaaaaatggaaaagaagaaatggacatataattataatttctaatagagatatttggactagtagtctatgcacatgatgtgtaaaaccagtggaaaataaatgagtctttatgtgaaagaatagtgaaattcatgagattttcacaaagataagaaatgtattatgaagagatatattctcttgtggtggatgtaatattttttaagtatctaaagtctggcaataagagacggaacactggatatgacatttatatgaaattcttgaaagatataatttctgaaggattaattatatgagaattatgttctctagaactctactcgatcgaataaaaaaaaaaaaaaaaaaaaaatatgtaacatgacatataatcatataaatgtatatttatgttgagtttgtcaaaatctattgatcaaactaatatttgttttgaaaatcattaaaactcctacagagttatcataagtaattcgatgacaataatctatgataaaatatcactagataatgatatttataagtctatatgaaaaccatataattttgatcattaagattatggttattaattccaacgagatattgtatttgattgaaaatcatctcctgaagaagatgtttccgagggggagattgaatgatatgcgtggatgtaccctttttccttatgatagtttttatcccacatgatttttctatgacaaggtttttaacgagacattaaagaacacgcaaataatacacttgatgaatattaggaaattctatcaatcatccaatgaatattatacactaatgatatttagagaaataaataagatggtcaagatgaatcatctaaaagattcatgagcagcagaagaatg

SEQ ID NO: 29660 - DNA, 3000 bp, Unknown; identical to SEQ ID NO: 13906
  misc_feature (1)..( 3000): 2750-1469P.txt file - cDNA_ID_3020341; gDNA_ID_2214667; Annot_ID_189041

SEQ ID NO: 29661 - DNA, 3000 bp, Unknown; identical to SEQ ID NO: 13905
  misc_feature (1)..( 3000): 2750-1469P.txt file - cDNA_ID_3020353; gDNA_ID_2214667; Annot_ID_189036

SEQ ID NO: 29662 - DNA, 3003 bp, Unknown
  misc_feature (1)..( 3003): 2750-1469P.txt file - cDNA_ID_3020384; gDNA_ID_2214667; Annot_ID_189025
gcgttcatgaaaaagttattaaagacatattatagcatttttctcgtgataagaatgtccattgtagtgtaaaagacataaaaaataacataatacacataaagacactaagacttctaaaattcaaaagactcacttggacactaaatgcaacaaaactcacaacgaaaaatactatgacaaaaatcatatcttttatatattcaaattcattattatattttccaaaatattgaaacaaacgagatcctatgtagaatgggataacgcaacaaacatcaaattacgttttttaaccataattaatattcataaatacttcttaatcattaatacaaatatttttattaatatcataattaaacataatatatcatgttttcggttaatcctctaaatttgctatgattagtttctatgaattgatgaatttctctgcgtatcaacatgtctcactctctagatatcaacgattttaacattggatgaattattgtcaaatttattaattcgattgcaaaattacattgaaatatgatataataaattaaatatataaaattacaaaataaacttattaaataaaatatattataattataatttatgatataaattaacaaactaaaatttctacacatatttctccacgatgtagagtgtgggttcttatttaatgatcacttataaaggaaaacgaatgagggacaagtcagtacttaattactttagttagttatattttaaacaatagacatgtcgaatcttttaagttaaatgcatataatggatcgaacttggcgctcaaacgtatccaatcttttaattaaagtttagccgcatcactctctctctctctctataagttcattctagggaagggaagcatccaaacttggttgcgacaagacaaatgctaaggatagatttaaactaaaagatatgaaaattttgtattaaacattgtatttttttttactgcgtattaaacattgtataaatatttttttttaatataatttaccataaattaaaataaaaaagggtttacgtgtataaatctaggttacaaaaataaacaactcaagttaactattattgggtttaaattatataaaaaaaccaaaattttaaaaaccttctcgcagtttctgctctcacttccaatgaacaagttatatataaaacactaacaatatttttgttatgactaaactctttccatttctttgtccatgttccaccactataaattacgaattatagcatcgcattttttcttcttattctatgctcttataatccataggacccacttctacatgattctcctacaaccccattataaaacccttggtccacttcctcctcttacttcaaaactaacttcccaattcttcacacaaaataaaaacacagaaactcttacatactcatataaaccaaactaaaaccatgattccggcagaaatcaacggatatttccaatatctatcaccggaatacaacgtaataaacatgccttcatctccaacctcttccttaaactacctaaacgatttgatcatcaacaacaacaactattcctcatcatccaacagtcaagatctcatgataagcaacaactcaacttccgacgaagatcatcatcaaagcatcatggtactcgacgagaggaaacagagaaggatgctttcgaacagagaatctgcaaggaggtcaaggatgaggaaacagagacatcttgatgaactctggtctcaggtaataaggcttcgcaacgagaacaactgtcttatcgataagctgaaccgcgtatcggagactcaaaattgtgtattgaaggagaactctaaactcaaagaagaagcttctgatctccgacagcttgtttgtgaactgaaatctaacaagaacaacaacaatagttttccaagagagtttgaagataattagtattactcaaagtgtccaactttatcagacaaaacgtaatctattaacacaatcaaaagcagaaaattttggtttttataccttggagagtgttctgttctatacagtgactttgaatccgttcttcaatatattcattgacatggactttcccatgattcccaaacccatagaaaaccctacttccattttatctatcttctgcgattatagacttatagtgcttactgcttagtgataatggtctaaaataatgagacatttctaatcagggagccattatcatcaaatacttacttgaaaaggaagtatttacagtttactccctaaactttgattctttttgcatctctaactggcagtttaagaacgaacaagatttcgccacgtgattgaaatttggctaaaactccagtgtcatttggaatcttattttactccagtcgggcacgttagaagttctcaatcaaatttatttgcggagtactaatctgaatttacaaaatattattcattttatctgatagtttatgaaatgtcaatttagtccatgcttctaatctattgacaattttttttccttcttctatatatatattttttttttttggttctgggccgaaatccgtaatattagttttgcctagagtctttaccaattaagctaacgacacttaactctttctttcttctattcttgtgcttctacaatgggaagatcaacgtaaacatattattactaaagtttacatacgatagtaaacataactataatgggaagtgcaagtgtttttaattttatttgtaggtataaaaatatgctatatctcttttttgtgtgtgtggttggcaaatcttaggctcagcctttttcacatttgtctcttgttttatttcctcttcttttttcctttgcttttggtccactaaaaaacattagtcttgagtttgaggcaaaaaatggagaaaaactgagaattttgagaacaacgaatcttgtaatcgttgaagaagctcaattacagtttctgtttcttcctaattatg

SEQ ID NO: 29663 - DNA, 3000 bp, Unknown; identical to SEQ ID NO: 13913
  misc_feature (1)..( 3000): 2750-1469P.txt file - cDNA_ID_3020444; gDNA_ID_2214668; Annot_ID_189065

SEQ ID NO: 29664 - DNA, 3003 bp, Unknown
  misc_feature (1)..( 3003): 2750-1469P.txt file - cDNA_ID_3020630; gDNA_ID_2214671; Annot_ID_189118
tgcagaaccgctacataccacatatgtaaacaatttttttcaagattggttcatctgagtcataaataatatttaatgacaaaaaaaacaatattttaaagtatttgatttgttgttgaattatttagattattaagatttgttttgtattttaaggagaaaattgaaaagatatggaagttgtaaaaatttgcattgaccatttgaccaatctgggtcaacaacaaacgaagaaacaaattaaaaaaacacaccagcttatctattgttagttttttttttttctgttttcaggtgttttcttaaatcacaagctacaaaccctatatttatcttctgcaacaagtcagcatcgaactctcagatcatttatcaattcatcttcttaatttacttgaccctttctctttacacgataatggcgagagataaagaagatcaaaacaatgagaatccttcaattgtccagaacatgtcatttccattcaacaccattttcttgatctcaagcgcaatcttcctcgtcacagccgctttctggttcgtagccgtcatgacattacattacaggaccgatgaatgtaaccggttcgtcacaactcccggaatattcataagcttctcattgcttgctatgtccctcactggattctacgcagcttacttcaaatccgattgtctctttcgaatccacttctttatcttcttcttgtggatgttcgttgtcgtgtctaaagcaatctttgtcatctttctacataaggagaccaatcctagattgtttcctgggaccaagatttatgagtttaggtacgaggattactcaggatgggttagtagattggtcatcaaagacgatgaatggtatcgtacaaggagatgtcttgttaaggacaatgtttgtaacaggctaaaccataagatgccagcttctgagttttatcagatgaatctaactcctatacaggtaatataacctaagctacacattaactaaatcaaaccgaatctagttttgattccggtttaatgtttttttttatttcattctaattttgtttctttttttatgacagtcgggttgttgcaaaccaccactttcatgtggattgaattacgagaaaccaaataattggacagtttcaagatattataacaatttagaagttgattgcaagagatggaacaattctgcagatacattatgcttcgattgtgattcatgtaaagctgtgattattgctgatgtacataatacttcattttccataacagttaacattattcatatcatctttagtctttgtatcggcatgaccggttggtttgcctggttaaggatccttcgagaaagtcagaaatagatttgtacacatatgtaagacacatataaataaattgtttctttttattatttcttataatttatatcccttgctcaaaaatcgctaggcgctagttgggcggtaagggtgagcctaacgcctagtaggaaaatcggagattatacgggattaatcggatattagttttagggttatttcatatttttaaaatatattaatccattataattaagaaaattatataatattgttttttaaattgtattaaacacatgaaaacaagattttctattcaaatttataatttttatacaaattacgaacataagttggatattttaaattttaaattttaaaatgaaaaaaaagaaaaaataaaaataaaaaaattgggctagccatcctctagacagatttaggcgggtctaaaccgacaaaaatcggatcaacgattaattttcccaatttagacaaaatcgttgcagactccatctgatctctatgcggccgattttttgaacaaggcttatatgtatacaatcaatttaaaccgattgaaagagtaaacaaaaggttataattttagtaactgtttgtttacttggttggattggactgtccgtcacctgccatttctgtctttgcacttaggaattagaaagtttatatgtatatttttcctggacggccactgaatttgtggatgtaatatatgagtttgtgtatcactgtattgtggataaaaagatttagggctaagcgttctttagaaacacagactgaaaatgtgaaatgaaagcatgtttgttgatgatttttgtgaattacaaaaagaacttagagaggatataatgtaaaaagacccccttcttcataattgggccttagttataattcccttggaattttatggtatgagttttttttgtttgacgagatccaacgccaacaaatacgaagctaacaaactctctcatctaacaaactatttctaaagttacttttttatttgtttcaatatatcaatcaatgaatataaatataaaaataaagaaaaccaaactattgtgatatcatataacaaccaaaataataaaattttatccaacctcttctactatatatgtatttaatctatatatagtccaattatagaaacacgagaccggcatgtacgcatttctgtttcccttctatctcaaaccccaaacgttccaatttctaaatacagttctctactttagtaatgtttaataatgtttctttcaacatttcagttttctatacccgttgtgacaagacactcaaattttccaggacttatgtttgactattttttaggcaaggtaaaaaattgcataagtctcgaaacttttgggtgttcgggcggattggttagttagaaactaatgcacgtcagcctctgaggttccgtgtaatagattctcatgttgtcctttaaaaatgaaactcttccctttgattctttttgttcccaaaacacatttttctacatcttagagtcttagagaagaaaggcaagataatcaatctcatggcgatgtcgatctccggagctgtgtttaatggtttgggttcttcgttcttgatcagtcgaggcaagagaagcggcgttggacttggcgtagtagctatg

SEQ ID NO: 29665 - DNA, 3000 bp, Unknown; identical to SEQ ID NO: 13922
  misc_feature (1)..( 3000): 2750-1469P.txt file - cDNA_ID_3020634; gDNA_ID_2214671; Annot_ID_189115

SEQ ID NO: 29666 - DNA, 3000 bp, Unknown; identical to SEQ ID NO: 13928
  misc_feature (1)..( 3000): 2750-1469P.txt file - cDNA_ID_3020680; gDNA_ID_2214672; Annot_ID_189133

SEQ ID NO: 29667 - DNA, 3000 bp, Unknown
  misc_feature (1)..( 3000): 2750-1469P.txt file - cDNA_ID_3020689; gDNA_ID_2214672; Annot_ID_189128
agagcaaagaagaacattgtgtacattgtgagtcaatcttaaatctctcgattcctcacatcacattagctgtcaccttgggcggtgaacgctaattatttagttattgatattattaatttgttcctcgactctctcacaacgctttcacgttcgttcagtcagataacattttttaatgtaatgaacaaagcatgcttggtcttatactatataacatattcatggattattcagtagttctgtatctgccccctttgtttttgagaaacaatggcaacaatcgtcgttgactttcaaaaaattcattttcatcctcagatcctcttatccatattcacagtcatttgcatctttgtattcttcttcaagaagccaaagggctcacgaggctgtgatctgcctccgagccctccttctcttccgataatcggacatcttcaccttttactctttgatctacctcacaaagcctttcagaaactctcctctaagtatggacctcttctctgtctccgcatcttcaatgtccccatagtcctggtctcctctgcctctgtggcctacgagatcttcaagacgcatgacgtgaacatctcatcccacggccaccctccgattgacgagtgtctcttttttgggtcttcaagctttgtaatggctccttatggagattactggaagttcatgaagaagctcatggtcacaaagctgttcggacctcaggcactcgagcagtcacgaggcgcccgtgcagatgaactagaacggtttcacgcaaacctgcttagtaaggaaatgaaaagcgagactgtcgagattgctaaggaagcaataaagctgactaacaatagcatctgcaagatgattatgggtaggggttgtttagaggagaacggtgaggcagagagagttaggggattggtcaccgagacatttgccttgtttaagaaacttttcttgacacaagtgttacgcaggctgtttgagatactcagaatctcaccgttcaaaaaagagacactggatgtttcccgcaaattcgacgagcttcttgaaaggattattgtggaacacgaagagaaaacggactatgatcatggtatggacctgatggatgtgctgttggctgtttatcgagatggaaaggcagagtataagatcactagggaccacctcaagtccttgttcgtggtaaattctcctttcacttggtggattcattgagaaatccaatacaacaacattaattgtcctgtgtttttttttattacaggagcttatccttggaggcactgacacctcagcgcaaacaatcgagtggacaatggcaaagatcattaagaagcctaacattcttgagagattgagaaaagaaatcgattctgttgtaggcaaaacaaggttgattcaagagaaggatctaccgaacctcccttatttgcaagcggtcatcaaggaagggctaagattacacccaccagcacctctcttgggaaggaaagtcacagatggatgtacgattggaggctgttacgtaccaaagaacacaacacttgttgttaatgcttatgccgtgatgagagatcccgattcttgggaagatcctgatgagtttaagccagagaggtttctagcttcttcaagaggaaaagaagaggagagagagcaagaacttaagtacattccttttggcagcggaagaagaggatgtcctggagtaaatctaggttatatatttgtaggaaccgcaataggaatgatggtgcattgctttgactggagaaccaatggagataaggtcaacatggaagagactgttgctggaattaccttaaacatggctcatcctcttaggtgtactcctgtttctcgaatgcaactgcagaaatcgcagttcgtgagttcatgaattttgattagtaaacaaagaagctttgcattttatgtttccatgtctaagttttttccggtctagttggttacttttggtttattgtgaaaacctataaacagttgtgtattgttcttctgttgagttgtggatcggtttcatatttaatgactttcaattttattttatttttttgtcatccaatttttattagagctcaaacaagtcaaacctgaggaatgttgtttacataagtgacatgaagcggttcagtgcaaactttccgcgcaaattatccgtttttacatttgcacattacgagaaattaaagataaagagaaggttgtgaattcttcattgtcgctctgtagttcctctagataaactaagaccgccgaccttttcggttgaagaagataccatcttcaccaaatctaaaaagtctgtaaaaaatgctacatcttagttgtcgaaaccaattatacacttcattgccaagagtatagctgactttcaatattatgttccttaatttaggtttatgtccagaaaggaagaaaatgtcaatttatttaatttttattttaaaaaaatctttgaagaagatgctgaaaattatttattctaatatggaaggaaacaatatttccaatttacaatatgaaattttttaaagaaggtttcctatttaattcaattgctttttgaagtaaattctgtttcaaatttaagtctaaatttgtacttctcaattaatacaagtaagttatatatagactatagagtatagaggaaaagatataaagacaacctcatttcttggcgtgttcaacctctttagtctttccaaagcgttactacacataaaagccttttatcttaagcatacgcttaaccaatatcacacataaactgaatacattaatgtaaatatgcatgtatatattaaagttgttcttatgattttttcaacaaagttgatttcataaaacggattgatgatgtatctaagtcggagaatgcagagcggaggttttgcggtgtatcgacagggccttgcggaagtcttacaaatatataacaaagttgagaggaaaacatctatg

SEQ ID NO: 29668 - DNA, 3000 bp, Unknown; identical to SEQ ID NO: 13937
  misc_feature (1)..( 3000): 2750-1469P.txt file - cDNA_ID_3020720; gDNA_ID_2214673; Annot_ID_189151

SEQ ID NO: 29669 - DNA, 3000 bp, Unknown; identical to SEQ ID NO: 13936
  misc_feature (1)..( 3000): 2750-1469P.txt file - cDNA_ID_3020724; gDNA_ID_2214673; Annot_ID_189150

SEQ ID NO: 29670 - DNA, 3003 bp, Unknown
  misc_feature (1)..( 3003): 2750-1469P.txt file - cDNA_ID_3020759; gDNA_ID_2214675; Annot_ID_189188
gaaaagggagaattacgatggtcactacaagacttaacaaaaatataacgtaaattcaacataataactaaaagataagcactctttcaattattatgatcataaaatgacgccaactcacatatgtacatatgtcaccttcttctaactctcactataattcattgtttactagataaattttctttttctttttttgtttccttgtaaggagtaaaagtatattaaagttttcttacaatccatgaatgtaagaataatgctaaataaaacagtatttcatcttaaacattccactcaaaaccatgcataattaagaccaaaattcgatggatactgaatattgaatatgcatacgtttttcttattaaattggtactgaatattgaatattgaatatgcatatgtatatttaaatgttgatatacaatagaaaccttgtgttttatttatacgtttactgaatattgaatatagttaggaaaaatttggactaacgatacagaaaagaaacgcaaaacatattgggagacagttatcttattaagttattattccgtctgacccaaacaaaactataagaaaaattaacatcatctgatagcttctttacttgattagggagatgtggattagagttttttttttttgaaaacactttatattagatttaactatgaaaataattttcagaagcaatgtgagatgtgaccgtgagattcccgaatgataccatgatggccaacggttttataagtaccataaattgagaacataatacaaacactaaaaacgaatacacacagttgatccatttcctactttttagtctctagacaccaaatatacttactttaacatgtacatgcttcctccacattcagctaaatgtggtttagatgtcttgatagttcgacaagatgctttcatatgtatggcggaagttagaggctttgttcaggttctcaatccttatatcatggtgttggatgctatgcaaattgatcgtatgcaacttttatttgactattagaatctaaaatggtagttctcccttgcaaaaaaaaaaatcattagattctgataagcaagaaaacccaatccctcatcaaaacatgatatagattcataagaagaattttattgtccattttaacttaacattggcgtcggtgttttgctttctcgtccatcaacgaaaaaacaaaaaagagaattatatttgttttgacttcacatctaacatcactggtttatatatgtgtaattatcttcagctcggacaaaaaaatatctaagactagatgacacatatcaaaaagaaaaaatataattaaattgaataaatatagaaaatagtttattttaattttagaggaatgacacatatcgaaataatagagcgccacttgtcatttcttaaagcatgagtttgagaaaaccttactttattatattagactagatgaatacccacactacgcgtgggtttgtttcaaaaattgttaagaacaaattatgttgattgttcttgttgctaatttttgtttacttttttatatgttattgtttagttaataaagttaatcttatgtagttacaatttgtctgattggatttttttacttaaaatatcgatttatacatttatatatatatatatatataattatttatatttctaagatcctaatattttttcactatcatgaatacatacatcgataatataagatttttttatacaattatatgtaattatgttatttgtgtgatgtgaaactcgcctaacatgattataaatataatttcttgttttgtgtactctcctgatctagtacttccatcacatcgtgatagactcattattatatacaggatagacatatattgaataagatctcaagagttttcatatgaaaataagaaaaagaaagcaaaaactaaaatgtcatttaagtcaacatttttatatcgtctactattgcatatagtcatataagagaaaagtcgtgtcttgaattctttggtatgtccaacgtctcaaaggttcatcacttgaaaaaattacagaacttaccaatattaccaacttaccataagacacaaaataaaaaagatagaaagtcatatgttgagtcatatatgaacaacaaaacataataaggagaaagactcaaagtaaaattactaaactaataagtatttatacggtagcaaacaactaaattacaacaataataaaatggttactattgataaaaactttttagtaaaaataagaagaatataaagaaagtagtgctttttattaacataattttgtattttttaaaaaacattttgattaaatcacttaagagaataaccgatggaaaatttaatgttataaagaacttttattttttctcatttaatttggctaatttttaatttaaataatgtagaatgacatatgttatttttttgtataatgatatgacactcatatagagaaaattggccttcgatatatatgatatgatgtttcaaaataagtaagtatatatctatgtacatttaatttgtctcttacttttcaaattttagtaaagatatgatgtaattgctacattcaactaaagatataggcatcatcgtactaaattgttgttactcgtccaaaaaaaaaagggaatgttacactattaggcacttttagaaaatctttttacgtttgaggcactttctaagattcaggcacttttccttgtttctggaagataaaaggacaattatatcctttcaaaattaaaacataaattgcttaaccagttcaattggttttgttttctgtgttatctaataaaacacacgtgtaatacatgttctttctatttcgtgccggttgagatctcgacatgagaaagggagtaatctcacaattacagcaaataaatggatattttttaaaaataaataatatatagtgtcgctcttcatctctaaaaccaaattcttatg

SEQ ID NO: 29671 - DNA, 3000 bp, Unknown; identical to SEQ ID NO: 25403
  misc_feature (1)..( 3000): 2750-1469P.txt file - cDNA_ID_3020798; gDNA_ID_2214675; Annot_ID_189175

SEQ ID NO: 29672 - DNA, 1251 bp, Unknown; identical to SEQ ID NO: 13941
  misc_feature (1)..( 1251): 2750-1469P.txt file - cDNA_ID_3020811; gDNA_ID_2214675; Annot_ID_189167

SEQ ID NO: 29673 - DNA, 3000 bp, Unknown; identical to SEQ ID NO: 13952
  misc_feature (1)..( 3000): 2750-1469P.txt file - cDNA_ID_3020828; gDNA_ID_2214676; Annot_ID_189203

SEQ ID NO: 29674 - DNA, 780 bp, Unknown; identical to SEQ ID NO: 13949
  misc_feature (1)..( 780): 2750-1469P.txt file - cDNA_ID_3020832; gDNA_ID_2214676; Annot_ID_189196

SEQ ID NO: 29675 - DNA, 3003 bp, Unknown
  misc_feature (1)..( 3003): 2750-1469P.txt file - cDNA_ID_3020853; gDNA_ID_2214677; Annot_ID_189218
gacaattaatttgctaaatcattttgctacaattaatttcttagagtgaatatcactacaagaaaacaattaatttgcaaaatcattgtgaagtaaataatatttcacaaattcatcgtaaatttgtgagagatctgtttaaaatgtcacattcttagctagtgaggaacatttatagtcctttggaatgtgttgcttgataagtggagactgtgttccatttttcttcacaaaaaataatgctaagacaaagatgtgtgttcagatgtttttggtcactcgcaaaacatgaatcaaacttttattttttcccgaaaaaccaatttgaatttgttagtaagagcaccatcacaaaaatcatgaaagagtgtccatctctggaaataaaagcaccttcattagaaatatcgtaataaagttttttacaataaaaaataataataaatgaaggaagaaagcaaggaagatttcttaaatgagaaattttgagatacctataagaaccctataaaacacttgtctcacatatattagttcaatttttattttaaagttatgaaaatgttcaattaacgcacaaatagtgcctttaggcaaaacaattatcgattgagaaggagaatgagatatttctttagacatacaaaaacacattaatcgtcacatttttcttacaaagtgcattcaaaaatggctttataaaagtcaacacatttggtaatgtaaccacaaatgtttacgatatccaaaggagcatcatattagacgacctaagtacctgaatttctgttttggagtcatatagcttcattttatagccttttttaattacggggtaaaataaataaaatatttaataatatttattatgtctcatagttcattgcatatattgtaggccttcgaaagaagaataaacataatagtaatgtaatccttttgtaatatagagtgtatcttttgatattgtgacaacagcaaagtatgtcagataatgaccagaatatggtgtgtattccatatcgatggtgtggatgtgacgtgcgtcactaatattctcggaacctgagaccgtccaacagtactctgcaattttgattaaaatgatattcttagaagaaatatatattttatttttactcaaaactgcaaatgttgctcgacgaatatgaagataagtgatcgttctatctggctttagttcactgattatatcaagtttttcagccaagtctcaagggatgttctagacatcaaaataagacaattattaagatcaaaaatctgacaactaaaaggtatataacaatattattcatctattatatcttgattcttcttagtaaagtttcaagtaaatgaaaacaagattgatgtataaacttagagtacaagagctttgtgtcatttatataaaagaaatgctagagaacaaatgagaaaaattatttgggaagaagtgctttctagatcctctaaatcatatatatatatatataatcaatgtatttaaacaaataaatagaaacaagacattgtttctatgcacttgcaagtaaatgtgttttacacttcactaaagcttcccttaccactagaccacaaatgattgggcgtgagtcatgtttctgaaacctatatcatgtcttgattgtacaaataacgcatgattaagctgtagattctgaaaatagaatatattgaagctttccacagttagggccggctcattgggggtgaaaggggagcaatatttctggatctaaattattttgggtaaatttaaaggtccaatttttttagtatgaaaaagtgtcattttgaaagatttataagaattttttagcatgaaaataggtccaaatatttttttagtatgaagaaaggccaatttaaaagagttttaagatttattagcataaaaagggcacaattttttcttttagtatgaaaaagaccaatgtttaagatttgtacatggactctgaattcattgagctgccatagtgagtaaaatttggaaacaaaactaaaaaaacataacaaaatatctcgttgaattcaatacaaaaagcatatacaaacacaacaatgtaacaatttcaaaatatttgctcttaagaaataaaaatcttcaaccttgaagagcatatgttagaaccaagctccttctaccaaaactatataaaacaatcgaaatagagaagcatatgtaccaacaatgtggctagcgggtaactactcgtcaatacattaccaatataaaaacaaagtctgtcagaaacacactatattctggttagtatctaacaaactttgatgatgttagaaaatcaaatgatagactccatattacaaagggactacactgttattatggctattcttctttcagaggcccatactatgcaatgaaccatgtgacatattctcttcattcccatacatggctacttaaatgttttaccaatcagaaatttgtcgttctaatcacgtaataacctttattagtattcacccgtttttttaaaactccaacattcgcattctcatccgctgcgtttaagtctgtcgagcctataaccccctaaaaatgccataatcttcttaccaatcacaattgatatcatcattttgaacatttcaaaattctcccgttgggcttagaccttaattaatgggtctaaagtagaccacatatctaactatgagttgttgttgggctttggaaaactacacacgtgtgagacaatatctaccgcacgtgtcagtgcaaggcgccaaagccaccattatccttccgttatcgtctatcttctccaccttcccggaatccaattcaccaattcctaagcattcttcagaaatccgagctgctttttgccacatctattcgcttcgaatctcttttcaccagctcaaaaactgtcgctttcaattccgctcgtttcgtcccaccgctccgtgtattgctgaacttcttcatagcaactcaataccatg

SEQ ID NO: 29676 - DNA, 3003 bp, Unknown
  misc_feature (1)..( 3003): 2750-1469P.txt file - cDNA_ID_3020864; gDNA_ID_2214677; Annot_ID_189215
ttgacaaatgataacatcatagtcctgacttcaaacaacaatgtcatgtcgcaggaaactattttttgtttgaatctaatgttaaattatattcaaagaaaaaacaaaagtttacacatgtttaatgcaaaaaatttcgtaacttttagtttaaatctatccttagcattgccttgtcgcaaaccaagtttggatgcactccgcgagcgatgagtttcctccccttgtgccgtagaactatttgtaatgctctgtagtatttgaacccaagtatttttcattttaaccttctttgcaaccaaatgaaataaattatatagcctcataagattgagccaacgaatctcttgaagcactttagcattgagagaaactcttctagttgatgcaagatattcaaaaaatagatattcggatggcaacaaatctaaactttatactatataaaaagattttaacccgcaatataccgcggattattatctagtatagaagtaataatcttctgatactcttcctcaaaaggtcaccaaacatttagcatctaacatatatggtagagcagccaagtaaacatttcccaatggccaacaaaatacaagtctaagatattaagtagattcgaacacaaggtgacatgaatttgaatcccagagcacaatagccaactcgttgagcatctcacgcctcttctcaaaatcttcgagcttttcccttccgatgcgttttgtggagaaagttgctttcttcaaccgtcttgcgttttctaggatgtatgtggcaacttctttctcatcacctcgttgccattcatatcctatccacaagaatgtctcaagatggaacaacaaacattccggtgcacattttggtggattccattttcgttcgtccggatttgttttgttgtcatgcagatatacctgggaacaatgcagtttatgtcatctaaatcaacaaattacctgaaagtggagttgtggaaacaaacaactagtgaaattgcttacatccgtgagcttgaggatttgtagtttaggagaactatcaagcatgatcgaaagcagattccaccactctctttcgtgtgtaagtagctctagacagcctagttgatcgaagattttaccagtaggaactttaacctaagtacatttccacaaaacagtgtaacattgttacatacattttagatacacaaaaacagtgttagcccaatttgcagagaaaataaccaagcgaaaatgttcaatcttaagcttacctcaaggggtgataagtgtaagataagacgtttggctgaagttagagactccagaatgttctcattggttataccagaaacgttactgatttttgcctcctctaactctagtgccttgtcaatcaaacaagactcaatatcaataaccccgttgatgttcaagtatttcaaaccaggggcatttatcacatagcttccatttccataacctccttcttgtctaagatcttctatggtcaatctttgtaatgacggcgacgcaattgtgaaagtcgccacatcggcattgctatatctatgcacgaccaaatcttgaagactagggcagccacataaaagattgcaaacagattcttcgtctttgaaatgtacttggtcaaggtatagctttctaagagacttcaaacaaacccgagaaggaaagtctaaatcgatagcacacttgagtttcaagatctcaagtgaatcattatagctaaacaaaacactaggaagcgtgacagtttgatcctcttgatagaaactatccaataccaatttacgcacaccgcgagcaaatgctgttgcaatccatattccaacatgcaaacaatctgttctaccttcaaatgacaaatgcaaactctctagaaccggagctttatgtaaagacaaagtcttgtaaacattctctgaaaacatagtgggatctatgttatcatcatcaaacacaggattgaaattggaatcaaacttgagttttggcaacatagtccaaagagatctccaacgtttagacaaaacactcgtggctatggcgttttctgtcggaagtgaagacaatatctgtagaagcaaagcatcaggcaagtcactgattctgtcctcattcatagaatcggttttgctgtcaaaaatcaaaggaaaaaaaaaaagttagggttcaaagagttagggttggatctttataacagctaagaaaaacataaacgaaccaaagatacttacaatttctgttccattgaaattaatagaggtaacaattcgctaagaaactttcagattttttttgcataaggaacagctccaaacaagaacccggctaaagctaagcaatgatggaatcactttgggcaaaattcagggttttgtgaataatgggtaacagagtaatctgcatgaagaagaaagatgttgttatcagaagtggaggagattgatccagaagcaagagaatgaatcgttcacagaggaagttgattgctgttgaagagaatttgcatcgaagagctttgtctatggctattcatcaagctcaggtgtctcagagatttgatggatccatgtctactagcgacatacatacatgatctgaagaagaaagaggacgaaaagtgaagtcgaaatgaacgagaccgatggttaagaatcgaatctaatcccaacaacacattcacatgcaaaacgaaaaagaagtctttctttaaatgggcttttttattcggccctttataagtaaggcccaatcgtacaaagaaaaaagtattatagaataaatattaatcgaccggttaatctaattaatcaaatggttaggcctaactatgtttgaaatttcatttacccgatttaatcaattcaatcaaaatcaaaatgttcttccttctcagtactgttcaaattaaaacttaaaatgtctgcatttcccgcacattaataattcaatttcaaaccctaaaaattcgaaaattcccccaatg

SEQ ID NO: 29677 - DNA, 3000 bp, Unknown
  misc_feature (1)..( 3000): 2750-1469P.txt file - cDNA_ID_3020870; gDNA_ID_2214677; Annot_ID_189213
aaagtcttcagctgagataacttctgtttcacaatggactttaaagggattattatctttcagaaggatatgagcagcactgatattggttctgttttgctttttgttccgcacactgtccttctctctttgttgagcagagccattcaagaagcctgtatcggtaagtaatacgctagattctgcaagcagggaatccactttctcagataatgtattcatagaacaattactagcatattccttggtcacatttccatccccagtctcagatttttcgatgtctttactatgctgctcttgatcttgaagaggaacaaaattctccgatgctgacgttgttgcatttgacaaatttgttggagatgacacaaacttctcaggggtgctggctgcctgatttctctgttgttgtttacagagcagtgaaccttctatctcagaattagtatttccttctggacttctccgtgcaaacacatcgctaatgtcaacagcaggaatcaatgcaccgcaactgtgttgatctggtatgcctttcttttcagaaactggtggcctgtcatcgctagtgtcaacagcagggctcaatgcaccactactgcattgatctggcaagcctttcttttcttgaactggtgttctattatcatcgctagtgtcaacggcagggttcaatgcaccactactgcattgatctggtatgcctttctcttctggaactggtgttttattatcatcgctagtgtcaacagcatggctcaatgcaccactaatacattgatctggtatgcctttctcttctggaactggtgttctattatcatcgctagtgtcaacagcatggctcaatgcaccactaatgcatttatctggcatgcttttctcttcagaaattggtgttctattatcatgtttagataacaaagcctccaagttggtaatgggtatatccgcatgcttatccctgagtacacctatttcttccctcccaattgatggggtagtcagaaaacggtgtccggataattgaagctttgatttctcaattctttgagaaagagcagaaccaggtgacggtggaatcaaaccaagtctggatttgcttttctgaatggttgacaagctctcaactagtgcccgagtctccctgctcataaagcttccaccctgtgtaggggaaggagtaacacaagataaagactgaggcaacataccaactaaaaacgcactttgccttctaatagttgacgaggaaagggaagcctcttttgtgtaacgttggcttcctgattcctgcagacctatgggaatgcatccatttggaagggacgaggaaaaatcatcgataggtgatcttgcttccacagtattgtcttcaggaagcaattccttgctttcatctcccattagagctgctagtgtaggagatagatacccgtaatcatatctccgagaattttcaccgacgatactcatatcattcgagtctctaccaccacttcctttatcaactggtacaggtgattttggaaatagcttcttaggttctgttaacaccattgcacttcctgtatcagatctggaagtaacctcagttggtgttttctcttctactagaagatggctactcgtaggggtccttacatctccagactctgacctagcaagactccgaaaatgcatcgaaaacgccgtagaatccatcgtcatttcatggtgttcttcagagataggagtatccaacaatcttccaggattaataaaatgggaagacacaggaccgaagaaattatcctctggtaacgaaaacaaaatcgattcagctaaaaattcaaagaacaaaaccctaaattcacagagcaattgaagcgtaccgttatcacttgtagcggaaccaacagtgctacctcctgaagatggagaatatttcggcctcaagaatgatttatccaagataggttcgtattcaccatcaccatctccgtcagtatcttcgcggtcagataattcaccgaaaaacctaattactttattatcctcatcaggctctgatgtatcaccaccgttttggggtttcgcggcggaggtattgggcggcgtctcgtaatcttcgtcccggttgaaaatgtgaacggaagtaatttcccggtcggcgaagctcactcgtcttagccgcttccgccgttgcgctatagattcctcgtctgttcctattccggcggtgttgttcatcggatcttctggcttttccgatgccattgggggaattttcgaatttttagggtttgaaattgaattattaatgtgcgggaaatgcagacattttaagttttaatttgaacagtactgagaaggaagaacattttgattttgattgaattgattaaatcgggtaaatgaaatttcaaacatagttaggcctaaccatttgattaattagattaaccggtcgattaatatttattctataatacttttttctttgtacgattgggccttacttataaagggccgaataaaaaagcccatttaaagaaagacttctttttcgttttgcatgtgaatgtgttgttgggattagattcgattcttaaccatcggtctcgttcatttcgacttcacttttcgtcctctttcttcttcagatcatgtatgtatgtcgctagtagacatggatccatcaaatctctgagacacctgagcttgatgaatagccatagacaaagctcttcgatgcaaattctcttcaacagcaatcaacttcctctgtgaacgattcattctcttgcttctggatcaatctcctccacttctgataacaacatctttcttcttcatgcagattactctgttacccattattcacaaaaccctgaattttgcccaaagtgattccatcattgcttagctttagccgggttcttgtttggagctgttccttatgcaaaaaaaatctgaaagtttcttagcgaattgttacctctattaatttcaatg

SEQ ID NO: 29678 - DNA, 3003 bp, Unknown; identical to SEQ ID NO: 25406
  misc_feature (1)..( 3003): 2750-1469P.txt file - cDNA_ID_3020878; gDNA_ID_2214678; Annot_ID_189235

SEQ ID NO: 29679 - DNA, 3003 bp, Unknown
  misc_feature (1)..( 3003): 2750-1469P.txt file - cDNA_ID_3020887; gDNA_ID_2214678; Annot_ID_189236
aataatgaatagcagatgttgacgcctggtaagctcgttttattgcaggaaggtttcgcgtttgcgcactgcacaacttgcaaggctccatattatctgagagttcacagtgctggagataggaaatggcggacattgaagtttcgcttctttgttactcgagacattttatccatatttcttgctgttcagcttgtaagtattcatttttcatgtgtgcttctgtttcttacagtagtttttctttcatttggtaatatatctaactcatgccttttaaatgacttcatctgctcacaggtgattgctgcattggcctacatggtctatttcatagatagttaccagcaatcatggcttcgtcatatatggggttttgacagtgaggtcacgttttattacatgtgtggtatgatcccaaactttaatatctaaataaattcccctctagataagataatattttttagtaagacctctgccaagtgtagttggtaagacgggaatgctaagtttattattgtacatatgtcctacagtccttgttaaagctttgcttcaatcagaatcttagattccaatgtaaggagtttgctattagatgatttcattgcctctacgtagtaggaagtgaagcaagggttttgtgatcagttagatttagatcaaaagttaaggggttggctacgttacgaatatacagttagagttctggacctcgtagaatttttaactaaataagaattttcaaagcaagtgtattagaatttagtaattaaaattttgtgttttacacagctcttcatgaaaatttgttactaaagaaatttataccaagtgattctaaaattttacatgtgtgtatgagctactggtgtttatttacatgaggattttgttgtgtgcaggagctttattattctttgctctgctgggtctatctggatgcgtcataacctgctatgatcgaagggttcgcaatgacttagcacagccttgccgtgaattgtgtctctgttgttgccagcctgggtacaatttccatacttcttcctttgtttttgttttcagtcattggcgttttcctgattataagtgttcctcatttggtcacatgatagactttcgtaaaaaatagtttgctgaatatgtgggcttttgctttacctggttcctgggtgatttatgtttgaataagcgacatcagagactagaaatggtgagacaagccagaggaattctgttacacaatagttagtgaaaaattagaatactaactagatcctcttcttttgtctgctaaactctatctatattatctgccaaactactatgatcgagtttattatctgccaaactacaacacaacaaaagtacatacactattgaaaatattttgtcagctcccatttaataaacatatatatcatcaatatgcaggatatgcacagactgccatctaccaggaactatttgtatgtgggcagattgcaccgcatgtactgaaggctgtgcaagtgcagttagtgagtgtggaggttgccttggaggtgcaggggaagccggattgccattactcttcataacggcattagtaattctcggtctatttacagttatcggtatattctatagcgtattggttgcaaccatggttggacagcgcatttggcagcgccattaccacattctcgccaaaagaatgctaacaaaggtaagatttttatttaccttctacggtttctaattgtttatcattcaatgtttctttataccttctttatttggtgtttgtaggagtatgtggtcgaggatgtagatggcgaaatgacggggtcagaatggtctcccccggctttaccaactgagcatgtccagcagctgaagacgcttggccttctgtgaaactatatggcttttgattaaaactatgggagatttttaactgcacgcagggaaatgcatttgacaagtggtgagagagagaactcacagaacgatgaaatctaatagatcttttgtatttgtaaagaaaagactccaacttattaaagagtccgtgatctctcccattgagtcagagacctctccaattcacgaactgagcttgtgttgaatgtttgtttctaatataggtaaatatccgaaataactattttactttcggattattttaactcgaagcaagtttttacaatggcgattacagtttaagacggtgggattagttgaaatggcagcatgtaagaagcttagacggcgtttttaagcagtttaaacagtccgtaagctatctagagtccgtatgctttttgtggttatcatattttaagttaaaagtgttaacttcaaagttaaaacttttaaccgtagtgatcaaaaacatttggttccaaactttcaatgagtatcatcgatttcgaagggtagaatatctttttttgtgcaaagggtagaatatctagaagttgaaattgaaaaataaatgatatactattacaaacccaacaaagttaacaaaattttgttttcttatccaattaaagaaattcgaattccttagaaaataaatataaaattaaatgcttcttaattttattgttcatgacacaaaaaaatggatagagaatataatgtgataatgttaatgtattagttatttgtttgaactaatacactttttaagtatggaaatggatagagataacacgtatctatgaactacaaatgaaaaacacatgggaaaaaattaagttaattgctataactttaacatggtgagaagatgcatatagtaatcaatgtagtcaaccctatattttttttacattcattcactttctatttatttttatttatgcttagatgtatacccgtatatatataaacataaacattacatagccataaagcaaagaaaagagtcattcatttatcctctaatttacaaaacattagtacgtagctttctttttttttgttgcaatcgatatattgatcatg

SEQ ID NO: 29680 - DNA, 3000 bp, Unknown
  misc_feature (1)..( 3000): 2750-1469P.txt file - cDNA_ID_3020893; gDNA_ID_2214678; Annot_ID_189233
gaagaaaatctcaaaaaaacataaatcgaaatccaaagaggaagagaaaccagagaaatcaaagaagaaatcgaagaaatacgaagaagtagaagaagaggagaaatctccatctccatctccatctcctaagaaatcgaaggagagtaagaagaaacataagagatcatcagatgaatccgaagagatcgtcgattcaaagcctgttacggtcccgattgttaccattgagtctgattctgatttcgaattcgataaggaagatattaagaatctacttgaatcttactctaaagaggagcttattaacctaatttacaaaactgctgagaaaggttctaaattgatctcagcagtgtttgaatcagcggatagagatagttctcaacggaacatattcgtgcgtggtcttggatgggatacaacgcatgagaatctcaaggcggcttttgaggtttatggggagataacggaatgttctgtggttatggataaagatacaggaagagctaaaggttttggctttgtgttgtttaagacgcgtaaaggagcgagagcggcgttgaagaatccggagaagagaatgtataatcgaactgttagttgtttaccagctaggccgtttaattctggaaagccacgagaacaacaacaaccggttgagtctgtgaagattgatttgagtcatacgggtaatcagagtgaaatggctttgcctgggattgatttgggtcatggacttgataagggacatcagcagcagcagaatatgtcaatgtatgctggacagaacatgcccttttatggacattctcagcctcctcctggttttaatcctatgtatggtgcaatgatgggtaatccgatggttgctggtttacagaattatcgtatgtttggctcgggtatgatgaatcaaggacctatgatgccaccgaatcatatgggaatggtgggacaatatgttggtgatggtaatgttaacggtgttggtgcgggtgctggtgctggtgctggttttgatggtgaacgtgcttggtatctgagataagagaacccaagtggtatgaccatgttctctgatatttcaagttatagattaggctaatgattagtccggtatcttcgactccaacttgatattttgggaattgcaggagttttttttgcggatctttattttctatgcctgatgtttcaaacctacttttttagtttcattatttatagtctcttttaacgaggtatctacccctatatgagccattttgagggagatgtgtgctcaaaggatgaattttctgttgctctctggaagtctgtcattggtgttctgctctgttctcataaaccagtgaaatgtggtcattttgtctagaagatttagttactaggatcaatattggtttaaagtagtttgctatctctttgttttcccttttggagtcccccattatggtcttctgtcttctccttacccatcaaactcacgtctggttttcttctgtggcatggcgtatgtttttctcttttgtttttccttgtttttggttttatgttttcccgcattttcattgaatatctgttcgctatagctggagaagaagcttatgacatttatagttttgtccactatatgtcataactgccaaaagtctgtatcttccagctgcagttgtcttgagacccgtttgtaggatcagacataatggttttacattcttgttttaaatctgtctttttgagtactggaaaaagttttgggactctttcaaaagcttcaagttgattttctctggaataaacaacctgagttttctttccttcaagcattgttttcttccccataggtttttataagcttctcaatctctttcatcacattcctcttttatggtagtgtcgcccctttctcttttgtatttaagagtccattttgatatcagttgccaagttttcttgcctaagttcaagattgtttttggtcatcggtacttggacccaatttgtttttcaccttacatagctttgttctggatttaccttttttttacctgctcgttattcatattctatataactctggttatggtagcaaagcatacttgttttttttttttttttctttggattttcacaatgacctcacagtgaccgatgatgcgaatgcttgttttcttaagaggatcaatcttgttttcagtttttcgatttcttaagaggatcaatcttgtttctcggtttttggtcttctctgcagctatccatccatccatatgaatcaactcgtattaatctatagtatgcttcagctaaatcaactttggtttggttttggtcatttgatttcgttgttttgtgatcatgatcttatgagggctttgtttttctttccaatggggaaactctgaaaatcttaagaacaaaaacaaaaccctctctaagatctcggtgactatttttttagtttctcataacacataaagataaaaaagaaagaaaaaaaagtttcaactggtgaatgaataaacaagtagcagagcgacaccaccaatatggctaaaacctctgcctagccaggaatcttttctgacggcgctctaaaagaaaagtaccacaaagttcacaccccgtaaagttagggagcttatggtattccggttgatgtatagccatcataacttaaagccagcatcttgccatgtaacctctacaaagatctaaggccttatcttaaatataaagcaaatatttaaaaatatgtaaaataataaaaatattcaaaataaaccaatccaaaaataatctaaatatttgaaaatatattcaaagcaaaatactcgaataaaaaaaaaattaaactgaaaaaatcggaaaaacgacatctcgaggataaagtaaatcgaactcttgacccgaggggaaacaggaaactgaaatcaaaaatcaaaaatcaaaatccctaaaagcttcttgactcgtttatcctctactacaatg

SEQ ID NO: 29681 - DNA, 3003 bp, Unknown
  misc_feature (1)..( 3003): 2750-1469P.txt file - cDNA_ID_3021062; gDNA_ID_2214683; Annot_ID_136698
atatttaataaaaatttacgataaaaacataaccgttcagaagtgtttgcgatataaagacacaaccgtcaaatttctttgaaaaaatacgataaaaagatacaaccgagaaaaacccaaaaaactcataaatattctatcgaaaagttgcgataaacaaacacaaccattcaaaagtgcttgcgataaaagaacaaccgtaaatgtttcgactaaaagttacaattaagagacgcaacccgaaaaagttacagtaaatttgttaacgaaaatttacgatatataaacgtaaccatttgaacttgtatcctactttggtttctaataaaattcagatgacaaagaaaaaacgcaaccattaaaaaaatgtaaaagactatttattgagattgtcttattattattagatttacttaactccaaaaaaaaaccatggaggaggtaagtccaatacacccaacccaaaaaatagacaaacccagcccaagcccaaaaagcccttctatttttatatgtagacgacaataatttttacagacctcaaagcaaaattaataaattatcgtcttgacgaaaaatcgtagaggaaaaaaaatccccaaattgtgtgaccggaattagggtttcgacaatgtcgtccgggaagccaaagcaaggcgacacacgattggtggttgctgccactacggcgtcggcattgatggaagcgaagaaggctgatcacggaggatcttcgtctatcgttgagtataaaccgccggtgatgcttgaagatgaagaagatctagaagtaaagctccgacgtatccttgagaacgttcctgttcgtgttagtaatacttctggaagttccgctggttctggttctggagatttccatcaggtaactaaactaagcctttctcttaaatcgataaggctttgtatctggaatctgaaactgcagataaggctttgtattttgttattaggcgtagttaggtgtggtaatcaattacgagaagttcattgttgggatctgaattatcttagtggactttgtgttgacattgttttcttagttttgtgatggatcacaatgcctttatgcctatataagagtttgatagaatgttccatagactatcctgtattagtcttttgatggctgtgatctgtgaatgatttcaacttctgtatatgaattctgttcttcagtaactgaaaatcagctggattgtttgtgaagaatgcctggtcttttgttcttaggcatggctaagtgtggattcgaagctatagtcgattaattactagaagttccttgttgtacatgtgataggaatcttaaatttcttagtctataagtgttttgtgacgttgattacttagtcggtagagcttgaactgagagtattagttgcgagaagctcatgtgggtattagtaattaatggttgatggtcgttgtgttgattctataggttgtggctgagtgttatctgaagtgtggccctgattattgataaagcgtgtgtacatcattttcttattatactagacatctaaacttgtgcaatactgatgcattgtttttctattacagtaccggcaaatgaggcggagagaacaagaccgactaacaaggatggatattgactataacaagcggttaaaaatggcagagtttactataagaagagaagagaaacagaaagctgcagaggaaaaaacatcgaagaagcgtttgaaacgccaaaagaagaagcagaagaaacaggagaagaagcaaaaaccaaacactactgaggaagaagtaaagcaaccgagagtaggagaaatatcatctgacgaaggtgaagatgaagtagaagaagagtctgtgctagaacctttacgtccaatgtttaatatcaagttccaagagaaccgttcatagcttttattgtgacatgttacatgattccaaaactatctttgtgagattcgtttctttctttccttttgttttcaacaatgtacgggaaaaagaaatggagcaggttttaatcggcttttgtattggattagggttcatcaaatcaaccaccaatgtatattgacaagtaaaccaaaattctttagtcgaaaattgttaaaacgactaaactttggtgccagcagctaagctccatacacgcaagttcccacttttgtgtccactgaatagcaatccttgaggaccaattgtgagtgtgccaatcgtgtggtcccatccaaggaagacgatatcagacatttgtcccaacataagagtgatgttacagtgccagtatgttgcttcaaggtcattatacattgcagggtgttgagatcccacaccttgattgttttatcgacagagtatagcacttgacctccaacaacaaaagtacaaaacaagtgacttcaccactatgatgtccctcgagagatgtcaagtatttgaatggatcatcagactcagagtgtgtagtagctttccagactaagctactaccacaacttgttccagcaaaaagcattccgtttaatataaaaataccccatctttgaattgttgatacaccgatttaacatctctatattccaaagtaatgtatatattgttcacaatggaaaatggagattaaaggaacaacaaaaattgtgaaccaaaaaaaaaagaaatgccaaaagatagaatcagatcaattactcaaagataagaatggtttaaaagcaaaaaagaaatttagttaaggccatgaatggtgacatagaccgcacaaactgcttaaattgaagagacgactatgtgcgtaaaacgaagagactcaaaacaattttgggattcgtgagagatattgattcgctgcaatggaagaatctgttcatcaatcgatacgattcggctcaggtttcttctctctttctctcattgtttcattgttctacgactccattaacgtgtagatctaccgattcatatgatttctgaactgatgcagttgcagatttaatcatg

SEQ ID NO: 29682 - DNA, 3003 bp, Unknown
  misc_feature (1)..( 3003): 2750-1469P.txt file - cDNA_ID_3021062; gDNA_ID_2214683; Annot_ID_189295
gttatataaaaagatacaacaattcagatacaatcgtaaaaagatacccaactaaaaaagatataaccgtaaaaaagtcctgactatatttcaatgaaaatacacgataaaaagacagaacgaaaaaaatcagaaaaccccgtaaatatttaataaaaatttacgataaaaacataaccgttcagaagtgtttgcgatataaagacacaaccgtcaaatttctttgaaaaaatacgataaaaagatacaaccgagaaaaacccaaaaaactcataaatattctatcgaaaagttgcgataaacaaacacaaccattcaaaagtgcttgcgataaaagaacaaccgtaaatgtttcgactaaaagttacaattaagagacgcaacccgaaaaagttacagtaaatttgttaacgaaaatttacgatatataaacgtaaccatttgaacttgtatcctactttggtttctaataaaattcagatgacaaagaaaaaacgcaaccattaaaaaaatgtaaaagactatttattgagattgtcttattattattagatttacttaactccaaaaaaaaaccatggaggaggtaagtccaatacacccaacccaaaaaatagacaaacccagcccaagcccaaaaagcccttctatttttatatgtagacgacaataatttttacagacctcaaagcaaaattaataaattatcgtcttgacgaaaaatcgtagaggaaaaaaaatccccaaattgtgtgaccggaattagggtttcgacaatgtcgtccgggaagccaaagcaaggcgacacacgattggtggttgctgccactacggcgtcggcattgatggaagcgaagaaggctgatcacggaggatcttcgtctatcgttgagtataaaccgccggtgatgcttgaagatgaagaagatctagaagtaaagctccgacgtatccttgagaacgttcctgttcgtgttagtaatacttctggaagttccgctggttctggttctggagatttccatcaggtaactaaactaagcctttctcttaaatcgataaggctttgtatctggaatctgaaactgcagataaggctttgtattttgttattaggcgtagttaggtgtggtaatcaattacgagaagttcattgttgggatctgaattatcttagtggactttgtgttgacattgttttcttagttttgtgatggatcacaatgcctttatgcctatataagagtttgatagaatgttccatagactatcctgtattagtcttttgatggctgtgatctgtgaatgatttcaacttctgtatatgaattctgttcttcagtaactgaaaatcagctggattgtttgtgaagaatgcctggtcttttgttcttaggcatggctaagtgtggattcgaagctatagtcgattaattactagaagttccttgttgtacatgtgataggaatcttaaatttcttagtctataagtgttttgtgacgttgattacttagtcggtagagcttgaactgagagtattagttgcgagaagctcatgtgggtattagtaattaatggttgatggtcgttgtgttgattctataggttgtggctgagtgttatctgaagtgtggccctgattattgataaagcgtgtgtacatcattttcttattatactagacatctaaacttgtgcaatactgatgcattgtttttctattacagtaccggcaaatgaggcggagagaacaagaccgactaacaaggatggatattgactataacaagcggttaaaaatggcagagtttactataagaagagaagagaaacagaaagctgcagaggaaaaaacatcgaagaagcgtttgaaacgccaaaagaagaagcagaagaaacaggagaagaagcaaaaaccaaacactactgaggaagaagtaaagcaaccgagagtaggagaaatatcatctgacgaaggtgaagatgaagtagaagaagagtctgtgctagaacctttacgtccaatgtttaatatcaagttccaagagaaccgttcatagcttttattgtgacatgttacatgattccaaaactatctttgtgagattcgtttctttctttccttttgttttcaacaatgtacgggaaaaagaaatggagcaggttttaatcggcttttgtattggattagggttcatcaaatcaaccaccaatgtatattgacaagtaaaccaaaattctttagtcgaaaattgttaaaacgactaaactttggtgccagcagctaagctccatacacgcaagttcccacttttgtgtccactgaatagcaatccttgaggaccaattgtgagtgtgccaatcgtgtggtcccatccaaggaagacgatatcagacatttgtcccaacataagagtgatgttacagtgccagtatgttgcttcaaggtcattatacattgcagggtgttgagatcccacaccttgattgttttatcgacagagtatagcacttgacctccaacaacaaaagtacaaaacaagtgacttcaccactatgatgtccctcgagagatgtcaagtatttgaatggatcatcagactcagagtgtgtagtagctttccagactaagctactaccacaacttgttccagcaaaaagcattccgtttaatataaaaataccccatctttgaattgttgatacaccgatttaacatctctatattccaaagtaatgtatatattgttcacaatggaaaatggagattaaaggaacaacaaaaattgtgaaccaaaaaaaaaagaaatgccaaaagatagaatcagatcaattactcaaagataagaatggtttaaaagcaaaaaagaaatttagttaaggccatgaatggtgacatagaccgcacaaactgcttaaattgaagagacgactatgtgcgtaaaacgaagagactcaaaacaattttgggattcgtgagagatattgattcgctgcaatg

SEQ ID NO: 29683 - DNA, 3000 bp, Unknown; identical to SEQ ID NO: 13977
  misc_feature (1)..( 3000): 2750-1469P.txt file - cDNA_ID_3021093; gDNA_ID_2214684; Annot_ID_189322

SEQ ID NO: 29684 - DNA, 3003 bp, Unknown
  misc_feature (1)..( 3003): 2750-1469P.txt file - cDNA_ID_3021103; gDNA_ID_2214684; Annot_ID_189319
ttgctggctcagcagaagcagatacactacatcactgatgaagagcacttccaaatgcaagaaggggggaatgatcaaactgaagagctgtgctacattcagaaccaaggagggtttaacaagggctacaacaactacaagcccaacccaaacctctcctacagaagcactaatgttgctaacccccaagatcaagtgtatccacctcaacagaatcagtccaaaccttttgttcagtacaaccaaggttatgtccctaaacaacagttcaatggacgtttccaatagcagaatccaccaccaaggttcactcaacaaccacaacaagccctagcagctcaagatcctgaaattaagcaactcattcaacagatcatccaaggacaagctactagagccatggcttttgaaaagaagatagctgaattacacaacaagatcgattgttcttacaatgatctgaatatcaagtttgaagctctaaatttcaaaaatcaagtatgtggagagtcaatttgcctcaacctctgccccgaagcaccctcaacaacttccagggaaagcagtccagaatcctaaggactatgctactgctaatgctatcaccatccaccaagaagatgagtctccaccaagtcatcagactcccaatactgaggacaatatgattcaagaagggggggggggggttcaactcaaattgatgcacctgccactcagcaattcatctggactatagagcacacacctttgctgaatactcaccattctagaaaagagttcaaaagtgaaaaattcaagaaggatcagaatcaagagatgatcagcagtgcctctactcaagaaacatacaagaagaaagtcatccaagaaaagcttgatgatcccggttcattcactctaccatgctctctaggaccattgacattcaataggtgcctttgtgatttgggagcatctcttagccttatgcctctctctacagctaaaaggctaaggatcatggaattcaagttctgaaacttagccttactcttagctgatggttctgttgcacatcctcatggtctagtagagaatctgcctgtcaagattggaaatgttgagatacctacagactttggggtattggacgtagatgaagaaggcaaggatcccctgatcctaggcagaccattcttagcttcagctggagcagtcatagacgtcaggaatggaaaaattaatctgaaccttgaaaaaggcatcaagatgaagtttgacatcagagaagcttcaaagaaatcaacaacaggaggtcagagttttggaattcaagatatggatgttgatgaagaaacagaagctgaaacctcaccaaaagtcaactatacttctcaactcagcaagctgaagagaacttttgaccacaagaagagagaaacagaaaggctatctcagactgaagatcctgaagaagatgactggtatgagatgagaaaaaaatttaaatggcaaagcagagtcatagacggattgtcttcaagggtgatgaagctgaaagatcaactttggatatttgaaaaaagagttaaaaagttttcagatggtattgacccagagaagatggaaactgcactagctatcaagaaggacgaaaatttcacaacagaatggtttgcaccagaagatcagaaaggagttcacttagaggaaagaagcttagggagcaagttgttgagtgaggaggaaactcctattttgacttattctctaggagtgcctaaacagcccaccaacccctctgctgaagaggaacacttgacacttgattctgttactgaagaacttgtggaactcaggatagaatacaaagctcaagaggataccattggagagctaacttacaaaatggaaggactgaaccatgcaatcttggaacttcaaaaaatggttacaggctacaccagttttgaatttgaggattggtcaaaagaacttggttcagaagaagaagactactctgctgctcagaaaaatcttattttgaagaaaaatcaaatgagtactcatcctaccatatctcaagagaggatgtagagtatgactcaagcactgaaaattcatccactgaagataaggacttctctgttcctctcttcaacctttttcttactaagcactgtaagagtcaagcttaatgacttaaaacaagctcacttgggaggaagtcccatgtctatccatgtaaataactttctatttttcttgttatttttgatgtttttgtttaagtgttttaggtttgttttagtgaccctaagagagtcaacggtcgagtaaattcaaaccaagtcaagaaaaatctcaaccgttgatcgagtagaatgaggaggagtattttgagccattgatttggatgaccaaatgagaggagcattaccgtcgttggatcgagtgactttcagaagttaattttggtccgtttgatcgagtaaacaagaaagaaaagttccccgtcgttggatcaaatttttcgcacttcaagaggatgctcgatcctttgctcgagctctcattatttgaagaccatggcataacttcgtgaccccacttgttcccccaacactcttttactcaatggacaaagcgattacccatgcccctcaccatttataatcaacttttctatcccttcccaaagaaaccaaacaccaatctcctccacccattgaattcgacaaacccacttttgaaactctctctttcatcatctcattttcgcaacctctccatctctcacaaagcttcgaagtttcactccaaactctccctatcactcttcacgaattcgttctcacttcatcatacttcaccaaagttactcgatcacttccaagctcatcctcaagcactcaatcggtttcaagctccaaatttcatcaccaaataaactgatccccttaccccttgatacctcttggagagttgtttttaattgcttggttgaaactcaccaccatg

SEQ ID NO: 29685 - DNA, 3003 bp, Unknown
  misc_feature (1)..( 3003): 2750-1469P.txt file - cDNA_ID_3021195; gDNA_ID_2214686; Annot_ID_189345
aggcagccattccctaaagcaactacttatcgagcatcacaagtattggaacttgttcatggtgatctttgtggtccgataacacaatctacaactgctaagaaaagatacatactcgtgctgatcgatgatcacactcgttacatgtggtctatgctattgaaggagaagagtgaggcatttgaaaaattcagagatttcaagactaaagttgaacaagaaagtggagttaagatcaaaaccttcagaacagataaaggaggagagtttgtctctcaagaatttcaagatttctgtgcaaaagaaggcatcaacagacacttaaccgctccatacacaccacagcagaatggagttgttgaaaggagaaatagaacgttgctaggtatgacaagaagcatcttgaagcacatgaaaatgcctaactatttgtggggagaagcagtaaggcactcaacctatatcatcaacagagtaggaacaagatctttgcagaaccaaacaccatatgaagtttttaagcaaagaaagccgaatgtagaacacttacgtgtatttggatgtattggttatgccaagattgaaggtccacatttgagaaagcttgatgataggtcaaagatgcttgtttatcttggaactgaaccaggctccaaagcatatcgtcttcttgatccaactaaccgcaaaattatcgtaagcagagatgtgtactttgatgaaaacatgagctagaagtggaacaattcagattctgaaactcgggacatctctggaacattctcacttaccttaggagaatttggaaacaatggaattcaagaaagtgatgatatagaaacagaaaaaaacggagaagaaagtgagaacagtcacgaagaagaaggagaaaacgaacacaatgaacaagaacagattgatgctgaagaaacacaaccctcacatgctactcctctgccaacattaagaagatcaacaagacaagttggaaaaccaaattatttggacgattatgtcttaatggcagagatcgaaggcgaacaagttctattggcaattaatgatgaaccatgggattttaaagaagcaaacaagttgaaagaatggagagatgcttgcaaagaagagatcctgtcaatagagaagaacaaaacttggagcttaattgatcttccagttagaagaaaagtcatagggttaaaatgggtttttaagatcaagcgaaattcagatggcagcataaacaagtacaaggcaaggttagtagcaaagggttatgttcagaggcatggtattgactacgatgaagtatttgctcatgtagctcgtattgaaacaattcgagtcatcattgccttagcagcatcaaacggatgggaagtacatcacttagacgtcaagaccgcttttctccatggggaactaagagaagatgtttatgttacacaacctgagggcttcacaaataaagacaatgaagggaaagtctacaaattacacaaggctctttatggtttaaaacaagcacctcgtgcttggaacactaagctgaacaaaattcttcaagaactgaattttgtaaagtgttctaaagaaccatcagtgtacagaagacaagaagaaaagaagcttctcattgtggctatttatgttgatgatttacttgtgacaggctctagcttggatctaatactctgtttcaagaaagatatggctggaaaattcgaaatgagtgatctgggacagctcacgtactaccttggcattgaagttctccatagaaagaatggcatcatattaagacaagagaggtatgcaatgaaaattatagaagaagctggaatgagtaactgcaacccggtcttaataccaatggcagcaggattagagctctgcaaagcacaagaagagaagtgcatcaccgaaagagactacagaagaatgattggatgtctgagatacatagtgcatactcggccggatctctcttattgcgttggtgtactaagcaggtatctacaacaaccgagggaatcacatggaaacgcactgaagcaagttctaaggtatctcaaaggaactatgtctcatggtctgtacctcaagagaggattcaagagcggattagtaggctatagtgatagtagtcatagtgcggatttggatgatggaaaaagcactgccggtcatatcttctatcttcatcaatgtcccattacatggtgttcacaaaaacaacaagtagtggctctttcatcttgtgaagcggagttcatggcagctactgaagcagccaagcaagccatatggttacaagacctattcgcagaagtgtgtgggacaacaagtgagaaggtgatgattcgagtggataacaagtcggcgattgctcttactaagaatcttgtctttcatggtaggagtaaacatattcatcgaaggtatcatttcataagagaatgtgttgagaataacttagtcgaagtggatcatgttcccggagttgagcaaagagctgacattctaaccaagccacttggaaggattaagttcagagagatgagagaactagtaggagttcagtgtgtgttggaagatgacttcaagcttaaaggggagtttgttgggataagcatgaagtcaataaattagggaataaaagttatgttttaaaataggattaagataaatctttaggagtaatctaaagatatgttaggagttatctacatcttattctattgtgtttgttatcatccctctcctatataagagttgccaaagttgtggtaaaccttaagagatttgagagagagattgaaagctttgttttgagttattttcaaagctaataaaaggagtgcttttatatttgatctaagtattcaaatctttaaagttgtggctaaacttcagtttgtgtttgcttttgtttatcaagattgttcttagactttttcgagttaaaaaacttgtgtgttggagtcatcatcgtgatcaatg

SEQ ID NO: 29686 - DNA, 3003 bp, Unknown
  misc_feature (1)..( 3003): 2750-1469P.txt file - cDNA_ID_3021207; gDNA_ID_2214687; Annot_ID_189356
tctagagatagtaaaaatgaggaaatctagaggagtttccgcaacttctactgaatcacactgcgaacaagttgtggttggctttgttgggtacccgaatgtggggaagagttcgacaatcaacgcattggtaggtcagaagcgaactggtgtcacatctacccccgggaaaacaaagcatttccagacattgataatctctgaggatctaatgctctgcgattgccctggtttagtcttcccttcattctcaagctcaagatatgaaatggttgcttctggagttcttccaatagaccggatgaccgagcaccttgaagctattaaggttgtggctgaacttgttcctcgacatgccattgaggatgtgtacaacatctctctacctaaacccaaatcctatgaacctcagtcccgcccacctcttgcctcagagcttctaagaacttactgcctctctcgtggttatgttgcctctagtggactacctgatgagactagagcagctaggcagattctgaaagattacattgaaggtaagcttccacattttgcaatgcctccagagataacccgagatgatgaaaacgagacagcggatgacactttgggagccgaaacaagagaaggttcacagactgagaagaaaggtgaagaagctcctagtcttggtcttgatcaagttctagatgatcttagctcgtttgatcttgcaaatggacttgtgtcttccaaaacgaaacagcacaagaagtcacataggaaacaatgattcggtcttgatggaacgccaattctgagagttttcctgaaaccgatcaacaaatgctcgaatatatgatacagttgtggatttttcttattgtagaaatcgtgataacattctaacagctgttgtttagatattatgtttgagcaaatactagtgatatcgataaagtttcaacttgatgctagtcaatatattgatgaagagtccttcgaagcaggtttggtagttgtaatatattgccattgagatattatagatcactcactcattgtgggtttgtttgttttctatttgtgggtttgtttgtttttaaatatgtgtaaaatcttggcctgttacattggctttataccataaataacaaaaaaaaaaaaaaaaaagatcactcattcatatgcaaagcaactcaaactacaattttcatttcccagacttttattgtattttttcaatttaggaatcagacttttgttttagacaaaaaaaaaaaagaataaacattttgtaacctttatattctccagcatcactcttgtactaaatcaatgcacatgcaaggttttctcaccattgttgatattttcattttttgctctatttcatagctttggactttggacaaattcaatagattcctcaagctttgtcacttcatctaaagtatgtcatcgccgtcttttaatgagcaaacaaacatatcagtaaagaagtcaacaatttatttgcaattggctcaaatttgagtagctcaactcttctaactcagaattttcctaggttcttcattgttttaaaaaaatttggcaaagggaaactttactgattaagctctttttgtagttaattacaaaccctctgaaatttaaattcatatataaaaaagtgtaacatccagattgtacgcaatgatgaatgagtttcattatttccattatattagtcatttttcttcatagattatttctaaagcttccaaaactgaaattggcggtttgtacgaagttaatctgaattgactaatgtcgtttctgttgtagatgacattcaatgcattagaaatcctcatttcattacgatttttcttcaccattcattgtatatttattcatgagcaatattgtttattccacttttatgtattgtaacatggatattattagcaatattttgatgatggagtttcatgtgttatattcatcaatgaacttaaaattgactgaattcttactttctagtaaatgtagttactgccatttaagaaccgaggacatgtgaccgaacttttcttctctacgtggttttatctagtctcaactctcaatttggatgatcaaaaccaatgtaaaagtcttatagcacttattggtgaccttaaattcgtaggtacattactagattctgtactgtaagatacatttctatatgttactgcctaataaattaaaacatttataaaaatacgatacaaacatttgaaagggtacgatgtcaaaaaaaaaaaaaaaaattttgaaagggtacaaactctgagaaagtgtgtcaaatacaaatagttttctaaaaagcgtatcaattatcatagtataaatcaccctttataaatcaccctaaattttcctagaaaacactacaatttgcaacatatgtctctcacaaatccaccattaggtatataaaataatcaacacaatattttaagctaactacacattaccaaatcagttcagtttcatgcgtattgtttgcattacataaatgatgaaacaatttcttagtacaagactatatatagcttcaatttcgttactcaaatcgaaatagataattgttttatttcctcaaataatttctgttgtttttatagtaattaagtaaatgataaaaatgatttaataaatgtaattatcttagcttaaagagagagagataaataaacaaagggcaagttttttgattgtttggtgttgagtgtctctctgtccttattcctcaacaaaaaaaaaaaaactgggaagaagaaagaacaaactcattttcaaattctccgaatctctctactccaattaacttttttccgggaagatctcaccggagaaaagctagctagggtttctccaccgtgaagattctagaagcgagaatttggaatttgctaattaagaagatgtgttacgatctttcttaattaaaaaagcattgaaattgacgaatttagggttgtgaaaaatatg

SEQ ID NO: 29687 - DNA, 3000 bp, Unknown; identical to SEQ ID NO: 13986
  misc_feature (1)..( 3000): 2750-1469P.txt file - cDNA_ID_3021211; gDNA_ID_2214687; Annot_ID_189352

SEQ ID NO: 29688 - DNA, 3000 bp, Unknown; identical to SEQ ID NO: 13991
  misc_feature (1)..( 3000): 2750-1469P.txt file - cDNA_ID_3021232; gDNA_ID_2214688; Annot_ID_189363

SEQ ID NO: 29689 - DNA, 1814 bp, Unknown; identical to SEQ ID NO: 14002
  misc_feature (1)..( 1814): 2750-1469P.txt file - cDNA_ID_3021265; gDNA_ID_2214690; Annot_ID_189394

SEQ ID NO: 29690 - DNA, 2166 bp, Unknown; identical to SEQ ID NO: 13998
  misc_feature (1)..( 2166): 2750-1469P.txt file - cDNA_ID_3021306; gDNA_ID_2214690; Annot_ID_136726

SEQ ID NO: 29691 - DNA, 2094 bp, Unknown; identical to SEQ ID NO: 14000
  misc_feature (1)..( 2094): 2750-1469P.txt file - cDNA_ID_3021306; gDNA_ID_2214690; Annot_ID_189382

SEQ ID NO: 29692 - DNA, 3003 bp, Unknown
  misc_feature (1)..( 3003): 2750-1469P.txt file - cDNA_ID_3021353; gDNA_ID_2214692; Annot_ID_189423
agaagaagaagaagatcgttagagaattgtttgactcggactgagtttggggaaaacggtaggagcgagtttttacctttaggttttttttttttgtttgacgagagagcgtatgagtgagtaataggattttttttttgggggggctttagatgcgatattataataataaaataatatctatttttaaaataaaggcgacttgaaattttgcactgtggcgggattttttcgtgaaggagcgaaataatttgacacgtatgggaaagaagagcaacggacggaataatggattgtgctcttcaaatcctgaccgtccatttgacacgtgtacctgagcttgcagatctcgcccttaattacattcataaagttcttcaccaattgacgcatttgctttctaataaaccccaaatattgtttgaccagaagagagaaagataggaaaactcgaaccgggtttgaccagatcaattagatttaaccggtaccggttatttacattttttttcccctgtaaaatattcccctcccctcttttctctcatcgctcgctgcctttctctttcacagtcagcgctcttgaacggagaatctcagtcgcgccgtcaactttttgttgagaagagatatcatctgttttcgatccaaagaatagaaagcttggattccgaaatctccctttttgcttccccaattcgttttcctttacaagctcggcgcttgatctcgctatctctcaggtaggatcgagctatatacaacagtttctcaattttactagatataattgctttagattttcaagtgctcttgcgtttctggggttttgttaagattggagtttttgtttcttattctcgaaatctgttgattgattcgtttgatccatcaatgtttgtttagaaattcaaaaagcatgcaaatttgcagattctttgtttgccttgtgcgaattctatttccgtattccgtatcgaaactaaaaccctgactaggttatgtttcaagtgtgttttttagttttctatttgagggatattttaactaactccataagtttggggttttgtgaacagccaaaagtcttttctttcgtgacatcagtttcttggtaaaggaattcgatttcttcacctaatagagaatttattttagaactttggactgatatgttgaacattgatgctgatttggcagaaatggatcgtttgatatgatacgtatctacatttgtagaactgattttttcacctagaatttgcagcaagtaagactagaatgaataaaggggaagcttgtattatttgttgttaaatgagttgttcaaagagctttgtttgatatcattgttgcttctttgttacatgtggatagtttaggatgctacttgttaagtagtaagtactgttaaggtgtgtagaacttatatttcactgtgaaacgttggagtaggttgccgtttgtgccgttagtatatcttgttttcgccttttactgacaagacttatgaatgttttgctttcccgtagagagctgagagctgaggatattggaaatttggaaggtggaatctcaaatggctgaacttcctggtcaaataagacatataggcggtcgaatgagtcaactgctagagcagatatatgggttttcgagaagatctttgtttcgggtcatatctatgggtcctataccttgtcatattgcctttatcatggatggaaatcggagatatgcaaagaagtgtggtcttttagatgggtctggtcacaaagcggggttttctgcgcttatgtcgatgctgcaatactgctacgagctgggtatcaagtatgtaacgatatacgcatttagcatagataattttagaagaaaacctgaggaggttgagtctgtaatggatttgatgctggaaaagataaagtctttgcttgaaaaagagagtattgtgcatcagtatgggattcgggtctattttatcggtaacttagcgcttctaaatgaccaagtgagagctgctgcagaaaaagtcatgaaagccacagctaagaatagtcgggtagtgcttctcatttgcattgcctataactcgacagatgagatcgtacaagctgtcaagaaatcttgtattaacaagtcagacaatattgaagcatctaattataaacacgaggatagcgatagtgatatagaaggaacagatatggagaaccaagagaagaagatacagttggtggatattgaggagaatatgcagatgagcgtggcgccgaatcctgatatactcatcaggagttcaggagagacgaggctgagcaattttctcttatggcaaacaggtaatacccagctctgctctccggctgctctgtggcctgagattggtttgaggcatctgctctgggctatattgaacttccaaagaaatcattcatacttggaaaagaggaagaaacaattatgattgtcttgaaaggagactagtgaaggatatacaaaagctctcttctctatttggctttgtaatgtgatgtgatgctcttgtggtatactatcaaaaggaaacttgggattacatagaacaagcaatgtattttacacacgaactcatttgagtttttctttatgaatccttaaccaaaactccaaaagtcctctctaaagacatcttacttcctgttctgtcttgtaagatccagaatcttaacatttgtgtttcacgagtgtttttttctcaaaccaaaattaaaccaataaatttagttcgttaatggttcagattgattgcatatatcatggaatttcggtttagcgatattaaaacaaggaaaaccgggattggtatccaaaaccgtaccgggcgtcaagtctggttcggtaggttagagtacacgcttgtggcgaacttgcaattggaaacctaaaaagtcgcgactatgctctctgcaaagatggttctacttttggcttaaagagcaatgttttcgagtctttgccatg

SEQ ID NO: 29693 - DNA, 3000 bp, Unknown; identical to SEQ ID NO: 26126
  misc_feature (1)..( 3000): 2750-1469P.txt file - cDNA_ID_3021365; gDNA_ID_2214692; Annot_ID_189420

SEQ ID NO: 29694 - DNA, 3003 bp, Unknown
  misc_feature (1)..( 3003): 2750-1469P.txt file - cDNA_ID_3021375; gDNA_ID_2214692; Annot_ID_189416
taaagattagatattaagaattgagtttagtaaaaaaaaaaacaatgcattgaatatactaacggaaattatagttggagtcttcttattacgatttcagttatattggccacggtgacgaacaatctaacgccataagaaaatgtattgaacaagaatgatcaaacatattttgagtttttgtttaacgaaaactatgcattaagacttttatatttttcattaaactaaacatatttcgttgttaaatcgaacgtaaaaaagtttacgggaaaacatccatcgtttctggtgcatgcaaatttctttgctctctagaggttaattctcattttggaaatccattttgatcccgtagacatctaatttctccatcaagtcatgtttggcgtaaacgtgtatgattttgtcttgttttcttcaaagcttatcactttggttgcttcatatctaacatttctcgtatatgctatagactcgcatccatttttgtataaccttttttatcttgattttaaaaatttcttttccgacctctataatttataactataaataaaaaactgtctaaattggattattaatcgactgaccaacgttaaaacttaaccaactaactgagagggcataatggatatcttatttgacaaaattatgacgcctcaattacccccttatagtggcgtcatgatgggaaccaaacgattaaccccctcaacatttgtgtttctcatattacaacgatgcaaaagttgatcgcgaaattatggctgcatttaaatttttaaatattgtttagtgttttctaggaagagtaataatagtaaatataagaattttagaatttcttctaaagtgaggatcgagtggacttgaactcttattcacgatactcctccaaaaaaaactgttgttgtaaatgtaactcaatatgcagtttatacaacaaattttttacttcgagtcatgccaaatttagaacatcacatacattcaaccaaactaacattaaatttatgtgttgatgttttagtgccactaatatgatttgttcaatagttggtacaagaacattaaatgtttgtaagagagataaaaaaatggacatttttatagtatttttgcagcaaattttcggcgggttggtaaaagtgattttgtatataataggtatcagacccgtttagaatttttggtcattcaaaaatcattggatcggattatatataatccaacttttccaccggatatatatttaaaagtcacatacaaatattactaaaattggattgtatctactaattacatttatatatttaataaaacaaaaattagaaaatttggttttgatttaaatttatgattctcctttcatcttttttaaactgttttaaatcatcatataatacataaagtgaaaaaaatctcaattttttcttatgcatatattgtgatttcgaaattttttaaaacggacatgtattacttaattaatgaaaagtgtgttttcaacgtcccacatctgctataaagtttagacaatgatttagattcatattatacataaaattaaaatgaatccaacttcgaatgagtataaaccttaacataacaagcatccaaatttaaaaattgatgtacgaattaaatcattggtaaatatgcttcacattatatttatatgatctgctgaacttatgttggacttttgaattgagtagagtaaagggaatcatgacctcttatttttcgtcattcaagaaaaaagtcagaaagaactagagaagggctgctaaagaagaggaaagaagaagagttgaggaagagaaactcatccctagtctgacagaagaacaatttgcaaagaacatggacttgatgaggaaaaaagttgaccgctttcactgactacatggtggtaaagaaggtggaaaaaaagaagcgaaagatgctaggggcattcagaaagataaagcttgatattggcaactaagaaataagtataagaatgttcagagattcgagaaatttgacgaagaggaagagtaattctgaaattctatctgattactttctatttagtctcttgtacacttgtaggacgaatcttattttgtgttctaaaaccattatgaccaatggtagtgtgataccatttaaatagtgaggaagaaaggctggaaaaacaattaagtaacaataaatagattttgcgactattgaaataaactggtttgcaggtgatcgaggtttgattggaattcaatagatcaatatccgatgaaataagattgatttgctttctctctctaaaagatttaagagagaagatagaaaaaatcatcgcccattaaaaaaaatagatattaagaatttgagttttataaaaaaataaaaattcaatgcattggatattactaaaaggaaactatagttggagtcttcttattacgattttaattatatatagttggccatttttcttcgaatctaaattacggacccatgaggaaaatgaccgttgtctccgaacgggcttcgtgggcttattgtttgtaaactcacggcccattgacgtcttcttatttgattcaagaccagaaaccacgttttgtactgtagtcttgaattgctctgttctgctgatagaatagcaaagttctgttctgctgataaattagcaaagtaaatcttgaatgctagtttgtctttttctctcatgttatgtgtaagaagatgatgatgactctgttaggtaagaaagtccaactttgtaatctaatcagatttagtctctaattgtttacttgtgtctacatataaaagttgcaagttgcagatgttaagaactaagaagtggtatctgcagattttgggtattaaggaaagtttccccctttgaataaataaggacatatactaatgtaaaggttcctcctttttcacaaatcaaaatgtgtttctttgtgttctagtgaaatccaatccattgtgtctctgatg

SEQ ID NO: 29695 - DNA, 3003 bp, Unknown
  misc_feature (1)..( 3003): 2750-1469P.txt file - cDNA_ID_3021379; gDNA_ID_2214692; Annot_ID_189415
atgctgcaggcaggaaaaaaaacaaaattggagataaaagttgtttgatggcagtatcaagttacccaaagctgagactgaaaaacaaatgtgtttatctccattacctcttggtatataagtttcctcttcgaaggtctagaatcatctgcatcttccatagttatgtcttcattggttggttgggcaagcagatccagcaattcaggttgtccaagtgatttaacataagcctcaactgatacagaaacattcattgataaacttcaacatcatgtagcaagacacacaaacagtcatgcaaaaccaagcttcgacaacttctatgaaaaatatagatgattcacatacttgtctccgcagatattccctcttcagtggccttccgtttattttccctatcattagttacaagcaacacctgagatgtatcccctagatgcttctggtaccatagagtagcgacgcgaatagctgaattccagataaatttaaaattttaataacagatgcttaccaagagaagtatgtaagttcatcatcaagaaagtaacatgatgttaacaaacaaagaaggtgattgaatagtaaataaaacctctatcgttgtggtcatttgcactctctttctccatggcttgcacataagtatccctgtgaagagtttagtaaacgcgagaaaacaacgataaggacacggagaaaagcgtttctatagcttagtaggttccagtaaggagagcatctaatcaatataaccgaacagaaattccaaaatcattgaattctttatgttcttttgtccacctaaaatctggttaatctaaaagctaaaagttcgaacaaggtcttcttacttgtggacatgattggagaaaacatagaattgtctcgctggattgctgcagagaagtctgattctattgtaaaccgatctattcctgttcttaacttcgtccaacaccacagacagaacaacaacagtgtctatagccttattttccaacaaatcaatctaccagaaacaaacaaaatattacattagtaatacccacaagctcaaaacttttagcttatgtaatcaaattaaagaaaaattacttggtgaagaacgacgttggtatcaacaacgattatcttagaggaagacaaacgagcagctgaagaatcacaagacttgcaagagaaagctccacagtatatgtcatctcgtagataaacctctcttacttgctgtcgcagacaaagagttaaaagttacaataacgaacaaaaaaactcggaaggaagaagaagaagaagcatagagagattgaagagaaaccttttggattcttcctcctctggttttcttattgaaaactttgctctgcaacatcttcaatttcttgctggaaaacttttcgatttcgccggtgaagaagatttcagtcgtcagaacggaagagaggaagaagctttttaaagcctttaaatttaaacctaagccagccaacttgactactaaaattttcaattctatagctccttattcgttcatggttaacgaaacgatgacggttaaaaccggtttagttactttttctctaaccggctcaatctgattaaaccgaagtaaacacagcaatacagctagtaaactcggtattactcttgatggaaaaaggtcaaaaacactctttttattttaaccaaaactaaccaatttttgcaagataatattgcatacctaagatcatttaccttgatctcatagaaatttttttaatgatgcatctccaattataccgatacaatttctagtaaataaatcagtgttcaataaagtgggataggcgtcgtctaggacgcctaggcactaaacgcttttataccgttttgactttttcaaaatcggttctattaatcagtgagatagatttggcagactatgtaaacattaagcggattagactctcattaggtgggttaggctaggcggatctaatcgtctcttaatattttttaaaaatttcaaaaatatattttaaataattttaaggacacctatactttttattattttattttattttactaaaatgttaaattttaaatttatttttaaaaatttgataatttccgttttttataatagtttttgcaacagttcagataatagtatataaatatatatcgttttattctaaaaccgattaaaccggctaaaattgtctaggcctcgactaagcgttctatgcgctaagcggagggtcaccgccagctaagcgcctaacattttcttaaacactgaaataaacacaaaattatatgataagaagtacgattaaaccaaaaataatcgtcacaatttttgccactatgtctaatgtatatgtgattgttttacctttaacaaaagaaaatgtgatttatttacctttaacaatatgaaaatttgttttttttaacacaattagtaattttagtgatattttcactcgaatttgttgatagcaaaaggtgtttagaagaccaaaaagcttaacgcatattggctcggctcggccgaataagttagctggacagtacggtggggcacacgaagatccttaaaccgcagcctcagacaaaccttactcgaagcaaaacagtgtttggttcgttcgtgggggtttaaaaaaaaaaaaaaaacttttgtatttttttccattaaaatatttttttgttaagaagattcaaaaggagaacgcgttagacacactaagggtgggggcaagggaggagaaactcgccggacagagacggagatccctaaaccgcagcctcagactaaagcttcgcatcttatctccgatccatcgttgacttcactcttaggtaaattcgaaaaccctttctcttatcttttatctcccaattcttaaattcgatgattgactcgtcctcctctgttttttcacagctgatcatcatcatcatctctatctctgttcggattctccataattgatccggaccatg

SEQ ID NO: 29696 - DNA, 3000 bp, Unknown; identical to SEQ ID NO: 14008
  misc_feature (1)..( 3000): 2750-1469P.txt file - cDNA_ID_3021383; gDNA_ID_2214692; Annot_ID_189414

SEQ ID NO: 29697 - DNA, 3000 bp, Unknown; identical to SEQ ID NO: 14006
  misc_feature (1)..( 3000): 2750-1469P.txt file - cDNA_ID_3021394; gDNA_ID_2214692; Annot_ID_189409

SEQ ID NO: 29698 - DNA, 3000 bp, Unknown; identical to SEQ ID NO: 14018
  misc_feature (1)..( 3000): 2750-1469P.txt file - cDNA_ID_3021398; gDNA_ID_2214692; Annot_ID_189407

SEQ ID NO: 29699 - DNA, 2225 bp, Unknown; identical to SEQ ID NO: 14026
  misc_feature (1)..( 2225): 2750-1469P.txt file - cDNA_ID_3021416; gDNA_ID_2214693; Annot_ID_189453

SEQ ID NO: 29700 - DNA, 3000 bp, Unknown; identical to SEQ ID NO: 14032
  misc_feature (1)..( 3000): 2750-1469P.txt file - cDNA_ID_3021440; gDNA_ID_2214693; Annot_ID_189436

SEQ ID NO: 29701 - DNA, 3000 bp, Unknown; identical to SEQ ID NO: 14023
  misc_feature (1)..( 3000): 2750-1469P.txt file - cDNA_ID_3021443; gDNA_ID_2214693; Annot_ID_189434

SEQ ID NO: 29702 - DNA, 3003 bp, Unknown
  misc_feature (1)..( 3003): 2750-1469P.txt file - cDNA_ID_3021476; gDNA_ID_2214694; Annot_ID_189476
aaaaattatcttcaatgaagactccgtcagatctccaacaaccttccgctccatagtaataatctctttctttaggttttcgtttctattggttagcaaatttacttattataaatagggtaaatgttgcctcccgggagaatatgttaacaaatctacgtatgaacatttagttattaagtaaaagtaaaatcaaaattttagctacaaattgagagattttgttttcccattctctaacatttaccggaaaaataaaaacagttactaatatttgagctaaacgaccgccacaaagggtgattccaacttatataaagaaggtcttgttgataaacgactaagatgtaaactgattcgcgtaagattaatatcaacggtcaaaatttaaaatctagtgttagaggtcaaccaactttgactgtgttagacaatccagctggcatttactattaacactgataaataatctcacacgtgtcaaatttccattcgttgattaaacagaagacatctaatcataaataggagaaaataaattgaggatgaagcaaaccaatcaatgattattaaaacttgattgtccttgttgctaactgctgaataatgattcttgggttctacatcaagaaaatgaaaatttgttggaattttaccttgttgattataaaattggatttttacgtttcgaataaacatcatactttacctagcaaacacacccttatttcacgaatcctcaaaacttaagattaaatgcctccaattccaaagcattaaatcgttggaagttaagagacttaaacacaatatttttcgtacatttaattttttgttaatgatatagctcgttaaacaccttgcctgaattccatgatttatattatcattagtaaatatacaaaaaaaaaaaaaaagattctaagaagaaccattattcgttaactagattaatgtcaacattccaacacagccatcgatgatgatgatgattcatcaagaagaagaagagatgccctcaaaacattcaatcgtcattagaagatccaaataaataaatcaagacaacttgcttgaattccattattcatattatcattagtacatatgcaaacatgcatgatttaatttatgataacttattatcagtatgcattattcattattcataacaatatcaaattaagaattcacaaccacatacagatgataaatcatgaaggaacataaccaagtatctcaaattccatgagagtaagtgacaattgaagaaatccggtttcctcaggaccagagaggttaacttcacggtaaaaatcaacccctttaaccgttggcaacaatgtgactcttctcccaacgaaataggtaccagttgaattcgttttgaaaacatctacatataaagattctacgggaaaattctgatcttgaaaaagttgtaattcttcatcaaactcaggatctccttcggttgctacaacctttgtttcatgtttctcgttttcatttgtccaagcttcaaccttgtattgatatgggcgaccattggtgactccgattgtaccaaagatattcacaagtagcttcacatcttcacctgtgattattatctttttccctcgcatttttcttcttttcaaataataaatctgagtagaataatatgtgtgattgatatgtcaacttaactacacctcaacaattgtttttgtggttttttctctcactaattcacgaaattcgacattttctaaatatatttatgttaaaatgcacgtgtttcatgttgtaattctttgtttataaacaagaaaaaatagatgctaaacaatgagaaataaatgttgtttgaataataaaaaaaattgaatgtttcttaataccatttcaaatactaaaaacaatgaaatatcatatttagagatttatttctatataatatctattttggtcatattcttagttatgatatttgactactattcaaaaacctaaccccaatatagtcaaaactatataaaaatgcagtaagatattaaatgctgttgaacaaaattcaatatcttatggcttgaaagtaaactagtaagatagctacaaaatgcatggtaagaagttaggataatcatattttaagaaacgaaaataaaatacctaatataagcttcgacacatacagctctttcttactggaaatcttgcatattccgaacatacatttttattttaggacggatatacctatagattcatttgcaagattgatttcctattgaaaaaaaacatgttgtggattcaaatatttgtcgctttttgttcattctcttttgtaatttcctaaacgagaggtcactaatccaaaaatcgttagcaattaactagaacatcttccatggttaacaccacctatcaattatttattttcttcaatgaaactttatgaaactctttccattttattaatttatatattaaagtttttgttcacactaaatttattgactcaatatatatctactttataactaaatactaattatttcatttactttttattttattaataatctacatatatatatatattgtttgtcttgtttattgtttttgcggtttgtatatttatatctcatattcatacaattttttagtatatatgcttaattaattaagatcgaattgtggcttgtttattatttttgcggtttatttatatgcatctcatattattacttttttaaattaatcgattaaaatttattaacttacgtaacatatttgatattgcataaattaaaaatcatatgtatataattctctttagtttaaattttaaaatgaataaagaaaaaaacaataaaatttgaaaactgaaaaccttttaaaacgaaaaagaatggctaagatgatgaatcggtctcgtacgggaaacacctacgttttggtttagtccggtttggttgaattcccagagactttgcttgaattgggtccccaatg

SEQ ID NO: 29703 - DNA, 3000 bp, Unknown; identical to SEQ ID NO: 14045
  misc_feature (1)..( 3000): 2750-1469P.txt file - cDNA_ID_3021484; gDNA_ID_2214694; Annot_ID_189469

SEQ ID NO: 29704 - DNA, 3000 bp, Unknown
  misc_feature (1)..( 3000): 2750-1469P.txt file - cDNA_ID_3021495; gDNA_ID_2214694; Annot_ID_189462
agataatgttcgagttttctccactaactaattcaaaaaatgatcatacacatactcagctaccaagcaaaacctcacaaaaaagcagaagcttttgagatgtcatcttcttcaatacttacaggatccaaagagaagtgtttgcagagagctgaaagaatcatctgcttcgcctttgaatccatcgtcaacttcttctctttctctattttcgaaattttgttcttctctttggggctcttcgctgtaagaaaacacactgcaatttcttcgatagggtttttgcttgatgtaactaacggtcctaacggacttccaactaacggcgttatctccatctataatgggcctagatatattagcagcccattaatatgttcttactatgggctttaccaccgaaagcaatcattaataaaataaaataaatgaattaacttctcagattcttcaaagacctagagtgtcttcgtcttcgacgacggcaaattcgtggaagctgtttcatcgattccggcttcactgaagcggcgtcgctcgacgtttattattccgacgactaggcctttgaggcagtttctgattaacttcaggcgataatggcaaacagaacagatccgttggcaaagaatataagaggaacgaatccgcagaatctggtagagaagattgtgcgaacgaagatttatcagcacaccttttggaaggagcagtgctttggtctcacggcggagacattggtggacaaagctatggagctcgaccatctaggtggtacctttggtggtagccgcaagcctactccgttcctttgcctcatattgaagatgcttcaaatccagcctgagaaggaaattgtcgtggagttcataaaaaatgatgactacaagtaagatttctaaccaaaagcttatttctgcgtaatctagattggatactgctattagccttgtcgtagttgtttctcaagtatacaggtatggaatgtctctcaaatctattggtcttagataatctactctcttagtttctgcagatatttgttcttgaattactgaaatatttactcttttggtttctgcagatatgttcgtattcttggtgcgttctatctgcgtctcactgggactgatgttgatgtctatcgctacctcgaacctctctacaatgactaccggaaagtgagacaaaagttatctgatgggagtaagtttcattttctttcgatggatccgttgtgtttaacttttgattgatttgttcactaactagatttatttctttggtttggaatagagttttcgctgacacatgtggacgaagtcattgaggaacttctaaccaaggattattcttgtgatattgcaatgccacgtttgaagaaaaggtttcttcttttgcatttgtctgaagctgaataattagtttttggtttctgcagtattttaagatggttaatttttcactctgatgataggtggacgcttgaacagaatggtttattagagccaaggaaaagtgttttggaagacgactttgaagaagaggaagaaaaggaggagaatgaagggattgctgatggatctgaagatgagatggtcagtgctttcattctgcaatagtttttatgtgatctgttttctgtttctatctagcagctctaagatgataccatcttcctcctcttttacaggatcagcgccgtaagagtcctgaaagagaaagagaaagagacagagacaggagacgcgacagtcatagacacaggtatctgaatccgtgacctttactagatacatttctatgctagttaacatttttcaaaaaaaaattctttgtgattgtggaagctgtttgatctagctaatgctcttgcatcatgtctagtactctgtcttttgagtgtctgtttccactatggcatctcaagccatcagcggttggatacagcttccgaaattaaatttgtagagatccttccaggtttctctgtactgacagtgttcagagagaagtattatggatcagacattattacaatccttaccctgatacagtatatggtagttgtcattgtgttactttgaaaaagatcagttaatcatgagagcacttcccatctagtttttagctcaatcaatgttttctttttgttacagattttcattatgattgatgttgagacttgagctcattgtttcatgaattataatttgaccatggttctgtgattggcagggatcgtgattatgacagagactatgatatggatcgagatcatgacagagactatgaaagagaacgtgggcatggtcgagaccgggatagggagagagacagggatcactatagagagcgagatagggacagggaaagaggcagagatagagaacgagacagaagagacagggcaaggcgcagaagtagaagcaggagtagggatcgtaagagacatgaaactgatgatgtgcgggatcgggaagaacctaagaaaaagaaagaaaagaaggagaagatgaaggaagatggaaccgatcatccaaatcctgaaattgcagagatgaatagactgagagcatcactgggaatgaaacccctcagggactgaactgtgaaatgaggacatctttatcaaaccgaaacttggttcatttgcccagctaaaccggttactacactgtgatcctactcactatagttttggtttttttgagtttacctgatccctctttaatgtagaacaaaatggagaatctgtaatggcattgtactgtatgttctctaaaccgtaaacgaattgtggtcgagaaattctgaatgtaacccggttcttgatattagttgtttttaaggtaattcagataaatataaaaacctatatgttatgtctacgtggcgatatcactttatgagtccatgtaaatcggacccaccaaaagcttataggtaaatgatacggtttcataatcattaaccatcacgacgcgcgtgctactcatg

SEQ ID NO: 29705 - DNA, 3003 bp, Unknown; identical to SEQ ID NO: 25430
  misc_feature (1)..( 3003): 2750-1469P.txt file - cDNA_ID_3021519; gDNA_ID_2214695; Annot_ID_189517

SEQ ID NO: 29706 - DNA, 3000 bp, Unknown; identical to SEQ ID NO: 14067
  misc_feature (1)..( 3000): 2750-1469P.txt file - cDNA_ID_3021523; gDNA_ID_2214695; Annot_ID_189515

SEQ ID NO: 29707 - DNA, 3003 bp, Unknown; identical to SEQ ID NO: 25428
  misc_feature (1)..( 3003): 2750-1469P.txt file - cDNA_ID_3021527; gDNA_ID_2214695; Annot_ID_189514

SEQ ID NO: 29708 - DNA, 3003 bp, Unknown; identical to SEQ ID NO: 25425
  misc_feature (1)..( 3003): 2750-1469P.txt file - cDNA_ID_3021531; gDNA_ID_2214695; Annot_ID_189512

SEQ ID NO: 29709 - DNA, 3000 bp, Unknown; identical to SEQ ID NO: 14051
  misc_feature (1)..( 3000): 2750-1469P.txt file - cDNA_ID_3021551; gDNA_ID_2214695; Annot_ID_189500

SEQ ID NO: 29710 - DNA, 3003 bp, Unknown
  misc_feature (1)..( 3003): 2750-1469P.txt file - cDNA_ID_3021559; gDNA_ID_2214695; Annot_ID_136789
aaacagaagttaattatatgattattttaacattatgttacattcattatatatacattattaaaataacacaaaaaaaaacgttaaaaatttgtcttaacaaaaattcattacatgctattaattttcatagatagtggatacatacgctatagtgacactgacatcttaaacaaaaatcaaatgtattaatttgtcttaactgtgttaagaaaattggacattgaaatattattcggtttgagttgaaattggcatttgacggatccgtggtttgcatggtgtaccaagcaagaatcgttggttaaaagaaaagaacacacattaattatcatgtttatgcgtaattgatatgtaagttaagtagattatatgcttctcaaaactaggtatttagacaatgagattagttagtcttaattattaaattaatatcccgatcttatcatataagccaaattatacgaagattcttaagaataatcattttaatttcactaacctctctctatctctctcttcattatccgaattaagccaatcgaatccttttcaacccgacgggtcgtgaaattccccaaaagattcctctttctcagctcaatttccaaaagctccgacctttacgatcctctagattctcggcgccggtttctcggagtaaataatggctcagttcacgggtcgggtcgttggagactacttggtgggtcgtcaaatcgggtcgggttcgttctctgttgtttgggaagcgaggcaccgcgttgacggtactgaggttgctatcaaagagatcgccatggacaggcttaacaagaagctgcaggaaagtctcatgtctgagatttttatcttgaggaggatcaatcatcctaacatcatccgtctgatcgacatgatcaaggtttctttttttgatttgaagtttcgatttttttggtcggttctcattttttagctgagaattttgaattgaggttagctttgttactatatatgtttctcatttgctcatcccaatgccaattttgtgtcataatgccatgattttgccggtgaattttggatcatatacatggaattaagcttcaattgtggaacaaaatttgggtctagtttgatgttgttctgatttgggcaatgtgatgcagtctcctgggaaagtacatttggtgttggagtactgcaaaggaggtgacttgtctgtgtatgtccaaagacatgggattgtccctgaagctactgctaagcatttcatgcagcagttaggtaaattctagtggcacttacttactctctgttttgttgtttttcttggttgccagaaacatgttttgtaatctctgacgggttttattttatgtaacagcggccggcttacaagttcttcgtgacaataatattattcaccgagatttaaagcctcaggtgtgtctgattctcattcctttcatttcaatgatcttctgtgcaccaggtgttttttattgttaatcagattagtgtgttagttgatctcactgttaaatgatacaactttcagaatgatgaaaggatgctgtagaagggtgctctgttagtttccaataaaacatgtttttggatatgttggggtttccttgtccaagtcttggagattccatctttgttgaaatttaattcttaaggttctttcgtttttgaaacagaatcttcttctatccacaaatgaaaatgatgcagatctgaagattgctgattttggatttgcaaggtattgtcatcagcaccccttgttactagatcaaagagtgtaatatgaatgaattagagaaggtttcaaatgggctcaagctgcttttgaatgtatattgtcgaatttctaggtaatttcattgttttcttgggggattatacttattatacgcctcccccattttgaacatcgctcttttcttgacgcagatcgttgcaacctagggggctcgcagagactttatgtggttcaccattgtatatggccccagagatcatgcaactccagaagtatgatgcaaaggtcagacctttctcttactaagctacctaggcccttctcttgacattatctccttacaatcctagctgaatacacaggcagatctctggagtgttggtgctattttatttcaacttgtgacaggcagaaccccttttacaggaaacagccaaattcaggttttgtgttctgtctcattgacttctatattatgtatgtgtttgtattctggtgcattaaactaatacgttctccatcgtgtgtttacagttgctccaaaacattataagatcaaccgaattacattttccaggggactgtagagatttaagcttggactgcatagacctgtgtcagaagttactgcgccgtaatccaggtcagcactaattctgcttgaagtagtggagactactattcttttgcatgaaaccatatgccccaggttctattggcatgtgtgttgatctaaaaatgtgaaattatattgaattgtggccacgttggattggcgattcaagcattttataatttgtaccgtgttcagagttttttgtttgattagcacaattaaaaacacaaattgtactgttgccatttcagtctgtcctaactttccgagtaactcatatcaacgggagttgcggagttttccagaacttggaattgtgatttgaatagcggtttatactaaactctagtcatctcctacagttcaccgcgtattttattcgagagagcatggtcctactctgtgtgtatccaaatacgattacaaatcattcttgaatatattgtcttttgcagtggaacgtttgacatttgaagagttctttaatcaccctttcctttcggacaggcagtcatatgatttctccaggtagatgtgacaattgtgggggctaatgcttttctctattttatgcagaaatttgtactgattaaactatctgtgctacaggagtagattggggttaagaacaatg

SEQ ID NO: 29711 - DNA, 3003 bp, Unknown
  misc_feature (1)..( 3003): 2750-1469P.txt file - cDNA_ID_3021559; gDNA_ID_2214695; Annot_ID_189496
gatgttctagtatggctctaaaacattcatccaaactacatcattggtattatgttattgccatggtatattcagatggatgataataattgtcacatatatagcgttattgtgaaataggataccaaaccaacttcatacaagaactacaaattatatacataaataatcaacaaataatatatagactactaaaattcaaaatgcttcagaaaactaagaattttcacataaaataaattctaggaattttccaaacgagaaccattctaaaagatgtgaaacaccgaagctcagcaacctcctccgcctccgcctcctcctcctcctcctccgcctccacctccatccccaccgccaccaccaccaccaccaaaacctccaccacctccatcaccgccaaagccacccccatttgctccatcacctatttccacatcttcacctccgccatcctctcctcctccaccatcacctccttctccgcctcctcctcctcctccgccgtcaccaccacccccacctttgcccccggctccagtcaaggccgcaagaaatatcaaaacaccaacaaaagaagcaatagcaatgataattactatccaagtatccatcttatgcaaaatcgttacgtttagctaccttcgattgtgtatatatagtttgttgccgagggttggctgcagacaaataacgtgtgtcaagcttgtattgacttaagacttttattattcatatgtttctatattcaaacttcaaaggttttcattacgggccggtaaaacttcatctattaattaaaatgtttctatattcaaagttttcattacggccggataatacattccgtatgatgcttgctttctttgataatgccaactatgacaaatcttatactaataaatatagatagctatatctttgtcgttgataaaataaaaaaaaagctatatcaatgtttgtctaagaatatatcgattgactcggtcagttgaagttgaattccaattggtttaaccgttcaatctatgtgacatatttcacacggtcttgaccagaatcaaacatgagaaagaagtgcatgcacatatgatcatatcagttttggataatttagccttgttttgaagactttgataattatgtggaagtatttatagtctggtatatatataattatgaaatgtctacaaatttattggatatatacgccacagtgacatgtttgaaaattcagtatatatgttgtcttcattgtttagaaaatcggacagtgaaatcttttttttttttttttttggtttatgtgaattactttgacgaaagttcaacagattatatgaacagtgaaatatttttggtttaagctgaaattttgcaagtgttatgattcgtatatttatggcttgcatgccaaacacataattcgaggaaccttaatatttaaactaacatcaataatcatttgacaaggacgatcagacaagtcacatttttaactcgacgaggtatccgaataagcccaatcgaattcttttccaacccgaatacccggtgatgtaatatactctaataattatacttttctgttcataaaaattgaatattctagtttttgttgtttgttctacaaaacttgattttctagcgttttcattttatttttattgatatataataataaatcttaaacttgtaatgactgaaaatattaatcattaacttatttttggttaaagtaggtcaagacgcaagtggtttctaatgcaggtggacttccattgatgattctagcattgaatgcagcgttgcgtatccagactagcgtttggctcatgtttgttacttagtatttccttatgttttgcttgcgctttgctttttagttaagtttgcttgtgttagaaaaccaaaatcaaactcttgtgttagcttagattaaatgaaattgtgtattcttgatgatcctaagtactagattgataaaaatattagtctgttattagttagaatttaacttactaaaacgcttgtaaaacgcaagatcacccatcatcgatgatgacaagcgttatcattaccgatgatgtagacactattcagaccatccgccaaatcaatgcagaggtcttcatcctcgggatcactgccggaaatgaccacaagttagcgtgtctagccgccggagcgacacagtgcgtcacaaacttcatagatgtcaaaaagattaaggatatcctcgaaagtctccccgacgtcccggtcccagccccccaccgtttaaatccacatcatcaacctcgatacattcattagtatatatatatatatataaacagaagttaattatatgattattttaacattatgttacattcattatatatacattattaaaataacacaaaaaaaaacgttaaaaatttgtcttaacaaaaattcattacatgctattaattttcatagatagtggatacatacgctatagtgacactgacatcttaaacaaaaatcaaatgtattaatttgtcttaactgtgttaagaaaattggacattgaaatattattcggtttgagttgaaattggcatttgacggatccgtggtttgcatggtgtaccaagcaagaatcgttggttaaaagaaaagaacacacattaattatcatgtttatgcgtaattgatatgtaagttaagtagattatatgcttctcaaaactaggtatttagacaatgagattagttagtcttaattattaaattaatatcccgatcttatcatataagccaaattatacgaagattcttaagaataatcattttaatttcactaacctctctctatctctctcttcattatccgaattaagccaatcgaatccttttcaacccgacgggtcgtgaaattccccaaaagattcctctttctcagctcaatttccaaaagctccgacctttacgatcctctagattctcggcgccggtttctcggagtaaataatg

SEQ ID NO: 29712 - DNA, 3000 bp, Unknown; identical to SEQ ID NO: 14082
  misc_feature (1)..( 3000): 2750-1469P.txt file - cDNA_ID_3021580; gDNA_ID_2214696; Annot_ID_189544

SEQ ID NO: 29713 - DNA, 3003 bp, Unknown
  misc_feature (1)..( 3003): 2750-1469P.txt file - cDNA_ID_3021584; gDNA_ID_2214696; Annot_ID_189543
gtgagatattaatttaaacaccacatctacgaccgacacaactttccgaacatcctcctcgtcctcatcagattcaccagctactttcttcatcttcttcttcttcttcctcgtcttcttttgtgcatatcctccaccagattaaacaccctcattgtgatagattttctacttctttgcgggagattcagacttagcggctgctttatcttttacgtttttcttcttcttctcattcctcttcacatccctatagcctttaacattccccatgtatgtcttcaatcaagtgatcaagtgatgggtcttctacttcatctagccacatatgaaatagctcgcttacatcatccgtcataaccattttacgcacacgcatatataacataagagattataaaacccatcagtatgtttacagtcagtcatcaataagtataacgcagacattgctcaactatgattccaccatcactaaaccacaaccaagtcattactaaagtataactcaaccatcaataaacaataacacatccatcacaaaacataactcagccatcacaaaacataactcagtaagtaactatcataacagagccaaaaccttacctcaccaccatgcgctgtaatatcttcagcaatggtcgattccattgttgcacgggtacggttgacaccccatctaagtaatagaatctcatcctctttgattacgttcccatatcgctctccaatggtgttgattgacttatacgcccgagcctgtaacacgaaagcaacaccactgatggtgtacgacttgccaataggcctcttcaactttatagaatcaacaagggcttcaaatgctaaccgactccataaataagtcttcatggcttcgtcatcaaaaattcttttggcactctcaaatagtatcctagagttatgatgcaagccaaaaagtccattggctagacgagtcaataaccccaaccatctacgcttttcaggaggccatgctctccacactactaagcctcgcctaagtatctaacttaggaccttcaccacaatgcacattcaattccctgaagaacgttttgtagtccacttcaggttcaaactactctataggcagtggatctgtgtttaaccccgtgatatgaccaaattaattcaagtcaaacctgataggttaaccagccacgagacaccaaatctccttcttcagtattcttaactgtctacagagtagtgaatgtacagtattatcagaccaaacaaaatgactatcaactagcttagcaattactttaagaggtgtctttttcatttgattccatgcatcttctctaattgattctctaatcagagggacatctcccatctcgatgttgtgattaatggctttattctctagattagattccccttctggataaagtcttggagggtaatcccttgcttggtcttcagacatctgataaaccataaatcagccataagcatacattaattcagtcacaacataaaacaaactcaaccacagatgcattaaaaatataactcaaccaaaacataaaaaaaaaactcagcaacaacatcacagaaactcaatcacagatgaaaggttaagccataactcagccaaacataaaataaactcagccacaatatcacagaaactcagccacagatgtaaggttaaaccataactcaatcgtaacataaaacaaactttgccacatacgcattggtaaaccataactcaaacacaccatataacaaattcagacacagatgcattgataaacataaatcagtcgtgaaacaaacagtaactcggccatcaaatcgaatagatctaacaaatcagccatcgtatgtaaatcagtgacggcgaaaatcaaccgtaataattgtcgataaaaaccctcaatatcacagttttcgtaaaacggtttcagtcacgggaatcacttgctgttgaacttagatgtcgaaaaaatctaattaaagttagtttagacacttaccggaacaagttcaaatgcgacttgatagggatgtgactttactcgacttaaaattcgacactatcgaaggattttggccgaaagagatgagataaatagaaaacattgacaaaattagggttccaattaaggaatcaagtcgacggaacaagagaagagagagccagagaatagttctttttttttttttttttttttttgcacgcggattaaccgtgtagagggaaaaaggaaaactaaaaggtttaacgaaattttcgggtaatgacgtggattaggataatgacgtggataatgattgtttttaaattaaaaaaaaaatattatttagataaactaatcaaaggtgttaattgtaattatacaaatgctcaaaacatatgagtaattttttaaaactctatgatattctagtaataaacatacttttctatgatatctgagtaattaattcacccatttttaatataaaaataccaaaaaattagttttagattataattcataaaacctaataagtttttagtttaaaactaatatatcatagtcacaactcatgactaatatgaactactgaggaacaatgggagattagatcgcatagagttcaattcccgttctcaacccatgaccaatatgaactcaaagtttccttcaaaaccctcgttgctccgttcgatgcctaatttaatagggaacctcaaagcggctctatttcattctattccatacatatcccaattccattcatttaatatcattttggtgtcattgacataagagatgtaatttctagtctatctctttatatttatatatatgaaaagttgcaaaatcatcatataataatctagaaattgaaatagaaaagaaaaaagagaggtttgtgatggaatttcaatcttttatagtaggtaatctagtatccttatgcatgaagataataaatttggtcgttgtggtcggactctattgtggatttatg

SEQ ID NO: 29714 - DNA, 3000 bp, Unknown; identical to SEQ ID NO: 14088
  misc_feature (1)..( 3000): 2750-1469P.txt file - cDNA_ID_3021657; gDNA_ID_2214697; Annot_ID_189568

SEQ ID NO: 29715 - DNA, 3003 bp, Unknown
  misc_feature (1)..( 3003): 2750-1469P.txt file - cDNA_ID_3021664; gDNA_ID_2214697; Annot_ID_189566
tattatgtaagtgaagacttggtgtgaagccttggagcttacgttagaagagcaaaaggcccggggctagggtgagctggggggggacagcgtaagtgagcgaatgtgtgtaagcccagtcaaagatgactgttctaagcggggggagccacccacctttgaatggtgttggtcctacggaccgtgaacggatttcgcctctggcctctgggcacgtcggaaccgcgtgagttcaccggggtggagcacggtccgccaaaaccggcatagattaggtgctattgatggaacatggtaagcctatctttctccatatggaagtgctgcgagcacttagagatgcgggtagaggaagcctcaaaaagcgaaggccgagctgtaggtcacgtgacctgcaccgagttggtggctgactgggctttttccttgatcaaagcagatcaactcgccttctttcttgttacccaaaactaaagttggtcgaatggtttttttcctgccccggaacgtcgaatgaaatagggggccgggttctctttctacaacccttttgatatgataggcctggctacctttcccctatcccttatgattagggggctgttaagcccaagaacaaccagtcttgtggtggtacggaaggaacggactccgcgaacgtcccgcgccccggaaagaaagtctcaaccagaaccacattccttttgcgtgcggatgtagctaagtgtctgactctattggtcatagtttcctgctgttgcggctggtgctcgtttgcgcgcgcgtgaaccaactcaacaaagaaggaaaggatgcccggggaggcatctgagaatgattcgagccgtatgaagggaaactctcacgtacagtttgttttttttggggggggcaggagcccgacagggtcccccactgactcggcccgggcctaagttaaagtgaagtggtgggcctacccatcccaaccaggggtatgctgggattcgcgaagagcagcaccttacgatgttcatgaccaatcggatcttgacgtaccagtaggtaccagaggagatcgctatgatcgttactgtatccgtatcgaagagatgcgacaaagtcttcggatcattgtgcaatgtcttaatcaaatgcctagcggcatgatcaaagccgatgatcgtaagctatgtcctccatcacgatgtcgaatgaaactatccatggaatcgtgcgtcgtgtgaaacgtagatcatcgccgttcttaaccaagactcaggttaagctccgtctcggaaccttgtgggttaggagtaaagcatcccggggttggcgcatctcattgggcgtagagaagcattgggaaccccaatttatttcttcggagccgtttcttttcccgtcccccccaccccggcatagcgcttcgcttccggttcttcggaagaatcaacttacttctaccttcttcattgatctgggggaaaaggaaccgtctaccagttgggaagctagacatcaagtaagtggcttgatgaggataactaagctgacacgccggagttggctgctggcacaacagggtggtgccttaccgcactgcaggcgaacgcgcggtagcgttcgtggtggtgcttcaggattccaatgtactgcgtccaagatcagaacgagcttgccggcggaccactgtcgtcccattcttgagtgagctggagcgcagccatcttatccactgaactagctagaagctatcgcttcgggtcgaagcactaaaagaaaagcaccgggaaacgcggcggcataggaaccacgggacccccaccctactagtaaagggaaaacggaagtgcgctcctgcgcaccagctgaaaaaagccctttcccctttctctgataataaggaaagcttcttagctccaacctatacaaggggtttttatgtcctttttataggttgggttgttggatacgggatcctcgtagtaggctggaccaacatccagccgagagagggcagcctctagaagcaacaggttgggaaaccaagagaacgcttcgccttttcttatcttctttctgccctaggagtagaattagcacaaaaagagggattcgcattattgacccaatgataaaccactaacaccttcctcgttggggctccgcgcactgggaaaacgctgacgcgatgggaaaccggccactagttacaaagctccaataaggtatcgagagggctatcacagtcaggtgcgaagcaattacccctatttggaaagtacccttcttcctatttagggggttaaggcgagaaatggcttgatgaatcgttccgttcgccatgcaccggccccattcacttgcttatcgtagaggctgtaagtacacagtgccccacaactatcaatagtatagtggggttgaaagacgagagtgcccgccctttcttttctttcaagtgggccacttttttcccgaacgcagtccgggatcaccgtggccgtgtatatatatatatatatcttcgatgctgtcatttcgaaatgtccgcttcaatcgctctttcacctccccccaaaaaaagcaaagttggcttaacgagcgcagatgtgaggaagcgggagcaataaaacaaaaaaatatctttcttgtccttctacttaaggggcaaagagaagcgcttttgctactgagaaagcgaacggtcagcgcgaaggttcaagacttttctgagcgttagcgaagctagattctcatagcgaggcgcttcgagttagcgaagcgctgtagtagcgccgaagccctatgtgctataatgctgagccaaggacactccgccttatctatagaagcagtcaactgagttctgaacgaattagatccttggtaaatggctcaatctatagatagaaagccttatgatgggaaactaccacgttaggtttggagagagatgggaccggttatataatagagggagcagatgcaagcttttttctttcaatagccggccaaatg

SEQ ID NO: 29716 - DNA, 3000 bp, Unknown; identical to SEQ ID NO: 14089
  misc_feature (1)..( 3000): 2750-1469P.txt file - cDNA_ID_3021669; gDNA_ID_2214697; Annot_ID_189563

SEQ ID NO: 29717 - DNA, 3003 bp, Unknown
  misc_feature (1)..( 3003): 2750-1469P.txt file - cDNA_ID_3021672; gDNA_ID_2214697; Annot_ID_189562
tatgttagtatctagattgagtatcataccattttccaaagaaagatagtatgctaaaatattatgctaatatggtcatttggtatgctcttatagggatagagcactatgtaagaggtctcgacgagcctccaccatactaagctaaggtctactagctatagtagctagatgggaatgtagcctagcagctagtagctctcttcttatagctcggtagttggatctttcataattcctttatggttagagcacactgggatagaagaatagatgagtttgtatctttcttcctactttttttttatcggaaaacagagctagaacaaggaacaagcaacactagcacttaaaataaggtaggcggctaaaacaattgggcatttccttgatgtccggaaatggtatatctgaaaacagaagaaagactttcttttgaaccaaaactaaagatgatccgatccgtgcaccgcttttcttctctaccctttagaatccaaggaaaaggcaaagagaaagaggttgcagagggcacctaaccttccaaagacacagcagctctagcctaacttcggattcgaaaccatacttccctgacttcctctcaacaagaagttaaggctgaaagtcctaatcttcttatcccgatgcctggagtagcgggtcttagttcggattagtaccttttgagcaaggtaagttaagtttcggcagtgaaagaaagtaaccaggatccgcttaaccagttatggatgaaggtaggtctactccaatccctcagccaataaacaataaagtaggcacatttccctcggcaaagaaagtagtccctcgctaaagagtagacttgagtatcttcgaagtcaaagccgaggaataagactcagttcgggtagagcaaccatttatattttcattattcttacccgtttacataaatgaaaaataaaagtgaattaccacggaaaatatccacctaaaaaaatttctggggttacttggcatagtcctctaaagaccctatttagatactctttcttccgagttcgagataaggaggaagaatggggcgacagataaaattaaataaagagcaaaaatgcttgactttcattttattaaatataatggtaggtagggcttcttttaggtcataaagggaatagtacttttagctcgttcatctaattctgctggtctataggagtggctcccagggctatgtgatagcacccaaaatacgacggcctgatcaagagagccagaagctgggtccgcccgccggagcttctttcaatttccggggggcttagcttgaaccactcccaagtgccaagaaccggcgaatgaaggctccgtggcggcatcggagctgccaataagctaatccgttcccagtgagctattacgcgctctttcaagggtggctgcttctaggcaaacctccttggctgtctctgcacccctacctcctttataactgagcggccatttgggggccttagctggtgatccgggctgtttccctctcctagagaaagaagttctctagtcactaaagtgcgtttcactctcgttcctctcgtttcactcgggttgctaaagcacctctcctctgccaagctctctgtcttggttaatggttatccaaaaggatatttctcatgttaggcggtgtgagacagggggataaaggatcccccgttgttattttgtattgcggaagatgtcttatcacggggtcttaccgggcttaatcacctgggcattctttcttcaattaccgagacctgtacatacaaagatctaggcagctcatcttcttctaacgaagtcagatctttttccataccataacatatatagaatcgattttcttttctgatcgctagcctgccgggccgcccccgcgatcaaactatcaatctcataagagaagaaatctctatgcctcctttttcttggttttctcccatgcttttgttggtcaacaaccaaccacaactttctatagttcttcactactcctagagacttgacggagtgaagctgtctggagggaatcattttgttgaaatcaattaatctaatcatgcctcaactggataaattcacttatttttcacaattcttctggttatgccttttcttctttactttctatattttcatatgcaatgatggagatggagtacttgggatcagcagaattctaaaactacggaaccaactgctttcacaccgggggaagaccatccggagcaaggaccccaacagtttggaagatctcttgagaaagggttttagcactggtgtatcctatatgtacgctagtttattcgaagtatcccaatggtgtaaggccgtcgacttattgggaaaaaggaggaaaatcactttgatctcttgtttcggagaaataagtggctcacgaggaatggaaagaaacatattatataatatatcgaagtcctctccttcaaatactggaaggtggatcacttgtaggaattgtaggaatgacataatgctaatccatgttgtacatggccaaggaagcataaaatgattctttcattctatagatacctctggtaggtaaagcactcgactgtgctttattgaaagttcccatcgcgggggcgaggatacttgccttcgcggttcgactttcttttcaggcttgactcattcgctagcttctcctcccctttagagctctttatgatgcccactgagtaagattcggggacttccggcgcagaagctcattctgaaccgcgggaaccttcgtctcaatcttcataatcaatttatgccatcttaaaaaaattggaatcttgttaggtacccgtacgacagctctaataatgagctaacgtactcatctttagagtggtttgtgcgcaggctcgagaagttgctgcccgcttcagaagaccttagggtgccttcgattcctggacgactttgttcgtcgtgtacaggggacgggaagagatg

SEQ ID NO: 29718 - DNA, 3003 bp, Unknown
  misc_feature (1)..( 3003): 2750-1469P.txt file - cDNA_ID_3021682; gDNA_ID_2214697; Annot_ID_189556
agaacttgcttcgctaggaaaggaaaagggagagttggtttcaccttccctataagaactaaggtttaccaaactccctagccatctatgaaactatgatactttatacttccaaacctgaaaaggaaaaggaagactaaagcatgggactaaagctgaggaggagctagtggaactgtctacccaagaattagaacaaaagctgctcacagtacacctttgtttaactgtacgagcgagaataccagctaatcatgtaactgccaagaataaggattctaaaggaaagagttaggtgtgccagagatcctgggattacctttggagaggaaagctcctactattactattaaggagcactcaaagcttgcttcgctaggacaggacagcacagaagagtagatagcttgcttcgctaggagtgtgctaacttattctcataggcgtacccgcgtagaagaagctaccttcctcaaactcctctgcgcaacccagccataccagagagtgctatcacaaggaaattgtctggtctcagaagatgagagcttcttttttagcagaggtactgatgtcaggagagtgtcgacgcgctcttccccagtcgtgttgaagaagtttgagggaaagatggattctgaaggaaatcggctgacctatcggatgaagcagactgctgcgaaagtggtgccacgagtcgagaactcttagaattgtgctcgttcaggctctttagtgcacctaagtgcgaagctggtgctgcaagggaggatgtgggcgggagagcggtcagtcctctacctctcgctatcgatcccttttgcgtcctttctagctatcgactctatccctttttctttctagctatctcttcttccgtaaggacctttttgttcccccccacgctgatcaacaaccattgagataggatagagccaatgcaggaggtgaccgaagtagctcaataaaagaatgaagaaattgggaatggtaattcgagcaatgaaaagaaagaaagagttcgcccaatcgtatagctttttccttcaaatgcttctatctcacttgtttgctagcttgcaactgctgggcactgaaactcagtcggccgacatcgataagggagattttcttccaaccccttggaagagaggaagagaaaggagtggtgatggcttaaagaaccacgttgcataagccggaagcacagaatgttactcggaaacaagcctgagaacgactcttcaccgttagccattatgtttacctggtcaaatgccgtcgtttatgataggtcggtctagtgagagcaaatgatcaagcaagaacgtgcctacatccgttgatgcacttcgttgactagtgaagggtttttccttggggcccacgttgccactggggtcgctcatcttactctagggtagcactctctatggaaagaagagtggttgtgcttcactactagccaagtccatgcagatggggataagggggttcactgctgtctgatatcatcatatctattttgacctaaaagcttacttgggatatctaagagctaattaaatcttttctcttaaaaaaacgggtaataagaaaacacttattatctttttatttgcaagcaacatctgctcaaaaagaaaaggaagttgacttcacctccggtgaccggcttcgcgggatcgccttacgtataaggacctgatccactctaggcgaagcttttttgggcgaaagctacttactatgttatcttccaattgagttgagagagttttcaatcgaattccaatttttcgttatataagctatttataattgaatgatttaaagattgagtttcaaaaagaaaataccggagaaaaggtgatgcaaacaggaaacctgcttcgcccgttgatggtccaagcccaagtattcattccttaaggagctggacgtattgttcagcttcctatgaagctaggctggcacttaggaagattggacgagtacaagatcgaaaagaaccctataggcaggctaaaagcgctgtccgtcttcatggcctcaataatactcagtattgtactggccgaatccgtttcgcagcacggagtatacctcaatctccgttagttccgtttcggctttttccccaatttcccactccttctgtgaggcaaaacctcaccacactacacttcgacacaagagaagaggaccgggcgcttgtatcttcgggataggagttatcggtcttctttaagaaaactcaaatcaaatactccttatctcatggatcaacttattgctgatttcgtttctaggatgggtttggctctgcctgtacttttattcttgtagccgttaggtctggccaaatgatccatcaaataaatagtattaatatggaaataatcctgactgatgtagcgcgagatgcgcttcaagaaaaaatcgtgtcccaactctcaattctgttgagagtatatagggatactaatactagtgagagtgtgaccttacctttatccggagtaaatctccaagaagtcgccgctcgtagtttttttaacaacgagagcattccatggttttttcatctatttagaccttgtcaatcagggcacgaaaaaaaaccactttgcccacaagctctggagttagtgctttcgttcagttcataaggtagactttttttttctaaagcggtattcctccttgcctctaatcctcaaatctaatatgattactcggctgttcgcccaactggtatcgttatcaattgtaacttattggaatgacgctattgttgcgacaaacttttcctggctcttcataactttctttgttatgactttcacctttcgtaccttctcgcgctacttcaaaaaaccgatcatttggactttctatttttttttatgtttaatagcctttctccttctttgggcagcccgaatccatataaatatccttttctcatttgcttttggagatgtttatagcttcttcatg

SEQ ID NO: 29719 - DNA, 3000 bp, Unknown; identical to SEQ ID NO: 14086
  misc_feature (1)..( 3000): 2750-1469P.txt file - cDNA_ID_3021692; gDNA_ID_2214697; Annot_ID_189549

SEQ ID NO: 29720 - DNA, 3003 bp, Unknown
  misc_feature (1)..( 3003): 2750-1469P.txt file - cDNA_ID_3021726; gDNA_ID_2214698; Annot_ID_189587
aaagcaagaatagatagagttgaaagaaaggcgctcgtatagagccctcgactatgtatcggacatatggcaggttgggaaagcgcgcttggaaaagaaagactatcctcgaggtaaatgtaaatcaatctatctcgcattgcccaatctgaatgctaaaggctcgtaaccccctaaaaggaaactcaccaccaaaagaaaaaggtaggttaactaacgaaactcaaaactacattttaattcttgctcaccgataatcctttataaaaaatattatacagctgtatacaggattattggtatagctgtccactagccgaaaatcggacaccaaattattgtagactgacgacctgtccttaatagaaccgatctgactctctgaacaatcggaatttcgtacttctgtcggatcctccctatctcctgatcgagcttgtgtaggtagatgttgcctggtagggccgatagtagtacactgtgtgggacggagtaagggcccctctcaactcctacgagtcgtccggcggaaaagactttctgaatggagtaaaagaacttgggatcgtcgatctcttccttcaaaatttggatgagtcgatgtcggtcgatggtgtgaaaacacttcctgatgtcgaattctaaaaaccagcgagagattccccactcttctttgatccgtcttaggaccgagtggcagccttgacccgagcggaaatgcgatgtgtctggaaactcgggatcgtaaatggattcgagtaccattctgatcgcctctttcatgatcttttctataggtagaactactgtgagcggtctaaacttcaacccttctttctttcttcatattgtaaaggggggaaaagctcgttttttgctccccttttttataatcaaaggccccctcctgccgtcgtttcagtgactcatagggcttccctcagttcagtctttttggttcttgaaaatggtcgccacctctcctcttctttcagtcgatggggttcctctccttttagtcgagtaatcaatacctctcccaggaccggaatgattatccctgcccgatgggtctacatccatccctgaatgtcgtcgggtactgttcacttccccgccattcttgtaaccgtcacctgtaatccgcgcgggtgtgtccgcacccccctgagtggacgagaaagaaaggatttctcggagcaaccccccaggttccagacccaggagtcaactttcccgtatgagcattcggtacatgtatcagtccgtgggaagaggtgaaagggtcaccactactgaggatctccccccccccctaatcttagataggtcgtctgagggttcgccgcggttcattgctgtgcttacacacaaggctacccttctccgaaagctacgcgggaccacctaccactagtcttcggccggaggggtttattgcacaaaaacggccgggacgcaggctcccgaagagggaagcccaacgaatgtcagatgcaaagttccgcacctcattaagatcatattggcatactctcccaaaaaaaaaagagcagaccccattgaagacgagagtaaggtacaacaaggccatttctgtccaccgcccttctcacggaaccgtacgtggacgttaccgctcatacagctcccagccagcaagcacagttagccttcctctacaagaaatggaaatgtggatgaatcgaatgaaatcgaggaattcggtttttcttttcagacatgataagtaagagcatccctttcacaaaaacctacggatccccctcctatcctgccacttcagcaccttgtgatctttgagaagatcattacgagccctttcctagaatgtttttgtagattccgaaaattccagagtggatcaggacgagaatgaatccgggaatccagggcatactcatcctggagcttccgctctcctctgggaagggcttttttatggatagagagatgagtcgagggattgattactcgactaaaaggagagggtagcctcccgtttgaccgatttctcggagtcggaagaagatctctcatctgatgaccctgaacaagaaggagctgctctcgatgtgagatcagcagcaaaagaaagaagaaaagggccatgatgatgatcctatgttcgttttcgccctgcccctatgatgcgctcctagctcgcagagcataagtcagcgcaaaggagagatacatcctttaagactgtgaagagaatccttggtttgacctacggactacgtgggaaatacgagatctaggcaagccgctacatgttctcccccttgcccttgaacgatagaagaactacttatcttctcttagatagcagtcgatcggttctatgatctatggtcaatcaataggcccacggatctattcttctatacgataaattgccatctcgtagcaccacagcctgggggtaagactagaagaggagatttgcttggtcttctgtgcggaatctgcttcctaatcagtgtagctcttgggtcagctcacagctaggacgtcatcagttctaaaggattcctcactagggagactctctccttatgggcaagggaggcagattttgatggggagaaggattcggaatatagttacataagtccccttccctctcctcaatatagtttcactcgagtcacgtcagtacctctccttttagtcgctcgtcgagacctcatcaactagttaatacctccggacctctcctttatcagtcgagtttgtgttcacaacctctcgagaaacaagttcgagagttacgtactttcaatgctctctctattccttgctaatcaaggcctgcaagggaactggctacgactataggcgggacgacatgcttttagcttccctgaaataggcgacttgctcgctttggcaggaagtattttttttgaagaattgaacaaaaaaaactgaaatttctgtaaatcattaaaacgggactttctttaaagaaaaatg

SEQ ID NO: 29721 - DNA, 3000 bp, Unknown
  misc_feature (1)..( 3000): 2750-1469P.txt file - cDNA_ID_3021734; gDNA_ID_2214698; Annot_ID_189585
ggcaatgcgagatagattgatttacatttacctcgaggatagtctttcttttccaagcgcgctttcccaacctgccatatgtccgatacatagtcgagggctctatacgagcgcctttctttcaactctatctattcttgcttttcaaacattgtattccttatagaatatcatctcatgtctatctatagtataacgtttctcatagtggcatagcggctccgaggtgattctttctggtatccgtcctctctcatactgctttaaggttggaggatttagttcaagctagtctcctatggtgaagatctctatatttgttaagactgtatgaaagaaatcacatatagtaatcatctaagaatatatctatactataatggttgcatctaacatttctcatagtgtagataaggcagtccccggagctaagaaaactacgctattcaaagcaatccgcccaaggaaggctagctagtcgagtctaatgctaggctaggtgattcctctctatcaatgaccgaagcttaatccagagagagagctcactataccaccaggttgccacatttgcttatgaaacaagaacagcttatcccgaggctctgaaagactgagggtagtcactcaaaaagtaatccgtcacttcgcccgaaaagcactataggggattccggccaagcgagcataaaaatacaatacccaactttctgtttcagcccactccacttcattgaccgagactttctattccgaaccggttcggttaaagacctagccacgagaccaactccgggctgtctcgtaaaagatcaattcccagatgctcttactcgacgcccacaggcaagcttgtttagagaaggagagttctcttcatcagggaaactgctcaacctccactatttccataagcatgattatgcactagcagacataaagtgccaagaagagaaaacgcataactcataagccaaagatgtattcgatcctgaattgaacgtaattttttccgattggttggaaggtaaggatagcatgattgactggttgcgggtcccttggatcatgggccacagctatttggatagattcagatcctttcatgtagtagagtctttgatgggctcggatccttttcatgatttcatgtgaggacacctttggcgggcttttttgatagatccaggatttctgtgcgatatcgatcttctctttatggctttggttaatctatcgtctagctgtcttggtcttccgaaaaggcgaagacaaacgcatggatttactgtattctatgactaaaccagaatcaccccggagtgagctgttccataaggggctcatattatccgacagagcagagctatcatgccgaagaagcctttttctttctacgccccggtggcatcttgactttcctaggtctctaatagttccccataaaagagtcaatgggctgagctgatcgagtcccattttctggctgcaaggcccggcccgagtagtcaatggttgctaccgctcactgcgcttctctgtaccatttcatttctagtcaaaatggatcctgggcatatctactgacccgacaagctgacgtaattctatccatccgtagctgtctgtgccgctacctctatccagcagatccagtgccaaccgatctatatctagctttggccggccgggccaacccacctatacagagttgatgccatgcccgcctaaccacgaaagaaagcatccaatatttcaagactttctccacagagctctaaaatcctttctccgaagatccaggctcacttttttaggcaatggaatgacccgagcaaaggaaagggatcaaggcaataactacgcgcatcaaggtgatacctagaccgagcgaatctgaccgtagcctatcatactgagtgaaagcgtgccgaaccaagggaacttgcctttaatcttaggctcgcagctactaggtgcgtacccttgaacctagctcgccctagggtacaggcattgaaagacggctttcagaataggcttttttgtacgaagagaaggttacactactatataagataagtaattcattataagataagtaattcattgtgctaaaagaaccactttgaggatcaatcccttactgaatgaatgtccttttgatcagtgatcacagaaggagaaggcactgtgaatgagaacctctttcctttctggctaccaaacgtgctaataaaagagcttattctgagtttgaattcctcgaattctgtaagctagcttggtctacctgctttgttctgatttcattgtattcctccgtattcagcattcgcgccggtgtcacaaaaagcaaaagcatatcaattcgttgaggcaactagtcttggtaaggttttttccactgaatgagaagtttgtatgatccagatgttttgaaggcgtgtttgcccctgtgatacgcgtacgaggagtcgacggggaagagccgtgctggggttggaagaggttccagctttagaggagcctccctatcttatcccttgttggtcttatttgacagctcagctttgtctcgggcagattttggtccatgatggactctttttatttattttgacgattggatttctatatgaatggaaaaggggtgcttcggatcgggagtaaagtgatagggcacaaaatggggggaaaaagaaaggaaagagaataatgcccacgtttaatcaattgattcgtcatggtagagaagaaaaacggcgcacggaccgtactgaagttttggtctttggtttgctggttacacgtattatccgttttgtacattctgttttgtttcccatcccagtcttttgcagcataaaagtccttttagattccttttgttcgcttcctattataaacaaactttccaaaaaatggcaactgatttggttttatgttatttcagttattctctgtaaatctttatttgctgtaggatacttgtggatg

SEQ ID NO: 29722 - DNA, 3003 bp, Unknown
  misc_feature (1)..( 3003): 2750-1469P.txt file - cDNA_ID_3021734; gDNA_ID_2214698; Annot_ID_189594
ttgggcaatgcgagatagattgatttacatttacctcgaggatagtctttcttttccaagcgcgctttcccaacctgccatatgtccgatacatagtcgagggctctatacgagcgcctttctttcaactctatctattcttgcttttcaaacattgtattccttatagaatatcatctcatgtctatctatagtataacgtttctcatagtggcatagcggctccgaggtgattctttctggtatccgtcctctctcatactgctttaaggttggaggatttagttcaagctagtctcctatggtgaagatctctatatttgttaagactgtatgaaagaaatcacatatagtaatcatctaagaatatatctatactataatggttgcatctaacatttctcatagtgtagataaggcagtccccggagctaagaaaactacgctattcaaagcaatccgcccaaggaaggctagctagtcgagtctaatgctaggctaggtgattcctctctatcaatgaccgaagcttaatccagagagagagctcactataccaccaggttgccacatttgcttatgaaacaagaacagcttatcccgaggctctgaaagactgagggtagtcactcaaaaagtaatccgtcacttcgcccgaaaagcactataggggattccggccaagcgagcataaaaatacaatacccaactttctgtttcagcccactccacttcattgaccgagactttctatttcgaaccggttcggttaaagacctagccacgagaccaactccgggctgtctcgtaaaagatcaattcccagatgctcttactcgacgcccacaggcaagcttgtttagagaaggagagttctcttcatcagggaaactgctcaacctccactatttccataagcatgattatgcactagcagacataaagtgccaagaagagaaaacgcataactcataagccaaagatgtattcgatcctgaattgaacgtaattttttccgattggttggaaggtaaggatagcatgattgactggttgcgggtcccttggatcatgggccacagctatttggatagattcagatcctttcatgtagtagagtctttgatgggctcggatccttttcatgatttcatgtgaggacacctttggcgggcttttttgatagatccaggatttctgtgcgatatcgatcttctctttatggctttggttaatctatcgtctagctgtcttggtcttccgaaaaggcgaagacaaacgcatggatttactttattctatgactaaaccagaatcaccccggagtgagctgttccataaggggctcatattatccgacagagcagagctatcatgccgaagaagcctttttctttctacgccccggtggcatcttgactttcctaggtctctaatagttccccataaaagagtcaatgggctgagctgatcgagtcccattttctggctgcaaggcccggcccgagtagtcaatggttgctaccgctcactgcgcttctctgtaccatttcatttctagtcaaaatggatgctgggcatatctactgacccgacaagctgacgtaattctatccatccgtagctgtctgtgccgctacctctatccagcagatccagtgccaaccgatctatatctagctttggccggccgggccaacccacctatacagagttgatgccatgcccgcctaaccacgaaagaaagcatccaatatttcaagactttctccacagagctctaaaatcctttctccgaagatccaggctcactttttcaggcaatggaatgacccgagcaaaggaaagggatcaaggcaataactacgcgcatcaaggtgatacctagaccgagcgaatctgaccgtagcctatcatactgagtgaaagcgtgccgaaccaagggaacttgcctttaatcttaggctcgcagctactaggtgcgtacccttgaacctagcccgccctagggtacaggcattgaaagacggctttcagaataggcttttttgtacgaagagaaggttacactactatataagataagtaattcattataagataagtaattcattgtgctaaaagaaccactttgaggatcaatcccttactgaatgaatgtccttttgatcagtgatcacagaaggagaaggcactgtgaatgagaacctctttcctttctggctaccaaacgtgctaataaaagagcttattctgagtttgaattcctcgaattctgtaagctagcttggtctacctgctttgttctgatttcattgtattcctccgtattcagcattcgcgccggtgtcacaaaaagcaaaagcatatcaattcgttgaggcaactagtcttggtaaggttttttccactgaatgagaagtttgtatgatccagatgttttgaaggcgtgtttgcccctgtgatacgcgtacgaggagtcgacggggaagagccgtgctggggttggaagaggttccagctttagaggagcctccctatcttatcccttgttggtcttatttgacagctcagctttgtctcgggcagattttggtccatgatggactctttttatttattttgacgattggatttctatatgaatggaaaaggggtgcttcggatcgggagtaaagtgatagggcacaaaatggggggaaaaagaaaggaaagagaataatgcccacgtttaatcaattgattcgtcatggtagagaagaaaaacggcgcacggaccgtactgaagttttggtctttggtttgctggttacacgtattatccgttttgtacattctgttttgtttcccatcccagtcttttgcagcataaaagtccttttagattccttttgttcgcttcctattataaacaaactttccaaaaaatggcaactgatttggttttatgttatttcagttattctctgtaaatctttatttgctgtaggatacttgtggatg

SEQ ID NO: 29723 - DNA, 84 bp, Unknown
  misc_feature (1)..( 84): 2750-1469P.txt file - cDNA_ID_3021791; gDNA_ID_2214700; Annot_ID_189644
aataaaccacttgttttcgctcgctcgctttctatttctcctccgatctgctgaggcgtgcgttcattacgtgcttcctcaatg

SEQ ID NO: 29724 - DNA, 3000 bp, Unknown; identical to SEQ ID NO: 14104
  misc_feature (1)..( 3000): 2750-1469P.txt file - cDNA_ID_3021816; gDNA_ID_2214700; Annot_ID_189632

SEQ ID NO: 29725 - DNA, 3000 bp, Unknown; identical to SEQ ID NO: 14103
  misc_feature (1)..( 3000): 2750-1469P.txt file - cDNA_ID_3021820; gDNA_ID_2214700; Annot_ID_189631

SEQ ID NO: 29726 - DNA, 3000 bp, Unknown; identical to SEQ ID NO: 14102
  misc_feature (1)..( 3000): 2750-1469P.txt file - cDNA_ID_3021822; gDNA_ID_2214700; Annot_ID_189630

SEQ ID NO: 29727 - DNA, 3003 bp, Unknown
  misc_feature (1)..( 3003): 2750-1469P.txt file - cDNA_ID_3021830; gDNA_ID_2214700; Annot_ID_189622
atgccaaaggcgattgctgatatcatatttatgtagcttttgtactttttaatagaagtggacacaatactgatatcattagtgaataatcttttcatatctttcagtctaagtatacacaaatatatcgtatatgcataaaacgaatgtctctcattttcgtaggaaagaaaacacaattaaaaagaaatatttttaaaaagcaatgtgaaaagaagttggtaacttgaggttcacgagatccaaatgtggatgaacgttggaacagctaaatccacgtaataaaagaggacgaagcttatgattaaatttggtcagttaagattctcatcctatgcaactacctaatacaatacaattaatttgtctccctcccaaattcattcaaaatttttttttgcttggttataatctatttattttgaatctggtggctataatttttcaaaaatctatgtcaagtaacgtatcttacgaaaaaaaacactgtgattaaattcatcggaattactagtctcatactaaattctacaaatagatatcattttctcttgtaaattacacaacaataacaaaataacaacaaaaatcattattttcttctcgttgcttttattcttacgaactggatactatctttcttatatgtaaaaacaacacgtaatatctaataagtaaagtagggaaagtagacttacttatgttacatagggtcccccttattaggctacatatgtataagcaggaagtagacttggcatttgaaatagacggttgatatctccctgtcactatttatccatccttatgacctttcggcgggaaattcgaaatgacatttgcagattttcttgttttttccttttctttttttgtttgtccactccacttatatctttttttcttttggggtttttaatcgcatcctacaacatatcactcggatagggtaaattgccccaaccaaccattcattattaattaataaacctgacgaggaaaatgaatatattttggtttcaaatgttttgtggaatgaaggcagagagaaagacagcttctgtaaaagcatttgctggcagacacaaccctaaacccaccttcacttgcctcacctcaccactctctcttcctcgcgcgtgtctatcacttccataaactctcattgcccataattgcttgttttctttctatatgccaagcctgataaatctcgtagtaaattacgggaaaaaattggattccacctcacacaataaagcattttacaaaaccagctttatcattgggttttttaacagattatagtattgtgggtgctcttaatatctggtacacaatagtataaggtctatcgacaatacagagtagactccgggagacaagagaagccaactaggggcacattttttgggcgtaactagacattatatattaatttaaaacttttgagtttcttcgttgaaaaacaattatagaatatagttttgtcttcaatataaaatgagaaagaagagaagaagatctgttcccgctcttttgacttaacggtgctgtcgttttcagcaggttaacctcgaccccaccctccatttttcacttccttctttttaaattattttctctatcactaaaaatatcaaaaaggcgggaaaatcacctattatccaattcagtttataaaccggtttcggttccgtcgttaacggctgattcttctgaccaatgaaaactcgtgaagtctgacggagaagaagacggaactgttaaaatccgttacgtcagacggagaggagggagagggacggatgactgaataaatctgccgaatcctgctgaattgccacgtcagctttattcaaaattctctgagtggtcacgagatttctatggactcttttttttttgttaattaaaagtttaaaaccctacaaaataggggtcttcaatggggttaccagaaaaaaccgaacagtcgccgattccttggtttaatctttgaaccgacagtgtgaccttttaattttctaacctttgctatattattatgaaaatcagatgtaattatttagtgccattcattaacgtgattcttacttataattcctctcatgaatactaaatggagtgtatataattatatttagcagtaaaaatgtattgtattgattgttggaaagggaggaaaaaatgatgagaaggatttgcatgaggaaaagagagagaaggcgtaattatcaagtgttcgatacttttgattagcccacacatttataatattttagtgtagtagtgagatttttatttagggttttaattagaacatagtataagacattggagctgtaaatgacaacttgtttgggatttagtgggttccacctgtatttctcatgcccttacacatttccacattaatatctatcttatcttataaaaaaaagttccaaagaaaagagtgagatatacatatattagcaatatgagtttaatgtgccattcaaaataaataaataacattttgaagaatattaagagtctcaattaaaaaatatttaacttgttctttagtgagttacatccatatcttaagagacatgtgaagagttgaatccaaatgataacacaccaaaattgatggtttttaaaaaatgtgaatactattactgtttttttctttggatttccaaggcaaaatagttaagaaaagaccaaaggaaaatagttttgattttcgtccatcacgcattaattacggataattattatattaagaaggaaaaaaaaaaacaaaaaaaagcagaagtgatattaaagtgcttttgagctgtctcgtagaaaccatgaaaccttaataaaagcaaccttgtcttcaacattctccatcttcctcctcacttaatccccaagttcacacttcaaatccactctttctatttctctccttcttcttctatgtctcgcctcctccctcctcatctctccgtcaaccttcctaccatg

SEQ ID NO: 29728 - DNA, 772 bp, Unknown; identical to SEQ ID NO: 14096
  misc_feature (1)..( 772): 2750-1469P.txt file - cDNA_ID_3021834; gDNA_ID_2214700; Annot_ID_189620

SEQ ID NO: 29729 - DNA, 3003 bp, Unknown
  misc_feature (1)..( 3003): 2750-1469P.txt file - cDNA_ID_3021839; gDNA_ID_2214701; Annot_ID_136866
ccttgcacaaaataagtggtccatgagcatattaatatttacaatatcactgcttgttgtaattttataatactaataacacagttagcgaattagatttgtcgatgatacccgacatcattaatgacaacttcaaaacagtgactgtatcacaaattattggacaagaagtttaccttactaataattgtgattaattaagtaatcaagaaggagaagaagaagcaaattgagatttgaggacagaggaatatgctgacattgattttgcacaaaaaaaaaatgctgacattgacatttattttataaatactaatagtgcacatgtgtcatgtgtgatatataaatactgtatgtaggaaattttgccttttggatttgatcaaattggattttaaatagattttggcacgacggaagacgaaatgtggtagaaatcatatttctagatttcaagtagattttgaaatttgcaacgttgcaaggcaacaaatttattttgactgtttacgtctctttttgttagaaaaatttcagaaaatgtttgatgaatataataaaataagcaaaaaaaaaaacttgttcatttttaagaatttattaaccaagcaaaccaaatcattactaattcaaatatcactctgcttaaatagtgtcacactatcaccattactgtcacaaatcttacttaacaacaaaacacatacagtggaaactctataaattaatactcgataaattaataaatacaataaaataattaattttgctagtctcaagtcgggccaatgtaaaaattaagcaaaatcgataagataataagataataatttttttgaaatttctatgtaaaaatatggttccaataatatcataaattaataatcatagatcttaaacaaatattttaagactaattttatatgaaacttttgttaaaactacaattgcaattctttttagattacagttggtatgatctcttttgtactcacacaactctttgagtatttgatccatcatatttggttttgtaacatttttttctatgaaaaatcattgttaagatttgtgtaaagaaaaattggattaagctatacgttaacgtcgtagatatacgaacacaatatcttgtaagaaaataaattaaaaaagtcaaaaataaaataaaatatataacataattgaatatacaaacaacaaaatacgagaaaatctaaattaaaaatattgtttaaaaaaaaataatattgtgttttacgtaaatattctttaaattaatatttattaatttatcttattaattaatatttattaatttattatataaattaataaaattatgtggtcctatcattattaatttatagagtttctgctatatttataattatcgccccaaaataataaaaacagtacaggaaagtcattatgaacatcattacacaaagcccattacaaaattcgcccataagcccaatctaacaacggcagagattcagagtcagttccgacggcgctgaccaaagaaacgcgtctctctctctggagaaaatttcctcacagagaaagaagaaaaagacgagagacgtgaagaagaaatcagaattcagaattgagaagcaaacaatggcttcaacgatctacacttgcaaagaatgcggatcagatctgaatctaaaccctaacgatttatttccaccggatttctacttcgaagccggtaacaaaggaacactctcattcgccgccgtcgacgccgagaaattccgattcgagaaagaagataagatcatgcctttcttcgaaaccctaaattactggggaatccaacggaaacgaaccaagatcaagtgcactagctgcaaccacctcatcggttacatctacgacgatggtcctcctctcactggtggtattggccaatacggatttggtccgagtcaagtcattcctcgtgctcctcggtatcgattcaaaaccaaggcggttcaagtctcgtcccagacttagctaaagcagagggtttaatgcttttacatagatatgtataaacttgttaaaagggttaataggattgtagatgtttgttgcttaaaactcagatagtaaggtcgttagacttgccatcggtcttggcgcttgcttcagcgccaagacggatggcaatacggaggtttaaccgccttttggaactgatttttgttgcttgcttttgaagaaacatctacaatcatattctctcctttgtctcttgtctattgtagctagtatagttaagatatgtatgttaagtatgttgttggcttggattttgatcatatttgtagtgtttgtgtttgttgtgagtttgaatcacatggttgactgatttgttcaatgatttgggacgaatattttcgtagtttgttcaataatcatcggttgttttgtttggtgattcgagttttgtacgaggaactttagaagctgattgttttaagaacaaactctatcggcttaaagagaatgtgaagaacagaacaaaaaccaatagtgttagtttaatggaggacgtcatttgaaaatgacgttttggtgatattgattgtgatggccatttatgattcaacggctgtgattgaatgatgtaacattagttgcttcaagaccatatattttatattatccatacactacctaattgcttaaaatattgttgatgttgatgaagattggaagttacatctacttgtctacttgtcgtttcttgtatagttggagtttatagtttgtcttaacgtacaagataatttgaaaggtagacgtagacgttggatacttatttggtaggctcttaagaatcttaggtgtatctctttagtttgaaggttagattcagaatctctgtagattcattagtagctttttctgtgtgatctttgtgttgtatatatatagatcgaattgattttagctggtgaaaggtgaagttgtggtatgaatatgaagaaacagattatg

SEQ ID NO: 29730 - DNA, 3003 bp, Unknown
  misc_feature (1)..( 3003): 2750-1469P.txt file - cDNA_ID_3021839; gDNA_ID_2214701; Annot_ID_189668
gaatgtgttgttaattatcccccttgcacaaaataagtggtccatgagcatattaatatttacaatatcactgcttgttgtaattttataatactaataacacagttagcgaattagatttgtcgatgatacccgacatcattaatgacaacttcaaaacagtgactgtatcacaaattattggacaagaagtttaccttactaataattgtgattaattaagtaatcaagaaggagaagaagaagcaaattgagatttgaggacagaggaatatgctgacattgattttgcacaaaaaaaaaatgctgacattgacatttattttataaatactaatagtgcacatgtgtcatgtgtgatatataaatactgtatgtaggaaattttgccttttggatttgatcaaattggattttaaatagattttggcacgacggaagacgaaatgtggtagaaatcatatttctagatttcaagtagattttgaaatttgcaacgttgcaaggcaacaaatttattttgactgtttacgtctctttttgttagaaaaatttcagaaaatgtttgatgaatataataaaataagcaaaaaaaaaaacttgttcatttttaagaatttattaaccaagcaaaccaaatcattactaattcaaatatcactctgcttaaatagtgtcacactatcaccattactgtcacaaatcttacttaacaacaaaacacatacagtggaaactctataaattaatactcgataaattaataaatacaataaaataattaattttgctagtctcaagtcgggccaatgtaaaaattaagcaaaatcgataagataataagataataatttttttgaaatttctatgtaaaaatatggttccaataatatcataaattaataatcatagatcttaaacaaatattttaagactaattttatatgaaacttttgttaaaactacaattgcaattctttttagattacagttggtatgatctcttttgtactcacacaactctttgagtatttgatccatcatatttggttttgtaacatttttttctatgaaaaatcattgttaagatttgtgtaaagaaaaattggattaagctatacgttaacgtcgtagatatacgaacacaatatcttgtaagaaaataaattaaaaaagtcaaaaataaaataaaatatataacataattgaatatacaaacaacaaaatacgagaaaatctaaattaaaaatattgtttaaaaaaaaataatattgtgttttacgtaaatattctttaaattaatatttattaatttatcttattaattaatatttattaatttattatataaattaataaaattatgtggtcctatcattattaatttatagagtttctgctatatttataattatcgccccaaaataataaaaacagtacaggaaagtcattatgaacatcattacacaaagcccattacaaaattcgcccataagcccaatctaacaacggcagagattcagagtcagttccgacggcgctgaccaaagaaacgcgtctctctctctggagaaaatttcctcacagagaaagaagaaaaagacgagagacgtgaagaagaaatcagaattcagaattgagaagcaaacaatggcttcaacgatctacacttgcaaagaatgcggatcagatctgaatctaaaccctaacgatttatttccaccggatttctacttcgaagccggtaacaaaggaacactctcattcgccgccgtcgacgccgagaaattccgattcgagaaagaagataagatcatgcctttcttcgaaaccctaaattactggggaatccaacggaaacgaaccaagatcaagtgcactagctgcaaccacctcatcggttacatctacgacgatggtcctcctctcactggtggtattggccaatacggatttggtccgagtcaagtcattcctcgtgctcctcggtatcgattcaaaaccaaggcggttcaagtctcgtcccagacttagctaaagcagagggtttaatgcttttacatagatatgtataaacttgttaaaagggttaataggattgtagatgtttgttgcttaaaactcagatagtaaggtcgttagacttgccatcggtcttggcgcttgcttcagcgccaagacggatggcaatacggaggtttaaccgccttttggaactgatttttgttgcttgcttttgaagaaacatctacaatcatattctctcctttgtctcttgtctattgtagctagtatagttaagatatgtatgttaagtatgttgttggcttggattttgatcatatttgtagtgtttgtgtttgttgtgagtttgaatcacatggttgactgatttgttcaatgatttgggacgaatattttcgtagtttgttcaataatcatcggttgttttgtttggtgattcgagttttgtacgaggaactttagaagctgattgttttaagaacaaactctatcggcttaaagagaatgtgaagaacagaacaaaaaccaatagtgttagtttaatggaggacgtcatttgaaaatgacgttttggtgatattgattgtgatggccatttatgattcaacggctgtgattgaatgatgtaacattagttgcttcaagaccatatattttatattatccatacactacctaattgcttaaaatattgttgatgttgatgaagattggaagttacatctacttgtctacttgtcgtttcttgtatagttggagtttatagtttgtcttaacgtacaagataatttgaaaggtagacgtagacgttggatacttatttggtaggctcttaagaatcttaggtgtatctctttagtttgaaggttagattcagaatctctgtagattcattagtagctttttctgtgtgatctttgtgttgtatatatatagatcgaattgattttagctggtgaaaggtgaagttgtggtatg

SEQ ID NO: 29731 - DNA, 3003 bp, Unknown
  misc_feature (1)..( 3003): 2750-1469P.txt file - cDNA_ID_3021858; gDNA_ID_2214701; Annot_ID_189679
cttcatgctccaaaacatgttcgatcttgcaggtgaaagtgcagaacttggaattaatcccttggacatgtttagtgcaaccttctgtatttcttacacagtctctccatggcctcaacattataaactgcttccctccaacgtaaccatgattctgtaaaaaaaatatcaatcatgtgtttaaataaattacctttagagaaattggtggatgagaacaatttgtctattttgttacttgaatttgggaacaatcaaagagatcagagatttggttcagttcaaaggcgttaagatcaagcatggtgcacacctgcactgattcaaagatgcaaaatttatgataaagtaatatatataattagggcatatagaaaaaaattagaacatacttgaacatgaggttgaatatggttgggatctatgccctcggggcacactacgtcgcaggactcgaacctgaagatgttttttcggaaaccacaagtatgcttttggtagtttccatctaagtcttcctctgtcaatacttgaaaccatctcggtttactcatcataaatctatgaggagaagcgatgaataataataacaaaattggtgttgaaggatgataaatctatggagaggtaggaagaagaaatgagcgatgttcaaatctagggtttcacaaaaatagaaaaataaattgttgtttcttttctttttttctctaacaatacaattataatttgtgaagacaaatatagtatataatgatttgttctattcattttatattaattaatatttatatatttagtaattttattatataagttttagttttggaaagttagtcattaacataaatgagagacatgccaaatttaaatttgttcatatatttataagaaaaggaaaaaattttaattctaaaatctatctctacattattaaaagagaaatacaaatgataatataccctttaatttggaatatattcttgaaatactattgattttttatttagattttttttttagaaacttcattatcggatcgtgttggttggcaaatatccaacaaatattttagatacaaataatataaaaatgtcgagaaaataaattagtgagtgcatattttgtccattcaccaaaataaactcagttacgtatgtaccagtgagagcatgttttgtacatgaaccttttttatactctgtagctcaataactataaaggacttttctcgtgtaccaattcatgagacatgtacttgagctctaagacagttatcaagaatagagtaccggtttctatgtctctgcgccatatgcccacagctcccatgcctggtgtaatccagcaatgcttaaagcttgctagctgtaatgaatgttccttcaatccttcacaagaagaaagccaggttggactaactaggctatcttaaaatatacgatcaagagatttatattccagctgagaataaaagaaacctggcttaagtcacccgtagtctcatccaatgtgttgtactgtttttaaatgtcttgaaggatcttgcgctgcaaccaagtctgaccctttcacattttgatcaggttacttgtgtgtttcgcactttctaaaaacttcatccaatacatgaagcatggcgttatagctctcttcagataaagatggctccttactcaatttcaaagaacggacacagagatctgtgccaccgttgagatactaagaatataatttctctatatttttgcatcttttatcacagttgacacatactgagaagggatactaagaatttaagttatttttctttgaatataaaataaatgtggattactatttattattcaaatatcatccatacattttatatctaaatatagaatttaatttctctacatttttgcatcttttatcacacttgacacatactgagaagggatactaagaatttaagttatttttctctaaatataaaataaatgtggattactatttattattcaaatatcatccataagattgagtgtgtaaaataataatagaatgcaaaagactgaaatgaagcaaattttattaagttaaatatcaaagaaaaaatattgattactattgtactattcaaaatttaaatattatcgatcaaaattatttttttttaccttacacccgcctaaatatgcggatcttatctagtattctataatactaagttactaacattaaagaaactaacaaaaattttggtccaagaaaaaattatcaatttttttgtttcaatgattgatcgaccatttcctagattccaaaggtacctcccccatcgaccattttacacacttgtctactttagaattgtttgttagattggtaagtaggtaagcttttgtaatctccttttcttgttgttttagctgggttcagcttggaatcttttttaattaatggaaatttaaaatacaaaaaaaaaaagttatacaaatggttctaatttctatttaaaattttatgggcctgctatgtataaaaaatagaaaaaacattttaatgggcctaatgtcaaaaaaacagaaacaattgttttctatgggcctgcttttgggtcttatggttcgaaacaatggtccatgtgaagcgtgcaccgtcaagtaacctacaaaaccacgacatcgtttagtgctattcctgtttccaaacacaccttaagttcgttatcaaccccatcctctttttttctataaataacgaagcaacgagttaacgagaaaaattctggatcggagagagctacgaagcctgggaattttcgttacctccttcgttcttctctgatctcgaattcaataccaaattcttcaatctcccgaatctgattttcttatcactatccctggataacaaaagcccccaaagtaaaaacccaattgcgattccctcgtaaaccaatctagggttttcgcgagttcgtctctgagcttgtttgtttgtgatcgtgtgagaatg

SEQ ID NO: 29732 - DNA, 3000 bp, Unknown; identical to SEQ ID NO: 14122
  misc_feature (1)..( 3000): 2750-1469P.txt file - cDNA_ID_3021866; gDNA_ID_2214701; Annot_ID_189677

SEQ ID NO: 29733 - DNA, 3003 bp, Unknown
  misc_feature (1)..( 3003): 2750-1469P.txt file - cDNA_ID_3021876; gDNA_ID_2214701; Annot_ID_136871
gattttgaatatagtgttaagattatcaacaatttgtataaatatttctggtataatattatgagagttttgaatctaataagattagaaagcaaatatatagaactttatgttaaaagttataattataagagaactaagtaagaacctgaatcgtgtagtttttgaataaaggatgatcataaattggatgattattcatatgaacgcagtctattatatctccatctggactctgtataaagattatcgaatattcacgaattaatattttaatgaaaaaaattgttaggtgtaattatttttgtgtgaaccaacaaatttcattaaccttgatagatttaagagcaggtttgttgagtttctttaagattttttctacttttgcatcacgagtatcagaaaactcactaccagaaactatcgccgctacgattagaatgctgagcacaaaacgagcaatcatcattcgattgattattaagagtatccaaaatattttttttctttggctaagtagatgattaaggtgagtgccttatatatatatctacaatgaagaattttttttgcaaagcatatgttaacaaatggtaagaaaattatacttcaaaactttttattcattagagcaagactcttaatttaaagcaaattaaagtgtatttaatttgttccttgaaatagcttaatctatttttgactaaataaattgtatatggacatgtcaaaagtcaagtaagctatttcaaggaacaaattaaattttgatttaagttttattattttatcaaaaaatacaatttttaatgaagatgaaaataagtttttatatatagaaaaatacagatttaaatgattttaaagagaaaggttgggtttttacttttgaaaccttccattcaaatagaaggtttaagtattttcagatttagccagatttgatttagtcttagtttattttcctggttttgaatttgatttgttaatttctttttaaaatgtgtttttgttttaatgaaacgaaaactgttaaaaatttaatccaaaccggttttagattagtttttaatcttgttgtggtttaggattgaaaagattcatttcatgtggttctttaaaattgtcatatctctcgtttggagtttctatagtatttctgatatagttttagttttgatgtcaacttgattttcattttaccattatacatgtagatgaaatcatattttgtgaacataattcttttttttctgccaaagattagacaattaatatcctcttgaattttgaaaaaaataatgtataacacaattaaatttagagagcggtatgctatctatgtgttacacattgaaagtgtctgtattatgctatctattaaaactatgagacgcatgcatgtatttacctaacaattaatgtccatgttactctaaacttcaagtccaagaaagcatcaccaaagcttcattcaacttgttcattttgcatttatccatgatttttaagctcattgattgtaaattacgaattgtggcattgtatcgtaactttcttcagattcacatctttaacagtttatatcactcatgccaaacaaaaatcgcatcaatcatatttctataagttttatcagtctaccaaataaactctgttgatttaatataatctattagagcatccacaacacaagttattttttcatcaaaaaaaaaaagttttgggttatggatactctaataaacacaagctattgaagtgccatcaagcccaatactatgagacaaacaagcccatgtaattagggttctctagcaagtagaagtcatccaactctccttcttcatgtgatgaaacatcaaatctagaatcatttgcttttggtgaaaatttaaagtctttccttttgctttctatgcatcttaataaagctgcaattaatgagctatttattttcagttttagatttctcctttaataagctgaatgagcataaacctatctaggtttagaaatgtcaacacaatcttttgaagtattatgaatctcttcaaactcatgtacacgctctcgaaacaacaagacaaagtaaataaagcaagacacaaccataaattaatcgagcaatattgtactatcttggtgtaatgtatggaactaattaccgactacggagatcataacacatttattaatacataattacgttttaaaaaacgagaatgacgaaaagttggtccaacactccaactacatataactaatatcaagctttaaatacttgaatgacgtgttgacgaaacaaatatttatcaatacaattgcgtaaccataataataattcaataggacttttattaatcgtgtgattacaaattttacacacacgttgaatattcgacaaatatgacttgatgtggtcctacttcgatgacttctacgttgacttttgctgtttgaggtagagaaggaaaattacctgccatcttttttttactataattaaataaaataaaataaaaactttactttattatattttcgggaaaataaattgacttcaaagtttcatcatcatacaaaggagaaaactttgaagcttcttactttctttacttcacgatccttcttttgcctaatttctcggtttcatttccaaaattctcttttgattctttcttactctttcgctagagaagatttagactgggttttgagtatttctcggaaattttcgtgttttttttttctgggaaagtttccgagatctcggtggagtactttttttggcgacgaaccagtatggtttggtactcaagctgtagaattttgtttctgggtctgcttattttgttggcttcgagctgggttttggatagatgcgagggatttggtgaatttgggtttgaatttcatcatcgtttctccgatcaggttgttggggttttgcctggagatggtttacctaatcgagattcttctaagtattatagagtgatg

SEQ ID NO: 29734 - DNA, 3003 bp, Unknown
  misc_feature (1)..( 3003): 2750-1469P.txt file - cDNA_ID_3021876; gDNA_ID_2214701; Annot_ID_189673
tgtccatagttgagtcacaacactttgtttctctttgtctgaagattcattatttttacctttagggtaagaacttggtttcatctatgacacaccaatgttagaaacaaatatcgaattaaagataagaaaggctagcttaagagcagaattaatccaaccaattaaaacaatgttttagagtattattgacctgattttgaatatagtgttaagattatcaacaatttgtataaatatttctggtataatattatgagagttttgaatctaataagattagaaagcaaatatatagaactttatgttaaaagttataattataagagaactaagtaagaacctgaatcgtgtagtttttgaataaaggatgatcataaattggatgattattcatatgaacgcagtctattatatctccatctggactctgtataaagattatcgaatattcacgaattaatattttaatgaaaaaaattgttaggtgtaattatttttgtgtgaaccaacaaatttcattaaccttgatagatttaagagcaggtttgttgagtttctttaagattttttctacttttgcatcacgagtatcagaaaactcactaccagaaactatcgccgctacgattagaatgctgagcacaaaacgagcaatcatcattcgattgattattaagagtatccaaaatattttttttctttggctaagtagatgattaaggtgagtgccttatatatatatctacaatgaagaattttttttgcaaagcatatgttaacaaatggtaagaaaattatacttcaaaactttttattcattagagcaagactcttaatttaaagcaaattaaagtgtatttaatttgttccttgaaatagcttaatctatttttgactaaataaattgtatatggacatgtcaaaagtcaagtaagctatttcaaggaacaaattaaattttgatttaagttttattattttatcaaaaaatacaatttttaatgaagatgaaaataagtttttatatatagaaaaatacagatttaaatgattttaaagagaaaggttgggtttttacttttgaaaccttccattcaaatagaaggtttaagtattttcagatttagccagatttgatttagtcttagtttattttcctggttttgaatttgatttgttaatttctttttaaaatgtgtttttgttttaatgaaacgaaaactgttaaaaatttaatccaaaccggttttagattagtttttaatcttgttgtggtttaggattgaaaagattcatttcatgtggttctttaaaattgtcatatctctcgtttggagtttctatagtatttctgatatagttttagttttgatgtcaacttgattttcattttaccattatacatgtagatgaaatcatattttgtgaacataattcttttttttctgccaaagattagacaattaatatcctcttgaattttgaaaaaaataatgtataacacaattaaatttagagagcggtatgctatctatgtgttacacattgaaagtgtctgtattatgctatctattaaaactatgagacgcatgcatgtatttacctaacaattaatgtccatgttactctaaacttcaagtccaagaaagcatcaccaaagcttcattcaacttgttcattttgcatttatccatgatttttaagctcattgattgtaaattacgaattgtggcattgtatcgtaactttcttcagattcacatctttaacagtttatatcactcatgccaaacaaaaatcgcatcaatcatatttctataagttttatcagtctaccaaataaactctgttgatttaatataatctattagagcatccacaacacaagttattttttcatcaaaaaaaaaaagttttgggttatggatactctaataaacacaagctattgaagtgccatcaagcccaatactatgagacaaacaagcccatgtaattagggttctctagcaagtagaagtcatccaactctccttcttcatgtgatgaaacatcaaatctagaatcatttgcttttggtgaaaatttaaagtctttccttttgctttctatgcatcttaataaagctgcaattaatgagctatttattttcagttttagatttctcctttaataagctgaatgagcataaacctatctaggtttagaaatgtcaacacaatcttttgaagtattatgaatctcttcaaactcatgtacacgctctcgaaacaacaagacaaagtaaataaagcaagacacaaccataaattaatcgagcaatattgtactatcttggtgtaatgtatggaactaattaccgactacggagatcataacacatttattaatacataattacgttttaaaaaacgagaatgacgaaaagttggtccaacactccaactacatataactaatatcaagctttaaatacttgaatgacgtgttgacgaaacaaatatttatcaatacaattgcgtaaccataataataattcaataggacttttattaatcgtgtgattacaaattttacacacacgttgaatattcgacaaatatgacttgatgtggtcctacttcgatgacttctacgttgacttttgctgtttgaggtagagaaggaaaattacctgccatcttttttttactataattaaataaaataaaataaaaactttactttattatattttcgggaaaataaattgacttcaaagtttcatcatcatacaaaggagaaaactttgaagcttcttactttctttacttcacgatccttcttttgcctaatttctcggtttcatttccaaaattctcttttgattctttcttactctttcgctagagaagatttagactgggttttgagtatttctcggaaattttcgtgttttttttttctgggaaagtttccgagatctcggtggagtactttttttggcgacgaaccagtatg

SEQ ID NO: 29735 - DNA, 3003 bp, Unknown; identical to SEQ ID NO: 26146
  misc_feature (1)..( 3003): 2750-1469P.txt file - cDNA_ID_3021880; gDNA_ID_2214701; Annot_ID_189670

SEQ ID NO: 29736 - DNA, 3003 bp, Unknown; identical to SEQ ID NO: 24907
  misc_feature (1)..( 3003): 2750-1469P.txt file - cDNA_ID_3021882; gDNA_ID_2214701; Annot_ID_189669

SEQ ID NO: 29737 - DNA, 3000 bp, Unknown; identical to SEQ ID NO: 14118
  misc_feature (1)..( 3000): 2750-1469P.txt file - cDNA_ID_3021888; gDNA_ID_2214701; Annot_ID_189666

SEQ ID NO: 29738 - DNA, 3000 bp, Unknown; identical to SEQ ID NO: 26150
  misc_feature (1)..( 3000): 2750-1469P.txt file - cDNA_ID_3021901; gDNA_ID_2214701; Annot_ID_189659

SEQ ID NO: 29739 - DNA, 3003 bp, Unknown
  misc_feature (1)..( 3003): 2750-1469P.txt file - cDNA_ID_3021936; gDNA_ID_2214702; Annot_ID_189716
gataggaatggagttccaaagaatttaggtgctacgtactaaatctataactgagtaaaagaaggatgacataatgtacaggaatctcatcagtttgagctcatgccacaccaagtgacatttggtttgataactcagggtttaccatacttttcgacatacccctgcaaatgaacataagaattgttagcttatgcaatacttactacttaggtttttacctgctttaagtgtcttttatttccagctaagaaactcacctcgacaagtttcacaattctggttccagacaaaccaagatattgatcaactgattctgtgtcagttggcacctgatgaaactggacagcggcgccgactaccttttctgcagcttttttaactatcatgttatgcacgtctttagttagacgaccctcacgccacaacggtttcaacatttctttaatggtttccacaactgcagtccggaatagtctcattactttcattcctgcatctgacctcacttcaccatctatctcatctgatttctttgtctttttatatgaagacccatcacttctatgccaagaatcatgccctgcaggtttgattcttttcaaaacaactctattctctgcagccgtagccgaagaaatctctttgctaggcgttgctgtatcattttgatcaaccactgacgtagccaccccttccactactccatgtgcttccaaactccttgccacggtttcttggtgttgattttgactgcatgaactgcttttatcatcattcttgcaatcccgtgcttggggaccactagcagaatcaccatctttctgctggcaggaacttttccgtgcatgttctcctttacttgacaatgaatcattaagaggtctgtctcctagattctctatatccgtgaaaggatcgtagagggcatcagacgagggaagaatataaggtggaattgtaaaagatgctttaaaaggttcagaaggttcccagtcatctgaagaaactttctttttagtgctagtagtgttggcttctgcgcctttatcagaagaaacagctaccccttgcagcgttggaagtgatccggatccagataaactattcccattttcaaaatcccccaccgtagaagcacgatcattcataggaacagaactggataatgatcctgtccaggctggtccagcagatcccatgtctgtttttaaataggaactgatagaaggtctatgctcatgaacaaagctgcttctcaatgcgaaggaattggcgttattaataactagagacctgttgtcagtgaaatcagcaccatacgtttgcttcaaactctctcttctaatgttttcaaatgaaggcataaagcgcatctcgttattgaacgggaaaactctctgagaacctgggggattcacaaaagacatggaggagaaaactctctgaggattcatgaaagatatatcctctctggtaggcaacgatgtcacaccgttttcgcttaactgggaaactcttacaccttctctgctgtccaaaattcttctttctgaatagacataagcaaaataaattattggttgattcagaaagagtaattaaaccccatagatattcaccggcctctatattgttggaactacctccacatagaatcacaagaataagtattcatggtacaacgtacctagatcagaccggataccaccgtttccagccatactattttccgccagttgttgactagtgcaatttgaattctctttcacatgtagaaacttgcaggacaccccattgaaacaccaccctttagcaaaaaatttgcagggaagagctgcacgtttttgttctggttcattcccaccaccgccagtgaaaaagcttcttggcggtatacccggagcaggaaatctgataaccgaatttgtcagtataaaagcttcaacctcttaacttagtttcagcaaaacttaagcagaaacttttttgccataccttggtaaagtaccattatcttgagcaaaagcttgctcctttatgatttttgattgctcatctaaaggtgttgttacagaatgcctcttcacatctacatgagacaagtttaatcagtacatattagcaaaactgctgttttgaataaacaaaagagattccttacagaaacaagcacaaaactctgagaattgaatttgcttacttggtattaaagccacaatttttacaaaagagcttcagtgaaaatctaattgccaagtctttgaacctctaatcagagctaaatctagtcaatttaacaattctctctttcttctagaacaaaattcatcaattccaaattggaaaaggtgtttccatcaataaaaacacgaacttgacagaattaatcaacaataccatgtaaccaatcacgaatttcaaatactaaccgttgtgggaattggaagcttgaattggtggtttatcaaacaattcagattctcttacaattgtatgtacttgcaccttttgttcgacctcatcatcatcaatgtccatgtcggaatcagacatcttgaagtcttcggcgaggtaaccaacgcagagagtggtaaattgataaaaaaaaatactgcggcgtgatcggggtccgaagctcgctgttgagtcctgatgatctccgagaatacgtttggtatatcgaaaccaccattgttacaaagaccaccgaactattttatatctaatgggcctttcctaaataattaaagctttagtattaaggcccatactaaattccaaattttaccaactatttcctaaattaacacatcgttgcctttttatagtaaccggattaaaccaaaacaaaattaaagagaatcgaatcaaaccgtgaaaatcgtgaagcgtagtggtgctatattgcacgttaactgtctccatcactgccactggtaaaccctaagaatcctccgcaatttcgcaattttgtgaaggagccgccggctaaatttgatg

SEQ ID NO: 29740 - DNA, 3000 bp, Unknown; identical to SEQ ID NO: 14140
  misc_feature (1)..( 3000): 2750-1469P.txt file - cDNA_ID_3021940; gDNA_ID_2214702; Annot_ID_189715

SEQ ID NO: 29741 - DNA, 3000 bp, Unknown; identical to SEQ ID NO: 14165
  misc_feature (1)..( 3000): 2750-1469P.txt file - cDNA_ID_3021976; gDNA_ID_2214703; Annot_ID_189761

SEQ ID NO: 29742 - DNA, 3000 bp, Unknown; identical to SEQ ID NO: 14156
  misc_feature (1)..( 3000): 2750-1469P.txt file - cDNA_ID_3021980; gDNA_ID_2214703; Annot_ID_189760

SEQ ID NO: 29743 - DNA, 3000 bp, Unknown; identical to SEQ ID NO: 14163
  misc_feature (1)..( 3000): 2750-1469P.txt file - cDNA_ID_3021988; gDNA_ID_2214703; Annot_ID_136913

SEQ ID NO: 29744 - DNA, 3000 bp, Unknown; identical to SEQ ID NO: 14157
  misc_feature (1)..( 3000): 2750-1469P.txt file - cDNA_ID_3021988; gDNA_ID_2214703; Annot_ID_189754

SEQ ID NO: 29745 - DNA, 3000 bp, Unknown
  misc_feature (1)..( 3000): 2750-1469P.txt file - cDNA_ID_3021996; gDNA_ID_2214703; Annot_ID_189748
ggaaacaaggcactgatcggtgaaggttcttatggacgtgtcttctgcggcaagtttaaaggagaagctgttgctatcaagaaacttgatgctagttcttctgaagaacctgactcagatttcacctcacaggtacacacatacatattacaataacgattatcttctcttcaaactataatttgttcaagcttcttctcttcaagctataatttgttcaagcttcttctcttcaagctgtttagattaaactactgttattttctaatctaattaatttctattcaaaatggctaagttatcggtggtatcgcggctcaaacacgaccattttgtggagttgctggggtactgcttggaggcaaataatcgcattctcatttaccagtttgcaactaaaggttctttacatgatgtattacacggtacgtaaattttaactctcactactcatattttagtatatggtacatgaaatatatatggaccaattgaatctttagggagaaagggagtgcaaggggctgagccaggaccggtgctgaactggaaccaaagggtaaagattgcatatggagcagccaaagggcttgagttccttcacgagaaggtccagccaccaatagtccatagggacgtgaggtcgagcaatgtcttgttgtttgatgactttgtggccaaaatggctgatttcaacttgaccaatgcttcctccgataccgcggctaggcttcattctactcgtgttttgggaacattcggctaccacgctccagagtattataccataaacccgttaattcatttgtttaaaacaacctgatagttcttgataacgtaagagttttgttgtcttaggtatgcaatgacaggacagataacgcagaagagtgatgtgtatagttttggtgttgtgctattggagctcttgacaggaagaaaacccgtagatcataccatgcctaaaggccaacaaagtcttgttacttgggtacgtacacaaattaaagcaaacattttggaatgactccatatatatcatcattataagtccccttttaataacctttgtattgttgttacaggcaacaccgagactaagtgaagacaaagtgaaacaatgcatagatcctaagcttaacaatgactttcctcccaaagcagtcgccaaggtccgttcttcattttcttcttcaaatatcaaacgatatcttcatttactttgcttggttaaagatattttgatattagatgcatctagatatcatattttgaaaactagggacatatgattatttggtttagctttgtaattttgaaaagtttctttgcgtatggtcgaacagttggcagccgtggcggccttgtgtgttcagtatgaggcagatttccgaccaaacatgaccatcgttgtcaaggcacttcagcctcttctaaactctaaaccggccggtcctgagtctacgtcctaaactaaacaatataccatttctcttgtttttgttcatgttgttgttattatggctattttctccctcttttctgttccaagaactatgattattggttgtaagatgttgttatttaagcgaatgtaacttatatttttcatttggtttaacacccctttcgttttttattgtatctaagccttaaatccaagtttgctctcacaattttgaggagtcaacgcaagcaatagcaaattagttgtgagatttaaataataaaaaaaagtaaatatattaaccattaaagactttcaaattttttactattctcaataaaagatttagagatttatgtagattgtattatacctctagtttcttataagatgtttatttgatttccatctttctttaaggtaagtatccattataagacaactgccaaaacttagacatctttctatattcgttcatctgattccaatctttcttattttgttaccaaattgtacacatttcaatattttggggggctcatctttatttttattcaattcagtaaccaaaactagaagttctttctatcatatgcctatcagataaaaagtccttaaatttaaaactagaagttcgtttttttcatactaacaatatatatcaaataaataaaaaacttaataaagtcataaatttaaaatgtgaagaaaccaatactataataatttattatttatcgtcaattagttttgaattcggaactcgttacccttcatttgataaaataatttatatagtgaattaatattttacaaaatgaaatttagtataagtttccatggtcatatatctcaaatcattgagtaaaaaaacaagagtgatgacaaattacaacataatgacgacacccacacatgaagctgaagtcccaaaaacaaaccagtaaaccacatttcaccaccacgattcaaaatatataaaaaaatatggaaaaaatgatttttcttaattggtccatttgatgaaaaaagaaagacatttggatttttgctataaaaatgaaatcagcggcattaaaaataataataaaaaaatgggatggtttttaccagaaaatctcaagaaagtcacgtactgtaacagtaaagcacattttaggtttatttttttattttatttttaacttttttaacaacacgtcgcctcttttatacacagcgtctctctctctctctcctcaatataacatacttagctgcgaatctcgtcgtcatcgccccgacgaaccctgtttcgcgtctctttcccaatcccaatccaatttcgattccttcatttcaggattcgtatagccgtaaatccgttattgggttcttccgattatccaccgatagatctcgatcgaacgtttttctccgattggatttttgggtgatttcgccggaattcataatcagacgggaggagtcgcttctcttctcttgagtaatttagtccctttttgtgttatggaatcaattggttgatgaacaaatacaagtgtaaaacgatg

SEQ ID NO: 29746 - DNA, 3003 bp, Unknown
  misc_feature (1)..( 3003): 2750-1469P.txt file - cDNA_ID_3022003; gDNA_ID_2214703; Annot_ID_189745
gaagttcggtccttgtatatagctgaacattgtgaggtcacatataacgaaaaggacaagatatgcttgtccctcaaaatctagactcttttttctcatctttcatatttattatctttattatttattactggcccaaacatttcatcatatttcttttcagaaaaataaacaaggagggaatttgcatacatatgtgtatataagagtggaggagttgaatccaagaaatggatgtgagggcaagaaagtgagagatatggtcccctcaacaaaagccattaaatctctgagcatatgactgtgactttaatggcaaagcaaagaggtttgcaattgcatgattcaatgaagagttgctgttagggtttgggagatttgtgggcttttaagtgcatgtttttttgtggggttcaagtgccattcatgggacccaattacattttttttagatttgttttacttttctttgtaaccatgtttttagatatgcatttacaatatgttttttttttcttcccttttttatgagatttaaaagtattatattatgacacaagtatgttacactggttaggacttagctttagacaaaaaaaaatcagagtccgagattttatatagatttcgtctttttaatcaaaaaagttctgatatataacctaaaaagactacgtagtatgatctaagagatttgacaaaatttggttgtagaaagtccgatattaagcattctcatcaatttcccttaaatatttttctaaaatattagaggaatacaaaaaaacattctcattaactatataattttaataacagttaaaactttcatatttgcatgccaaggctctctgatgagtttaaatgttaaatcgcatgtgtaggtttaaacagagtttattgtttgtggaaaaataaaagagacgtggactcgtcatgtgaagtccaaaatctgcaaaattatgtatgtaaattaatgtactttgggaccagcattcgtatggacattattaccatagttgaatttacttccctttcttacaataagcttttgattactcatatatacctcacacatgttatgtgaatcggtaaattcatactatatgtgaggaagtcacttacaacagttggattttaaagggaatccgtctgaaaaaaatttggagaaaaaaagaaattgttttgcttacataatttaatttaaaaattataaataacaatacttttataagagaatagtttatctgttgaccaaaaaaaaaggaatagtttatctatccacaaatggatgatccatattggagtatatagaacgataagagatgattcgatacgtactaaatgaaaactttgaatactgtgtatagtaagcaatcagcattagtttacaagatcttagttttcgtaggattagtttagactgtttagtaatttgattccaaccattgtacaggagaaaatttttaccgctcaaaacaactaactgaacgtcatacttaattgggaatttgggagtcgtcaaagaaatgaaaaaggtcagattaatttatggattaatgagttttatagtccttattccagcttgacattagcaacatatacattatttgtgtgacataatcagggaatatatataatcaaaattaatgggatttaaaatttaattattcttacaaaatatcaaaaaatttagtgtagacgaacaaaaagagaatacatatatatatatagttcatttgaagaagacgtgtatatgatcgatccgagttgataagtattaacagattacatacatattgataagatgatgtgatctcatcgattaaggttcaatcttttaaattggttaactatctggtgatgacatgtcaactagtcgattatgagcatcattaatgatcatgaacatggaccacctctctctctctgtaagattatctttgcatcaaagagacaaaacatccaagagactaaaagtatggtccttgagagagaagaagtctctttaattaggtctttctatttctctctctctctattagtagtaaaatccatgtacttatacgtagacataataaccaaataggtccgtgatgttaaagagtacacacctaacttcaccttgctaatgatctcttacctacaaactctcactgtttttagttcatctcattactcactgtgaccccatttcatctgcttacgaccaatttggtaagctttttgtcttagtttcaacatttgcaggaatcactttaagaaacaactaactaaaaaggagataactttgaaaaaggaggattgatgggtttgtttttgatgagatggatatttgtatatgtatgtctaatgagagatatattgcgtaggggaagtgaatgtagattagaggtctccctatatattgattgattttatccggctatttttacctaccgcgacacacggtatagattcatagtaagctacaatttaaacacaagataaatctgtaatcatatagtatagtactatgcttccatatataccccatatttacgtctcctatgcttccatacgctaattagtttttttttttttccaaccataattgcaggtttatataaacatgaactaacgaaaaaaataaaatataaacatgcaccatggagtcaattttaaaattctatgaggtttgattttcaaaaggaaaaatctaatatactaatgaaaaaattgagatcataaaaaaactaatgaagaagtagatttatttattttgaaaaatatgtacaagtgaaatgtggatcattctttagctatatatatataggtggataaacgtaaaatcacgcacgcggccatgctgcaggggttaaatagcaattatgtatttaccttaaaaagaatttgggaacctctctttaaattaatgcaaaacctcatctcttgtctttctgtctctgaaacagtcaacctcattcttctcaaactcactctccctgatctctctcttccatg

SEQ ID NO: 29747 - DNA, 3003 bp, Unknown
  misc_feature (1)..( 3003): 2750-1469P.txt file - cDNA_ID_3022007; gDNA_ID_2214703; Annot_ID_189742
gagtggccttcaaagcaaattcttgggagacatgtgtctatgttaattacttaatgactcactaactaattatttatgtggcgttagtgcaataaatagataaatatttgttgggtagaagaactgagtgggggctaatccataaaggattaatttttggatttcttagggatgtggatgtggtttatggggcaggtgacagtgatatagtatatctttaaatgtaatataataaagattcttaagtaagttctttactttttgtcaattcttaataaaaattgatcaaccacattttctttttttaatgctttggaatatgcaaatttagctttgtgttgagatggtggcctggtgggttgatttaataatattcacttaaattcttttaatactttacattatctaaatacgatagatattaatctgtttttcactccttggtgcaaccaatttttgtatcctcgagctcacgtgactgttctctttggactctttcttagcattaaactttgatcaggaaatgaaaacaaaaacaaaaacaaaccaagattagtgcgaacatgtttattcattctctgttcagttatcttgtcttcttttgctagagcgtatagcccaataataggatgtttaagttgttctttctttatcggttatactttaaataaatataaatttcactaaagaaagcaaatggacggatttgagaaattaaaaaaataggtgatcgtcacctttcagtgatcaaactttcggtgcatatgtttgttcttgagtgattttctttatcaccttttatatttccattaatattttaatttaccaaaagctttgcggtgatgtgatcaaacacaaaaatcacaagacttatgccgagtatcttattcaagataacaccaaacctatttgagcatatattatacgcaagaataatatttctaagaatttattcatcaatttataccttttaaaaatattgttttgggtttaaaatataaaagaaaagaaaaagctgattgcgacgcaactttaatcaaaaccaaacagaaagaaaaagaagcataaacagagaaagtaaggtgaagaaaaagcatagcagaagctaggaaattcattccttcttcccccttctaatgattctcttcattgttcccaaaaaaagtcttcaaatttcactttgtttttattcattcataatgtttaataccaaaatttataccagccaaaatctactttaccaaaaagtttaaggtttttgatattgtctttttaggttcggaacaagctaataataacataaataaaagggatggatcacccacctgggccactctaaagtctaaaccaattgaagtaaccattttaaacacacaaaattatgttggtgggcttttagctctttaaaaatccacacatatgttagtgggctttagctcgtggaccagatacggttacatggttacaaaaggccaaacccaaatcggaaaacatgccggaaaatacgatctgcactcattttgaccaggtaaaaatatggttggaaacgcgtaaatgaatcaaagccacacaatgaaataaaaattcaacggtgaggttcctacattatttctgtaatttctgttttttttgtgtgaacaaacggatttctaattttaaatttacctaaaaatagcttaactccatccggtataaatccccaaaagcatcatccaattatcctcagacctgcgagaaacaaaaaataataaaagtaaacaaaactaccaaaaaaaaaaacagaaaaaaacctttcaggtctcaactagcaatggagatgaagaagattgcctgcggagtcgttttcgctgctgcttccatgaccgccgtcatggctgcagaggtcggagcacctgcaccaggacccgccgcaagtggagcctccgtagctgttccggctcttggctctttggttggagcttcccttgtgtctctcttcgcctactacttgaactaagcttttctatttaaagcaaaaaaagaagaaatatcgatgtctctgtcaatttctatgatgtccaattttgtgtgtgttgtttagacaggcaaagtgaataaaacgaaaaataatttgattacggtcagacatgtttttatgtaatgctgattaataaatatatatatacactatctgttttctctttttcatatatctttcttatactaccaccatattttggttactatattttttgcgcaggtataattttgaccaagttagaattttacaaagtcttaattttattgaattcaacatataaagctttgtgaaagttatttggtttaggtgaattcacatggtctacacaaaacaaaaaatgtacaagcagaaagatattttctgctcataaaaacatcctcaaactattggatattgcctagaaatcgcttaccggttctagttttctgagtgattttatccgacaaaagtacacatcgtaatttcaaaacaagcgtatcacttgttgaatctatgacgaatcacaatcataaaccactggtcttgtgattttgttaatggttcaaattataatgttgattgatgtctcacataagtcacaacagaacatgatcagatcatagaagccactaacaacttcagccgcagtaatcaagctcttaattagcgatttgtattgttaacagcgatgccttttttaattcttttatttttttggaaactaaagttttgtacgcttttcagaaaaaaggaaattgttattttcgtttataattttcgtttataaattaatacgatttgaagttacttatgttttacaggaaaaaaggaaactaatgagtttacttatctctaacagaaagaaggaaacttttctctatatatatgataactctcttcaccaaattatttcgattctcagatttcacgtacatcacctaggttttgtttcttaacttggagccaaagaaatcagagaatcaataatatattccattgcaatg

SEQ ID NO: 29748 - DNA, 3000 bp, Unknown
  misc_feature (1)..( 3000): 2750-1469P.txt file - cDNA_ID_3022015; gDNA_ID_2214703; Annot_ID_189739
tttgtggcttcgttattatatcttgtcaatcaaatggtcaataaactgggcctgtcaaattgttttgagtcattttagaggttggtattccggaaggacagaaaccattaagtggtgatatttctgtaatagttgcgtaccacaactctccgttcttctacattatcgagttccctgaaataactggaatcggtaactaaatcgggtgataaacgatttgattgaccttatgcagttgggcctaattccacatgggcctgtgttgtgaatcttttgtggtttgagactctgtttgcttcagaggtttgtcttgtgctctaatattattaatgtattctcagatgaggtagaactatgtttctagttctctttttataaacggaatttgacttcgaggatatcagccgtcgaagttaactactccaacatacctatacaattttatgaagagaaatacacaattaaatttgttttggaaataagaaatcatattgtacaagattgtcatatatttattagtttaaatgaataaatatatgatgggcataaaataatatatattaatatatacataattttctttaaaaattgccgatttattggctgctaagaaagtaaaagtaagaattatgatctaaaacacgaaaagggaagcaattagctcaactgctccatgttagattggagagatcagtgatgaatggaccctatgaatagaatgtatgacacacccgttcctctcaattttttttctttttgttatttctttattattgatgttttgtatgactaaatattttcattgaatatatgaaacaattattatgtggggatttacttaaacggaaaatattactttttattatattttaacactcatggcttgtaatctgcatgcaacgcatgagctttatgacaaagttattttgcattatttctctactaaacaaaagtgaaaggaagggtctcctttccttctatgaaaatcaaaaaagtaatctaaaagctttaacaagggcatctcactcgtcttccactcgctcattatctgcaacaacgtaattatttgttccctatgtatttgactaacccagactatgacgtcgagattattctttagtagtttagtacgtcttcctctgctttcaaaaaacgtgtcatatactcctgtttgaattcggatacgtgtaaattgaattatatatcaaccttctagccgttttattacaacaacaacaacaacaagaaatctagccgatcactttactggcgcagaaaatgtcaaactaagcacccagttgcctcgctttttttcaacaagtaacttttttggattcaaaacaagtgagttttatagtatttttaaaagtaagcgttatttcgaaaaagataaggaaacgaatatagtatagacacacacgtgctagagtgctaggacccgacattcttcaaccgaggcaagcaactcgtcaaaccctgcctgtctaaagctgaccctcttattatttattatattgaacggagcacctctgattttctcaatttttccatttggccaaaaacattgaaattaatatataaatacaatttgttgttaatgaccgcaaatcagaagaaagaatatacataaatttagcagtaactgagatccatcgtaaatatcaaaaaaaaaaaatgtaaaaagaaatctaaagtcattatttttagtctatgcgagtcacagagcaaaactatccatattttagtctattatctaagcagcagtagaactgttagttatcgtaatcataattattggtgctttattatgctagaattattggtcctttattatcatcattattaatgtatggttatcatctaaatgtaattcaagattttggagacctattgagacgagggaccattgttagaagttcttattgttgagagttgagactggaaacaactatttgttttgcaagaaaaggttacaactttaaaagtgtgtaacaaagaaaatggacactaaactcgttgattatattacttcattcatcatctaagtcggcaacgaattgattaaatatggaaactaataattgaacgcaacccctaatctgcccataaattattgtcatgtatatacttgaaggttttttaaaatctcggtctttatgttctatggattttaaagacttattaatccttaaataaatacattctcttgtttgcattcttttaaaagacaactcgtaaaggaaaacgacaaagttcaatcaaagctttaaaaaaaaatgttttcttttgtaccatccattgctcaagtaaaaccactttccttttcacactagccaaaagaagagaagcccaaaaatttatcagattcatcatctcattgtaactctcccttgagagatttctcacattatccaccacttgcatcatcttcttcaacatttcagttttcactacgtctctttcaatctcttcatgcttcttcgtctacatctactggttagtgcgtcttcactgtcttcctcttcatatttcacaacagcttcattctctgaaattcttatagtaatccactcattgagtttttaaatccttcaaactcaatatcttgggtcccatttttcagcttaaagtctctgtctttatggtcaatctttacagtaataccctccacaattcttcttcgaaagttcagttagctttttctggagattataaatcaaaattttttcgtcaacaacactattaattgctctggtcaatttgttgatacttacttggtgatttgatatatctgtgggtccaatataagaaattaagcttcttcaagtgccatacctggtagaaatttgttttgaggttcttattcataatatcttcttttaaagtttgggtttttatttttggaaacacaggttttggattttggaatcatgttgagatgaaaccagtgtctctttccttgtatcttgctgttgttgttggatctctaaatcagacatg

SEQ ID NO: 29749 - DNA, 3003 bp, Unknown; identical to SEQ ID NO: 25452
  misc_feature (1)..( 3003): 2750-1469P.txt file - cDNA_ID_3022046; gDNA_ID_2214704; Annot_ID_189794

SEQ ID NO: 29750 - DNA, 3003 bp, Unknown; identical to SEQ ID NO: 25451
  misc_feature (1)..( 3003): 2750-1469P.txt file - cDNA_ID_3022050; gDNA_ID_2214704; Annot_ID_189793

SEQ ID NO: 29751 - DNA, 3003 bp, Unknown
  misc_feature (1)..( 3003): 2750-1469P.txt file - cDNA_ID_3022053; gDNA_ID_2214704; Annot_ID_189792
tcattgcacaatcaaacagcaatactgaagagttcctggtgaggattagaacagaaggatctaagctcaggatatacgtacaatgtcggataattcttcaatgaattctcctctatctgccagaaaacaatcaatagacaaaatcaaaacagctttcagaagcgtaatccaaaagctgagactaaatcaaacaaaggtaaatccagtaacgaattccagaaatctaatcaacgcaatctgcaatcaagtaacaactcttcactatactatcgccatatccatcaatctaacatccctgagaccaaaattagaaagcgaattgaagaaaccgcagaagtagaagaagctcaccgacggaagtgatgctcttgagccgattcgaaacgaaaacaatcggagctaaaacagataacaatagcagcgagaggatcagaatcctctgccaacgacgaacttgattcatcaatgtgcgtaacttctcagagaacgcttcatatattttatctccgttgcgctttaatcgttctccacgaagaagaagaagcacattcccagagggaagaacacagatctcggagattctctgcttcttcaacaagcaattgaagaaaacgatgagcagattagggttttcagattcttctgcaataggattcgataaatgcgagagtctgtttctacgatttcatatctggagattcagagcttcctcgtgcatgtttagagacttctgctcttttattttttttcgcttaactcagattttttaatatttataaatcaatgtatttatttgatttttatacggagaggattaatgttgagatacagatatagtgcggcgcggtgtacatgtgctagcaaaattactagtttactaagatttgacttcttttgattggcttagtggaaattctcccaagccaccatagatgttttgacacgttgatagaatgtactgtcaatgattttcaagagtgggaaattcacagctttgtactttggagtttggaggaacaactggaatgtttgaggtcgaatttgggaattgaaatttttaacccctggatgagtttatatttgattgatctctctattatggggtgttgaatgttatttacaaaaaaaaaatagtcattgttttatggacgaataaattatctacttgtcgtttttttaccgaataacgcataaattagattcaatacggataattcctaaaataaaataaaaacggttagttcttctaacatacgttactataacaaacgtacttgacgagttggcataaaaatgtatttctactgttttaaaagtaacgtacgattcgtcttgcatactgtgacgaaatatgtaaattcttttgtcgcttagtgatgatgtgaattattttgattcataaagtagaaactcgatacatacctattaactaaacatgtattatgttgtgattcatttttgcctaacaaataaaatttattagcaagaaccattaaaatttcatactaattttggatactaaaatgttagattgatatataagaaaagtatatactcaaaaagatttaacaatttaccaatatttagtattggaatcagtgtagtgtttgttagtacatgcttttctacatttagaaacagttaaattataattgcaaaaggaagcaatattgaggtattaataaggttttacacttttacttcagctagctttgaattttagaagttttatggactattaaattatctacttgtcgatctttcataaaaactgttggctcttgcgagagatatgtgaccttccaattgatcgcgaagtgataagatgtattcgattttttcagcttatgccatttttacaacttttcggaaaaatgtttcaaaatatccattatgaatttgacatccaagttataaattagataaaatttacttgagataacatatggacatatagattttacttatttattagagttcattaacgaaaaattattgagttaaatatagacatctttaaactcgttaattttaaaaagaaataataaacaatatatatatatatataaatattttattttcaaattttatttatttaaagggttttaatttttattaacagttataatatttatgattgtttccggttactttgatgctattttctcgtaattcccttttgtacatatatatttagaaccaaaaattcaatcattgagaagcatactctctgtcaagtgtaattgattcctcctcttcattttttaattcttcatttcttaagttttattaattaattgactcacctcttcatcttgtttatttccaagtaattttcctaatgatgtcaataaacaaaaataaaaagattaaaatcacgcaatatcagtaaaaaaggagagagggttaaatcggtggtggactttgcagccctaaaccattgtttcgcctcggaaaagcccatttacacaattgggaaataaataaaaacagagtaaagaaaggaacgtcttttactctttacggtatcgctcgcttctcttctttctcctcaacacgaagacccctcttgcctctttattagagagaccccttccttcttcttcttcaccttcaccttcttcctcgattcagatcgtctcctcctctgttttatactcaccctattccttcgaatctctctccatttttatccccagattctcccttcttcaacctcgtcgactcttcttcatcactctatttcttccgattgagacttctttcactctgattttcttcgaccctttacggatatattcggtcttgagtctccatcggatttggatttgaatgtaggtatctcgcacgagagttgttgtttaacgtaaatctgggttcttttttttggtgggtcgttgtttttcttctacatgcagttttggggatagtacgtgcgattcatcgatcaatcctcgtttagatagacatcaaggatttaaaggagtcgttaagagagcaatg

SEQ ID NO: 29752 - DNA, 3003 bp, Unknown
  misc_feature (1)..( 3003): 2750-1469P.txt file - cDNA_ID_3022066; gDNA_ID_2214704; Annot_ID_189787
aaggttccccaagtacattaaagtgactttgttaatattttgttttcctctttaattcatattatattagtaaggaaggaccaacaaaagttgcataatcacaattcacctacccttttttcctcctagataccaaagtgagcattttgagttgaacaggacaatatgtttctttgttgcagatgctaaagaatatggtacatccgcacatgttttatatatgtatttgcaacttttttatgcatgatcggattagaatcttacaatttatgtggaccaagcttttactttttctctcgaagaatattattttgttcaagaatcatgctcagatgaagggtgtgggtgtgagatagcccaaagtggtggggaataagcagagagatatgcttattcttctcttgattgacggtatttttcgcagccacgaaaaagagatcaggctgggtttgatggattggatcgtgtgtgtgtcaacaattaaaaaccctattcttgaaacatgtcactatacaacaagatatgattgtctttgtgagattctctcaatctcacttctgatcatgaaggaataataactcctatcggtttcttactttctcttgtgtgccacttccctttcaacaatttgccaagattctttcccatttaccacttgactaaagtaaaccagtgattatgagatcccatgtcagttgaagtaagcttagacctagagtaatatgtataggacatgaattaatttactaacgccaattgattttgtttaaagattaaggaacttatttggtccaagtaagatatgttgtccttcatagaatgagaacaatttgagttggaccaagacaatcatcacctcgaaagataaggattagagttagaaatccatgaaacttaacatagttacaaactcagcatatatttggaattgatcttcttgattcttatattaattatatatatgaccatctgaatatctatgttaaccccctcttccattaccaccaaaaagtgcttcccgtaagatcggagacttgccctatatagaaatatttgttttggtttggtaaaaagctttctagggattataattaatgattgaaaaagggttagtagctaagtgaggttatatggtcactcacacgatgaaaccttgaagaagtggccataaaagataatggcaggctggcgataatggctactacaaactcccttataagccatgcatgatcatagattcatagttactctttctctccgataaatttatatatttatgtttcaaaagctaataatcttttaagcagttttcagaagtgagttgtttagctttaagaatatacaagaatttgaatatttagagggttcattttcggatatggtctaaagaaatgggccgggtatgcattgtctcgacgactatgaccaaactgagaagaaaattgaacgtgcaacctcctagctaagtgacataccaatgacttatagaaatctcatatatgtttaataagtcataacgcaaaaattatttctaacaaaagcaaatgggttgattttggaactatatttaatggcatagaaaacttcttcgaatcagaaaagaatataaaatacgtgtgagttaggatgtcaccatagaaaatctccacaaaagcgtgaactcgattctatatatataacattcaatcattcttactaaaaacatctatatatatatattttaaacagtatggatccattcattctgatctgtaccagattgcaaaaattagtaagatatcacaattaaataaatgaaatacaaattgagttattttggattttcagatgaaaccaccaaacaaatacaagttgacttgaatgttctccaacgctatttttttctctattatattttataactaattaattcattaaatcacatgtccaaatatttaatgatgaaacataaagtaagtaagctagtgacgagagaaggacacctcattctcattacataatgtgacgagattgagctgtcgttttgttgtaaatatatggtcgggggtcaattattcatatgcagttttaggtcatttataaagaccattaaaaacgtctttaatatttcaacaatcttataattcaattattaagaagcatctagatatggattcacattagagttcgtattctttgacagcaaattcacattagacttttgatatatatattgtacatttgtaatatagtatacgaaaatattacttgaaaactgatgttatgtgttgccatgatgccattggtccatgacttttccacacgaaggccaaagcatactcttatattatatgagttgagtcattcttttttccttttgacggcaagttgagtaattcaattctcttgtcacttaccggtgatataagagttaatcttataaatagttttctgaaacttaatatactataacaatgtaaaagtcgtcgctttgttatttgaagtgaaaattaagcaatgttatgatatttttactaattaactcaatatgaaaaacaaaaatcctcttaactaaaacagaaacataaaagacgacttagtttttgctttagatctagactcataactcaaaaaacaatttcattataaacttttgtagatcttacaattttaaaataaaatgtacattaatgttgaaaagcaaaatcttaaattagtgtatactactactttttttttatcaccgtgatagatcattagatccttaacctcaatccctagagcctgcttattgcctttaagcattgtgcaatcactaccaaacacactcaaaactaaataaatataatttataacttatcaaataaaataaatactatcaagtgtgtatgaaatcgatgacaatttatttattaccttattaccatttgtgtcttgaagtacacgttaagctatttttatgtgttataaaggcttcttcgtcaaccaattacgaaatcaagcttttgaagcttctcaacaatg

SEQ ID NO: 29753 - DNA, 3000 bp, Unknown; identical to SEQ ID NO: 14172
  misc_feature (1)..( 3000): 2750-1469P.txt file - cDNA_ID_3022070; gDNA_ID_2214704; Annot_ID_189784

SEQ ID NO: 29754 - DNA, 3000 bp, Unknown; identical to SEQ ID NO: 14173
  misc_feature (1)..( 3000): 2750-1469P.txt file - cDNA_ID_3022074; gDNA_ID_2214704; Annot_ID_189783

SEQ ID NO: 29755 - DNA, 3000 bp, Unknown; identical to SEQ ID NO: 14175
  misc_feature (1)..( 3000): 2750-1469P.txt file - cDNA_ID_3022086; gDNA_ID_2214704; Annot_ID_189779

SEQ ID NO: 29756 - DNA, 1705 bp, Unknown; identical to SEQ ID NO: 14192
  misc_feature (1)..( 1705): 2750-1469P.txt file - cDNA_ID_3022115; gDNA_ID_2214705; Annot_ID_189820

SEQ ID NO: 29757 - DNA, 3003 bp, Unknown
  misc_feature (1)..( 3003): 2750-1469P.txt file - cDNA_ID_3022119; gDNA_ID_2214705; Annot_ID_189816
tagccatctaatcaattctgcgccgtttcttaatgttcttcttgtcgggatatcacccatagattgtgttcacattttctcattgcacggggtggtaggttttacttttcctcttcaacttgtgttatttgacaatgaacgaagaatgttctgttttcaatgggttagtatttatgcttcttttgccaggtcccattacttgctggtgctttgatgccaatatgtgaagcgtttggctccggcgttccaaacattacgtggactctcccgactggcgaattaatctcctctcatgctgttttctccactgcatttacacttcttctgaggctatggagatttgatcacccaccactagattacgtcttgggagatgttcccccggtgggccctcaacccagccctgagtatctgttgttagtaagaaattgccgtctggaatgttttggaaagtccccaaaggatcgcatggcacgtcgaagattttcgaaagtgatagatatctctgtggatcccatcttcatggattcattccccagactgaaacagtggtaccggcagcatcaggaatgtatggcttcaattctctctgaactaaagacaggaagcccagtgcatcacattgtcgattccctccttagcatgatgttcaagaaggcaaacaaaggtggtagtcagtcactgaccccatcttcagggagcagtagtttatctacttctggaggtgatgactcgtctgatcaactcaagttacctgcatgggatatcttggaagcggccccgtttgtgcttgatgctgctctaactgcttgtgctcatggatcactctctccccgggaactagcaacaggtttgtccattccctgaaactatagaaagtgttatctgcttaatgacaaggggatacttacctacatctgacgatcataagctattttattgtcttactgtctggatgcatcataaacgctacttcagaaggtagctaatagttgggtgggcgagatcttaatctgtcccttgatttgtttcaggtcttaaaatcttggctgattttctgccggcaacacttggaaccatggttagctacttttcttcggaagtaacacgaggtctgtggaagcccgtttccatgaacggaactgactggcctagtcctgctgcaaatttagcaagcgttgagcaacagatagagaagatcttagcagctactggcgttgacgtaccaaggcttccagcaggtaatgcttttcttctctaaggataatggatattctcaggtgtccaggggttttgtcatgaaagattagaaccttagatgcagtcatggcagtcccggataacatgtccctggagggtcttgcttagatttgtaaacaattgtgatatctataaaactgaaactgcggagaaagtgtgaaaagaacatgctggaagaaacgaatacaatgattatgctgaaaaaactctcatagtttacacacgtctgtctttgcagatggaatctctgcggctacacttcccttgcctctcgctgcactagtgagccttactataacctacaagcttgacaaagcaacagagcgcttccttgtacttgtaggaccggccttagactcccttgctgctgcttgcccctggccctgcatgcctattgtgacatcgctgtggacccagaaagtgaagcgctggagcgactttcttatcttttcagcctccagaactgtgttccaccacaacagagatgctgttattcagctcctcagaagctgcttcacttgcacccttggtctaacacctacttcccaactctgcagctatgggggagtgggtgcactccttggccatggctttgggtcccgttactctggaggaatttccacagctgccccaggaatcttgtacataaaagtgcacagatcgatcagagatgtcatgttcctgacagaagaaatcctgtctcttctgatgttctctgtgaagagcattgccacgagggagctaccagcagggcaagcagagaaattgaagaaaacgaaagatgggtcgaggtacgggattgggcaggtttcactttctttagcaatgagacgtgtcaagctggcagcttccctgggagcctctctggtgtggatctccggtggcctaaacctggttcaggcactgatcaaggagacattaccgtcttggttcatctcggttcacggagaagaagatgagttgggaggtatggttccgatgctaagaggctatgctttagcctactttgcaatcctgagcagtgcatttgcctggggagtggactcctcatatcctgcatcaaaacgtcggccaagggttctgtggctgcatttggagtttatggtgagtgccttggaagggaagatatcactgggctgtgattgggcgacatggcaagcttacgtgacaggctttgtgagcctgatggtgcaatgcacgccggcttgggtgctagaggtggatgttgaagtaataaagagactaagcaaaagtctgaggcagtggaacgagcaagacttggctctggctctgctttgtgccggcggccttgggacaatgggtgcagctacagaactcattgtggagacttgccatcaacattagcttgacgtctttcaactttcttttctcgactaatctaaactgtgatcatgatcacttttgttcctgagattagctctctcttttttttttttgtttgtctatattgtatattatatttattatttagagcaacatgattcgctatgtgtcacagacactgactggggaaacaacattagattatgaaaggaaatgaagccaagatttttcagatttctttgagacatttttcaattgagctactagtactaagctacaccacggggtttaatttgtgaaatccgaaactagggagactaaatccgaatagatatagatagcctaagggattcggggctgcaacaaaatcactcccactcactgcgaagctcgactatg

SEQ ID NO: 29758 - DNA, 3003 bp, Unknown; identical to SEQ ID NO: 21029
  misc_feature (1)..( 3003): 2750-1469P.txt file - cDNA_ID_3022123; gDNA_ID_2214705; Annot_ID_189815

SEQ ID NO: 29759 - DNA, 3003 bp, Unknown
  misc_feature (1)..( 3003): 2750-1469P.txt file - cDNA_ID_3022127; gDNA_ID_2214705; Annot_ID_189814
aacactaggcgtcctcgagtttttttcttccttttcaaaccagtttggtaacgtcagatttagttgacatatgaatgtagttttattacttaatttgaatttaaattgcataagggccaatcatgagattcgtcgtattcatttttgtttttaatttaaatatacgatcgattttgtctattgtgcatattatgcatctgctggagtcaaacttgactcttgatcgtcggaaagggacttctccatttatgtattataatggacgtaaacaaaaattgtgagttatcgacacaacttcagaaacacctctcatttatggtatattgtgaataaacgaataagttatccattggaaaaattaaatcagtagctagtagaaacatatatgaaaaaatatactgcgacagacagtatattaactgggaaaggagaaaaaccgagaaagaaaagaaattgtcaaaggaaatcaatcgtatttaattaagaaaaggaaatctcaactgaatctgcccttttttggttaagggggcttcagattaaaaaagagttatcgcttcataatgaatgaatgaatattcagtacaggtcacgacgtcatgttacgtacgactaaaaccgcccattttcagaatcagagccgatcggggtattgtttaataacggatttaacgatcgtgcatgtcatttcgttataattccaagctttctcatcattatcattttattatcatctttatcaacttaaacagactcttctttggcggcccattcacagcccatataatgattcttaagaaaagaaaccactcgctaccgatgtaacaacaaaattattaaaatgatcactagtattatagttttcattaaaacgacaaatccatgtccgtacttgtcaacacacaccacaaaacatatacatatatatcaatctctcaggccagaggattattcaaatcattaatttgtcgaaatccatcacttgaaagtcgggttagcacgagcaatggtggaagaggaactgagcttcatctttgccttctttatgtactcagagaactgatctgatgatctccggccactactacctacgtgagagataggcacatggtggtgaagatgatcatgacgtgtctgatctgtttcatcacttgtctcccacgcatcctccttcatcatatcaccgacattcgtcatcgcccttatcttcagcttcgctttctttatatactcggtgaacctctcgtccgttttgatcgtagtatccactcgagcgatcaccggttccacctttgtaatgggtttggctgccctaggcctagccgatgtctctgcaaatttgacgcgaacagcctctgctggtgaagatttggtggagatgcgacgaacggttcggacaggactagtcactgctctgaagatcttctcgcacactctgttttcttgcttcttcttgctactactctgtgatgatgagttctttgccatggatgtcaccttgggaagtactaaaggtgatctgtgcagagaagatagtgacattaacgagctttttataatgcaaaatctatgtgattttatctttgttaattgcagaataacgtgtttcaacatgcaacaagcgaagaaattacaacttgttgaaaagaggaaagttggaaacttttacaagtttttcaaaaaaggaagagtgatgttagaaagggatcggattctgattccactatgttttctttctttctttcttcttcgttgtttttgtttcggattgttacgttcctgtcaggatttgagaatcatgcatcagctgtcactcctctcaggagggggagattatatctacttgtaacatactaatcttccaataaataagcacttcacatattattaaaatacagtagattctcataattaggccattttccataagcttttgtttacttatttcaatccactagtatgcttttcacattattcttttcctgcaatttagcatgaatcatgtatgcaatttagcatgaatcatatatatgaaacgggggtttactaaaactctatacataaatttctaaaactctaacccactccaacccggttttttctgttcgggtatcgggtccggtttttttttcgcaggccctaattaagacattcaagaaaacaagaagaagcataagaagaggcctaaatgcccagagaattaaacaaatgggcctttaacaatattttaaacaacactgaacaatagatgagatctcaacttcgaaaagctaaagccttaatataaaaccaaacatcaatctctcgccgttaaggttacatctgtcgccgccgctgagaccgccacttaaggccgtctcctccgctctatccatatccaaaacagctataaagataaacttccagagcttggtgaaggagcagcaaccctagttttcaatccctaaaggtgaagtttttgttcttctttttctttgattctactcttttttcgtcacaatagcgcagtagcgatctgggttggcgtttttattgacggattttggtgggtttgggttcgtgttagattttactttcacagattcaggtatgtatttgatcttatttagctttggtaatactcaaaccaactagtatttgatcttaattaggtgacgttgatattttgtgtgttgtgggtcaatcatccactctaggttgatctgcgtctatgtttagtcctaattttgaagaatcattctaattgctgatgtttatttatgacaattttatgtcttacttcgaatttagctaagataataaatctagacgagtgcctttataaacagtttatgtatgaacaatgcttcgcttgtgggattgttgatttcactacatttgattaagaatgtacatactattacaaatgttatcgattaaaaacgtcattttcagatattagttctccagcgagttgacacaaaacccgattacgtttcatccggcgactcgctttgatattccatg

SEQ ID NO: 29760 - DNA, 3000 bp, Unknown; identical to SEQ ID NO: 8350
  misc_feature (1)..( 3000): 2750-1469P.txt file - cDNA_ID_3022131; gDNA_ID_2214705; Annot_ID_189809

SEQ ID NO: 29761 - DNA, 3003 bp, Unknown; identical to SEQ ID NO: 21947
  misc_feature (1)..( 3003): 2750-1469P.txt file - cDNA_ID_3022135; gDNA_ID_2214705; Annot_ID_189807

SEQ ID NO: 29762 - DNA, 3000 bp, Unknown; identical to SEQ ID NO: 3110
  misc_feature (1)..( 3000): 2750-1469P.txt file - cDNA_ID_3022153; gDNA_ID_2214706; Annot_ID_136967

SEQ ID NO: 29763 - DNA, 3000 bp, Unknown; identical to SEQ ID NO: 3110
  misc_feature (1)..( 3000): 2750-1469P.txt file - cDNA_ID_3022153; gDNA_ID_1620626; Annot_ID_47142

SEQ ID NO: 29764 - DNA, 3000 bp, Unknown; identical to SEQ ID NO: 3116
  misc_feature (1)..( 3000): 2750-1469P.txt file - cDNA_ID_3022153; gDNA_ID_2214706; Annot_ID_189844

SEQ ID NO: 29765 - DNA, 3000 bp, Unknown; identical to SEQ ID NO: 3116
  misc_feature (1)..( 3000): 2750-1469P.txt file - cDNA_ID_3022153; gDNA_ID_1620626; Annot_ID_162479

SEQ ID NO: 29766 - DNA, 3000 bp, Unknown; identical to SEQ ID NO: 14215
  misc_feature (1)..( 3000): 2750-1469P.txt file - cDNA_ID_3022193; gDNA_ID_2214708; Annot_ID_189871

SEQ ID NO: 29767 - DNA, 3003 bp, Unknown
  misc_feature (1)..( 3003): 2750-1469P.txt file - cDNA_ID_3022213; gDNA_ID_2214708; Annot_ID_189865
ggttaaatattagtttaagtttatgaacgagtttagattttataatttaatgaggtaaaatgttggattcagtttataaaaaacggttaggggtttaaatttaataataaaacaaggttaaatatcgatttggttttataaaagaggaatatagtttagattttgtagttaaacgagattatatgtcagtttggagtcattaaaaattgtttaggattgaaatttttgacaattaaatgtgattaaattattgttttgtttggataaaagaatgattagagattagaaattagatttacaattaaattagtttttcttataattaaatttaagtgtttgattctgatgggtaagaataaaaagggtgaagaaaatgtttagtataaatatttatgtatagtcctaattatgaatttatgtatttggggagtaaaaacataagttgtaacctttaaagtgtaacaaatattattaagatatcattagaaaattgtaatagtgtaacgatagaaattcactaaataaatacacaggtcatgggtcataattcaggtttataaagatctacaaagattacatacagtaaaacatctataaattaatagtcgataaataaataacctctataaattaataaattattccgatctcgagttgagaccagtgtaaaaagtgatacaaatcgatacattaataagataataattttcctgaaaatcctatgtaaatatatggtctcatcaatatcataaattaataattatataaatgtatcaactacatatatatatatatatatatatatatatatatataagaaatttctttgaaattatatttctaatatttgtttgcttaaatttgtatttgttcttatttgaatttagttctaatattttacagtatcaaaaaattttggtgttgttttctaaacagaataattattttttactctaagctacctaaagtatttataataagtagggtctatacagtgtataatatttgaaatgtataagaataaaattatatatagtatgggtactatttcaaaatcaaagtattaaattgacctaaattatgtgtattttaaataaaagtatcattaacaaaaacaacaaaatgatgtttaaattcatgagacggatatatagggtgggacaggttttgatctatatttattcttcttcactaaacaaaacaaacaacaaatacttctagattaaaaatttgaaatttaatcaaattatatataatttaaataaatatattagttgaaagaaagaaaaaaatgatgtttagttatgacgagacgagtttatatggcgggacgagtttggataagacggatttatattgcaagatgagtttggatggaacatgtttggatgaatattaatatgagacaatatactacaagtggaatcctataattaacaatcaaattacaactatacaatcttaaacactattttttgtaatcttttaaaaatcaacattatatcaaaataagtgttaatcttctttgacacatctaaatgtgtaattgtaatacaaacttactaaattacaataattctacaagttaaatctataaacactgaaagttttagttatatatttttgatacaaaaatgtgaatataacataacagattaatattattttgtcttttaagatttgacccgtgatacaccaaaagataaacttattaatattgtaaacttatttctcactaaaaataataaacaaaattatcgagaatcattaatcaacacaaataacaacaaacattatacataaaaattcattttataaaaatcaaacataaataaaatatttgaccacgatatattgcggatcctatcctaatctctctctataaactcctaattcttgtgagaattcacaacccaaatgtgaaatcaatttattgtaaaaccataacataaaaatagaatacatttcaagatccaagtataaatagtcttttttttttttgtcgtactactacgtatggggtgtgttgaatttttggtgttgataatccgagatttgggggatgttaaaagccaggtcgaccacgtgagaactgaatacgacagcgtttcaatcagcgccgaataaaaacacacataacggtgcttattgctgcgagaacggcggaacatttttttttatatttttatttttattacttaataaacaaacaataaaaaaaaacaaattaaaaagagacagagagaagaaagagaacctcctcaccttcctcctctctttgcgcgttttctctcttctctctctcctacggctgttgaaaccaatggcatttctccacttcgccggaatttcgatcggaagatgaatcgtctccttcgtctctcttcgcttaatcgtcgatcttcttctgtcgccgtctaattgcaaatccaaatcgtaaacgcttcttctcttattcttccttcccccattgttatcgtttcttcgctcgatgtgatcatattcgattcttagagttttatcgcttctttcgatgagataatctgcgtttcacatttccagatcatttgattgcgtttgttttttgtgttcattcccgattttgaactttttatatgttttcactggatttatccgcgagcgacggagaattctcgaggacgcattctgattttgaatttgtgttgctcaaagaatttgaagatctaattcatgttttcttcgacgagatcgtttttttttcagagtttttttagtttgattctgcaatgtagatcggaatgttattgtaatttcacgagtatagattggatttatacattgaatttgactaacttggatttcaagtttcagattgttcaaatttagaggttctgattcttgaatgtttttttttcttttaattgtgtatcaggttttttgtatggtatagagatttggtgaagaactagacgcagcttagaggaagcttttatatttattgaagcttagggggaaacaatg

SEQ ID NO: 29768 - DNA, 337 bp, Unknown; identical to SEQ ID NO: 7049
  misc_feature (1)..( 337): 2750-1469P.txt file - cDNA_ID_3022237; gDNA_ID_1621124; Annot_ID_56349

SEQ ID NO: 29769 - DNA, 3000 bp, Unknown; identical to SEQ ID NO: 14214
  misc_feature (1)..( 3000): 2750-1469P.txt file - cDNA_ID_3022237; gDNA_ID_2214708; Annot_ID_189858

SEQ ID NO: 29770 - DNA, 3003 bp, Unknown
  misc_feature (1)..( 3003): 2750-1469P.txt file - cDNA_ID_3022241; gDNA_ID_1621124; Annot_ID_56348
cgtttctttcgaattaaaaacgtttcggtgatggtcatttctccctttccatagcccgatatcagtctcatcattttgttgtgcaggtttctggcttttgatagcgttttcaaccgtatttaagaggtcctgcctatgtttctttcttcgattcatggacattacctcccccacagttgcagtaactcagattcccaagtcaatacatcctcttatcccaagtttttcatatagacagcctatattactccattcatcaaaccaaaatgaggtcgtttctccatttttgacctctactctatagaactgttgtgctatccctctatattccatatccaagaaccgcaagttgtagtgtcttttactgccgagaaggagccttttcttatgaaatatttctttacccattcaacccacaaagatcctttagccgacagtatacgccatatcaactttaatacacttactttgtttgcttcttcaatcgaccgcagccctagtccaccttcattctttggtgtgcagacctcagtccatgccacttttacctttcaagggttcatcgatggtcttgaccacagagaacttgaacacagtttatctatttcttgaaagcatgctttgggcagccggaaagcagctatccaaaaatttgtaagactgaagatcaacaaaaatttcttcacatgttgattttcaaatttggaaaactctatacaattgtttctagcagacaagataaatgtaaattttccacgttctatgacttttcagtacctcattgattcacttcaacagactactgtcatcattagtcgataacgtcaccatgtgaaattaatttgctcgtgcaacataacatatgttgttcaacaagtatatttattcatccatgatcctcgtcccaagaaagtcatgctatggcacttgtaaatgcatccaacgttacgttcgatgtattttaatctcctcgatcatggccgtgctatctttttttattatttgttttggccatgcaaaaatattgctacttcatttttgtaattttatcacatatataaatgtttgaactatgaaattctattaatttataaaagtattaatttatcgataaattaataattattaatttgtagagattttagactaattttgtaatttaaaaaaaaatattatgtctgaattttttcttcttctttataatcattatatttttaactttacgatggtaacgttaaacctcaaataataataaattattaactttagaaaataaaaaaaagaacgttttcgatgtagtaaaaagatattaaataaactttaccaagaattaatataaataaaaataaaaatattagcaaattcatatttcactatttttcttccgtataacatatatatatttaaaaaaacttttacaattattaatttatgatattaatgagaccatatatttacataaaattttcaaaaatttattatttaattaatatatcgatttgtgttattttttacattgatcttaactcttatacgataatctgaaaacaatttaggctcttattggtaacacacataatgcagaaaatttgccaataaaaaaaatctgcataattgtattagaaaacgcaaaaacgtaagatttgtatttttgttttaagtaaaaattcattatgccaaaaagtgtgtatataattatttatttgcataatataatcttattattctatgcatacaaatattagcaattgtaaaaaaaaaagtatcatagtttacacaaaattatatcattagtaatacaaaaaaacattttcataactttttaataaattttaattatcttacatttttagtatcgaaaattactcaaatatactaatttgttttaaacattattttttattaagtttatatatatatatatatatctacatatatattgttaatataatattttttttttaacaacttcaactttattaaattgtataaggttgatacaaataagaaagtaagaaacgaggagggacaataaagaactgatacagagtagtagtagacagaacgtattgagccatcttatctgcagcactatttcgttcacgattgacatggagtagagatacgttggatagtttggccatccaatgacgaatatcgtaaagaagagcccctatcagagaatgatcatcaccattattgatagttgctataagttcttggttgtctccatcaaaacaaacattttttattccacaagcccaaactacttgaaggacatgtaacaacccggtagcttccgcctgtaaaggtgaattagtcgatggtagttttcaacagcctgtaattaaaacctttccttcatcgtcccttatcaaccatcccgtatttgtaaaggatcgtcccagcataaagccactgtcaaaattacacttcacccatcctcttggtggtggtcgccattgagaacctctgtcatgaaccgtattcttgtttgtttgactacctcttgtgccttcagtataactgtttgcttccagccattcatttgcctcgtgtcgtcctatgtgttcttcggtttgtggcagtctcatgatcttcttgaaatatttatttgtcattttgcaaaatatatccaattaatatattttaaaattagtttcattcgacgattttttagtttgcaaattttcattctgcgaaatttttattctacaatttatgtcattatgctattatgcaattttagcaatcggaaccttaaggaaaaaaaccgacaagcgaaccgttctgtatgtatttcggttattttcagccagccctatttatttggttaagcttagattaaaaagtttcggtttggttcaatttgatatggtttggaggtcaacaacaaaatcaacgaactgaataaagcgatcgcgttggttctcttcttcaaaacaagctctctctgtccctctctgtctctctctttgggtaatcggaaaaatcagaaaaatg

SEQ ID NO: 29771 - DNA, 3003 bp, Unknown; identical to SEQ ID NO: 29770
  misc_feature (1)..( 3003): 2750-1469P.txt file - cDNA_ID_3022241; gDNA_ID_2214708; Annot_ID_189857

SEQ ID NO: 29772 - DNA, 3003 bp, Unknown; identical to SEQ ID NO: 29770
  misc_feature (1)..( 3003): 2750-1469P.txt file - cDNA_ID_3022241; gDNA_ID_1621124; Annot_ID_172219

SEQ ID NO: 29773 - DNA, 3000 bp, Unknown; identical to SEQ ID NO: 26160
  misc_feature (1)..( 3000): 2750-1469P.txt file - cDNA_ID_3022292; gDNA_ID_2214712; Annot_ID_189922

SEQ ID NO: 29774 - DNA, 3000 bp, Unknown; identical to SEQ ID NO: 14224
  misc_feature (1)..( 3000): 2750-1469P.txt file - cDNA_ID_3022296; gDNA_ID_2214712; Annot_ID_189920

SEQ ID NO: 29775 - DNA, 1487 bp, Unknown; identical to SEQ ID NO: 411
  misc_feature (1)..( 1487): 2750-1469P.txt file - cDNA_ID_3022296; gDNA_ID_1590839; Annot_ID_150135
  misc_feature (9)..(9): n is a, c, g, or t

SEQ ID NO: 29776 - DNA, 3000 bp, Unknown; identical to SEQ ID NO: 14231
  misc_feature (1)..( 3000): 2750-1469P.txt file - cDNA_ID_3022325; gDNA_ID_2214712; Annot_ID_189898

SEQ ID NO: 29777 - DNA, 3003 bp, Unknown; identical to SEQ ID NO: 25598
  misc_feature (1)..( 3003): 2750-1469P.txt file - cDNA_ID_3022338; gDNA_ID_2214507; Annot_ID_184163

SEQ ID NO: 29778 - DNA, 3000 bp, Unknown; identical to SEQ ID NO: 11648
  misc_feature (1)..( 3000): 2750-1469P.txt file - cDNA_ID_3022350; gDNA_ID_2214507; Annot_ID_184160

SEQ ID NO: 29779 - DNA, 876 bp, Unknown; identical to SEQ ID NO: 11654
  misc_feature (1)..( 876): 2750-1469P.txt file - cDNA_ID_3022366; gDNA_ID_2214507; Annot_ID_184153

SEQ ID NO: 29780 - DNA, 3003 bp, Unknown
  misc_feature (1)..( 3003): 2750-1469P.txt file - cDNA_ID_3022386; gDNA_ID_2214508; Annot_ID_133789
caacaaaccacaaacgctaccattctaacaaatccatgataatctctaaaattctctaatcgcgagtggaaaacaccgatgaatctaagctaataggataaatcaaaatggtgcgatggtggtggtacctgaatcttatcggaaaggtaagaaggatctgggaatccagaatcgctgtcgctgctgcaccaggaaccagcaccaccgctaccacctcccgtttccagaaaatctgtaaccattaggcctaggtcatgttcaccgtcgtgactcgaatctatccctcgattcaaccattcctccgccggaacaactctcaagtccatacccatcgttcccaaatctcggtcaattgttcaaatttcaaacccagaacttatgaataaaattgaattgaattgaatttgagtctgtacaaaataaaaaacgcgtatcgtcccctttcacgagtcttgtgtgtgattgattttattatattatatagcgatgagagagacagagcttgaaggttctttttagcgaaagagaaaaatccaggaagataggcgaaaaggaagatgaagcgaagatgaggttaatataatactcatgttaaatgacaaaaatgcccttatatgattaatgatattaccatttgagcttgctgtggaagctgtaacgaaccgaaaattaaaaacagaataacgaacatagacggagaatatgatattattcgttttaccaaagaaactaacaaatagttttaactttatctaacaaaggggtaaaacgggtaatttgtttgggatgaggtggagcgtagcggacaatcgagaaattaaaagtttggcttggggacgaagttaaaggtgggctttaacgttttaaattggctgactcggacgatatttcttgtatttaataccaaaaatgaatgactttataattcatttgtagattgaaagttacgtattgattcgaaaatcaacacattgtgttttcaagtgggcataaactataacaccttgttgattgattaatagattacctaaagacattatggtttattactggtctttcaatatatttttatcgcattgtcaatgatattgtttttgtatcccaagtccactgttttggtctctacattcattttgattgggatttatctttttaaaatttcttctaatgttttttcgatatggttattacttgctttgattttcttttcagtatgtgtattgctttgcaaattgtttttttcttaagatgaaaaacaactcattaaattgtttgagaaatactactaaaacaaataaacaatgaggagaattatggaaaacaaagtgtaataggctttaattcattgctagtgggctttttgggcctatgggcatattacttaccactatccaacccaaaatgccaaataaccgacatgtctcacacaatccaattttgggccatacggccgaaattatttaaacctgtgctcataatttactttacaaattattacttttccataaattgtggaaaagttatctgtaacatccgattcaactggagtctagactactatagacattgatacgttttgagtttttagatacttggaagatatatgcatttatgaatacagattacagacacatactagtactactgtatgtctgtatatggatacaaaaaaaatcatgtatgaatactaaaattttattagaaatctatttttcaattgttgcaacaatcaagttgtcaaatttatttttgtaaccgttaaacaaacaaatatcgatttaggtttctaatctgaattgacatctcaaacaaaaaaggctgaatactttctgaaaatagtgtatggaatgaaggtggcttttagagccattataaccggaagaaaattcaggtgacttttagaaccattataaccggaagaaaaggtgaattttaatttttagctgtgtggaagacacggcaagtccaagtagtaccttcgtacgtcaatattgtccaaccggccgtgtcgaaaatcttcttgagaaaaattggattttcatctataaaaaaaaaaagtccaagtaataccaaacaaagacagcgacgtgtaaaacaatacaagactcataatcacaaacctaccacccaagtcaaacctatattccatttagtgaattcttgattatgacttcttgaaatcatttgtattcatatgtataattatttaagtcatttttctgtaagtaaaatttttatatatctagaataacgagttccctacgacaagatacagttgaacgtaaatgtgacatctcaattttcattggtgtctagtactctagtgattaggttttcgacatttattgtactgattaagtaaaaattcatggtacaaacatcgaatatatatttttctgcttacacacaccaattaacgtggatagaccaattgaaatattttgttacgacaaagcaaaacaaaacaaacgtcatgtttcgctgtttgtttgtcgtcccgttaatggtaatctttcagacacatacagtacccaaacaagtaatttgactaaaattttctctctgtctaaatttcagaagaaaaaaaaactttaggatatattgccaaaagatcttaaaaatgggtcatatcattttgatcatatagaatccaacgacctttatcttttcgccgaactatacttttttgtgtccatttgtttgactttctttcacacacacatccacaaagaaaaaaggaccattcttctccttcttctagtcacccctcgtgcctctctttaacaccaaacccaaaactcccttctctttcttccttcctctccgatctccgttcacatctctctctcatctttatcttcttctttttttgccttgtgggttgaaagtttctatattttctctttctcttctgtttacataatccattttcagctcaagcagctgaagaataacgatcaagaaccaaaaaagaagaaaacgaatctgttcttagctttgatg

SEQ ID NO: 29781 - DNA, 3003 bp, Unknown
  misc_feature (1)..( 3003): 2750-1469P.txt file - cDNA_ID_3022386; gDNA_ID_2214508; Annot_ID_184174
ctagcgatctcaaaatgacttctgaaatcaatatcaacaatcaaacgatcatcttgaccaacttcagtatcactcaatatgatatctatatactcattatctcctgcaaacaaacaaaacatatcattctctcagaattctatgtccagaaacacttgtataagacggttcttagaagcgaaaacataccaccaggaactttgccaccaccttgccatctagctgaacatacagctgcatcatatccagaaagtctcaaaagcttagcgagataaaacctgatgcaactagcgttacatgtaccggatttcacagagtgtagatctttctccttaatagtaagcatcaatgtacgaaccaccgagagaacctcggtttcgtgttgagccatagagtacttgagatactgcagatacaaacacatactcttaattcaacaaaatgttcttcaccattcctagaaacctatgtactaaaacatgccttccttcaaattacaacaaaccacaaacgctaccattctaacaaatccatgataatctctaaaattctctaatcgcgagtggaaaacaccgatgaatctaagctaataggataaatcaaaatggtgcgatggtggtggtacctgaatcttatcggaaaggtaagaaggatctgggaatccagaatcgctgtcgctgctgcaccaggaaccagcaccaccgctaccacctcccgtttccagaaaatctgtaaccattaggcctaggtcatgttcaccgtcgtgactcgaatctatccctcgattcaaccattcctccgccggaacaactctcaagtccatacccatcgttcccaaatctcggtcaattgttcaaatttcaaacccagaacttatgaataaaattgaattgaattgaatttgagtctgtacaaaataaaaaacgcgtatcgtcccctttcacgagtcttgtgtgtgattgattttattatattatatagcgatgagagagacagagcttgaaggttctttttagcgaaagagaaaaatccaggaagataggcgaaaaggaagatgaagcgaagatgaggttaatataatactcatgttaaatgacaaaaatgcccttatatgattaatgatattaccatttgagcttgctgtggaagctgtaacgaaccgaaaattaaaaacagaataacgaacatagacggagaatatgatattattcgttttaccaaagaaactaacaaatagttttaactttatctaacaaaggggtaaaacgggtaatttgtttgggatgaggtggagcgtagcggacaatcgagaaattaaaagtttggcttggggacgaagttaaaggtgggctttaacgttttaaattggctgactcggacgatatttcttgtatttaataccaaaaatgaatgactttataattcatttgtagattgaaagttacgtattgattcgaaaatcaacacattgtgttttcaagtgggcataaactataacaccttgttgattgattaatagattacctaaagacattatggtttattactggtctttcaatatatttttatcgcattgtcaatgatattgtttttgtatcccaagtccactgttttggtctctacattcattttgattgggatttatctttttaaaatttcttctaatgttttttcgatatggttattacttgctttgattttcttttcagtatgtgtattgctttgcaaattgtttttttcttaagatgaaaaacaactcattaaattgtttgagaaatactactaaaacaaataaacaatgaggagaattatggaaaacaaagtgtaataggctttaattcattgctagtgggctttttgggcctatgggcatattacttaccactatccaacccaaaatgccaaataaccgacatgtctcacacaatccaattttgggccatacggccgaaattatttaaacctgtgctcataatttactttacaaattattacttttccataaattgtggaaaagttatctgtaacatccgattcaactggagtctagactactatagacattgatacgttttgagtttttagatacttggaagatatatgcatttatgaatacagattacagacacatactagtactactgtatgtctgtatatggatacaaaaaaaatcatgtatgaatactaaaattttattagaaatctatttttcaattgttgcaacaatcaagttgtcaaatttatttttgtaaccgttaaacaaacaaatatcgatttaggtttctaatctgaattgacatctcaaacaaaaaaggctgaatactttctgaaaatagtgtatggaatgaaggtggcttttagagccattataaccggaagaaaattcaggtgacttttagaaccattataaccggaagaaaaggtgaattttaatttttagctgtgtggaagacacggcaagtccaagtagtaccttcgtacgtcaatattgtccaaccggccgtgtcgaaaatcttcttgagaaaaattggattttcatctataaaaaaaaaaagtccaagtaataccaaacaaagacagcgacgtgtaaaacaatacaagactcataatcacaaacctaccacccaagtcaaacctatattccatttagtgaattcttgattatgacttcttgaaatcatttgtattcatatgtataattatttaagtcatttttctgtaagtaaaatttttatatatctagaataacgagttccctacgacaagatacagttgaacgtaaatgtgacatctcaattttcattggtgtctagtactctagtgattaggttttcgacatttattgtactgattaagtaaaaattcatggtacaaacatcgaatatatatttttctgcttacacacaccaattaacgtggatagaccaattgaaatattttgttacgacaaagcaaaacaaaacaaacgtcatgtttcgctgtttgtttgtcgtcccgttaatg

SEQ ID NO: 29782 - DNA, 3003 bp, Unknown; identical to SEQ ID NO: 25602
  misc_feature (1)..( 3003): 2750-1469P.txt file - cDNA_ID_3022412; gDNA_ID_2214509; Annot_ID_184201

SEQ ID NO: 29783 - DNA, 3000 bp, Unknown; identical to SEQ ID NO: 11679
  misc_feature (1)..( 3000): 2750-1469P.txt file - cDNA_ID_3022416; gDNA_ID_2214509; Annot_ID_133804

SEQ ID NO: 29784 - DNA, 3000 bp, Unknown; identical to SEQ ID NO: 11668
  misc_feature (1)..( 3000): 2750-1469P.txt file - cDNA_ID_3022416; gDNA_ID_2214509; Annot_ID_184197

SEQ ID NO: 29785 - DNA, 3000 bp, Unknown; identical to SEQ ID NO: 11664
  misc_feature (1)..( 3000): 2750-1469P.txt file - cDNA_ID_3022420; gDNA_ID_2214509; Annot_ID_184193

SEQ ID NO: 29786 - DNA, 3003 bp, Unknown
  misc_feature (1)..( 3003): 2750-1469P.txt file - cDNA_ID_3022460; gDNA_ID_2214510; Annot_ID_184221
cttatttatcaaaagacaacaagacgatacaaacaaacaggaccaatgagtctgttttgcttcatcaggcagccttactaggcttttttttgtgaagctgcagatctaatggcggtttttgcaagcgtcgaaggcttgagtacactcttcgggttaatagcctttcttattttgaaagcaacccaggctgtgccaagcgcatatcctgctgcatcgagcccttcgtttgtcgcctcagccgctttaccaccatacctatattcatcaaaccaaaatttacatccttctcttaaaacactttccatatccaaataaccaggagtttcaattccaaatactcgattttacttacttgtgatcaacgagttcggttgtaacagtggaagaggttgacattacattcctcccagctacttcaacagcgtcacagaccttatctatcaaaacaggaatcaacagtttcaatgatcatgattacctaaagatagccgcatgaagtcgagttaagtatattgtagacttactgaatccgtcaagagatgcaaggatgacttctccaggaagaaggctgaagaatttctttcctactttggtgtttgccactgaacttgtgaagaatccagaaactttaaggactccagacagtatgctgtttgctacactctctgtcattttggtcatcctcttcactctgcataggcaacaacacaattagacaccaatacacgtaactatatgtcattttgctagagacgatgaacacatatcgtctcagctctcaaattacactcttcaggacacaccagaacaaatcaagatcatcaatcaaaacttatgtctcacaaaaaggattatcaaagacgttcacacaagtttctgtccagacaatttcctaaaatataaaccatattccaccaatttactgcaaacattccatgacacagctataacaaacacaaagatttcacctttcgagaaacatcacaaacctctaaatcaaaatcaaaatcaaattcattcataccttctgattcttttcaaggtgtcagggtgaacttcactctccttctcagcctttgacaacctccttttcatgaaaccatttccccaaataagcctatccatagtcacatctccacaccaaagaatcccttttatcaaatgtcctgagccagttgcaatcagcttcgccgccttcccgctataatcctccacattcggagccaaagtagtccaataagcagaacattgcctctccacaatctctttcctttccccagtaagctccaccggagacgtctctctcgccaccgtcacatccaaaaccttttcacctgcttccttcgcttcctctgacacctcctgcacagagaaactactataatcctccaagatcttctcaagctccaccagtaaatgctcttgacctttagaagcaattgtaagtccgtagttcaacatctcgttagtgtttttccctccatctccgtcttcttcgtcgcttgaatcatgtgagatctctttggtaggacgaagcgtgaagaagtaatgagactcatcgaccttgacagagttctcatccttagtcaacggccattgaatctcatcggagacactagcgagaacagcgacaacattctctccttgaacaatacggatgatctcaagatcaccgcaagcgagctcgacgctgtaagatttgtcgattaaatgaagaatcgcgccggagattttcaaaattacttcctccgtcgcagcgggaggagctgaaaccggaatagaactcgtctctggttgttcagggaagagattacgagcgagatcattcatatcgagagaaggatagagattgttagtagaagatgatgagctagggtttataggagcttcgggattggatgtgtcaacagtagggtaaagagaagaagtttgcttgtcgccggaggattccattttcgccggcgatttcaaatcggagaagatcaatgaagaatgattgacttggtttggttctgaattgattaaagatatttatatttgaagaagaagaaggaaagggaccaagttaagtatctctgtatctgtcagatttgggaagacgtggatgttacgcgtaaatgacgcgtgtaaaacggtataaaccggttcggttataactcaccttgtcgacatctttcccgcgctgttacacggttaattgttctcatgtcggtcggtcgcttttttcgtctcggaaattgcattaaactcaaaaaaagagtgtacttaaagataatttattatgcagttgcgtatcactaaaactttatattatttaactgaaataaagaaatgatagtttcttttgtttgtttttgagtaaaaaaaaaaagaaggtagtaacgttttttcttttctgataaaaggtactaattatttactctacataacatgctattacatttgtaaaacagtatttagtttgaactattaacatgtcattgcttaacttataacttaaattgttttgcatacaataattaacgattaaaaaaaaaaaaaacgattttagatttagttaacaaaataaattttaaacatgcttatatttggataatcttaatcagcaatataaccaccaaacatgtttgatgtttctaagttctagcagtcttgaagttctctttacatgataaaaaaaagaaaagacaaaatcccattaattctcattaaaaaacttagattggttcaaggaaaaaacattaagaccaatatcctctgtttttattaaggttttaaaaaacacacacacaaaactagtaacgaacattaaagagtttctctgataacatgccctttctcaacttcatcaaacagttctgtattaatagctctcaaattccagaaatcaccagacagtatctaactaacaataaagactcccctgcctctaaaaggttttaaagtttggttgatagacaaatcagttacagacttacagatttagattgccacgttaaaatg

SEQ ID NO: 29787 - DNA, 3000 bp, Unknown; identical to SEQ ID NO: 11685
  misc_feature (1)..( 3000): 2750-1469P.txt file - cDNA_ID_3022468; gDNA_ID_2214510; Annot_ID_133815

SEQ ID NO: 29788 - DNA, 3000 bp, Unknown; identical to SEQ ID NO: 11687
  misc_feature (1)..( 3000): 2750-1469P.txt file - cDNA_ID_3022468; gDNA_ID_2214510; Annot_ID_184218

SEQ ID NO: 29789 - DNA, 330 bp, Unknown; identical to SEQ ID NO: 11695
  misc_feature (1)..( 330): 2750-1469P.txt file - cDNA_ID_3022482; gDNA_ID_2214511; Annot_ID_184259

SEQ ID NO: 29790 - DNA, 3003 bp, Unknown
  misc_feature (1)..( 3003): 2750-1469P.txt file - cDNA_ID_3022494; gDNA_ID_2214511; Annot_ID_184253
gtaccaatcatcatctccaggtgatcggtttattaaaaattagggtttttgattgttctaatccgatctctcggttcctttaagattgatgatgaatttcgaagcgtgatatgaaaagatctgaagacttgatgtcagaacttgcgttgcgtgggttccgagataattgttgatggaaagagtatcagagcgaagtttgtcagaaaatttgagaagaagcgatcgagaagatgggaagattatagaatgggaagaattcgaccatgagcttacgaggttatggagtctttcttctgctatgaaattagccacagagaggaaacaaatcctgcaaccgaaacttgagtctcttattcaggtttttctcttactcatgtgttttcttttgggcatgtctgaatttgattcatttctgagtgtaaagcatagatttttattagtggcattgtcttaagggtggatgaagatagctagaagaagaaactctattcaaagaaaatttatgctttcttattgtgttggttaggaatgtgttgtttagtcttattattcttgcttatctcttactttatctactcgatgagctttaattgattagcccgcggattagcgggcggcaaaatttcgggcaggttagtactgaatcattgagacgcactaatgaacttgaagaaatgcgtcagaggcttgaagcaagaaaattgttggtggacaagacatcagttgcttgcaaagttactgagcaggatgttaaaaagaaagaggagaatcttagtacagaagtgaggtctttgctagtaggcggaacaactctttcgatcgctaaaagcaaattgcaggtattacctcattcagtgcagaattatcttattaggaagcaaggtgcatcagttttgcatatcctggtgtttggctatttcaaattagttgtttccccatgttctcttggcctcttctttggcaggagtacagtttattttacgacttactttttcttcttctaactgtattttagttctagtatgaattatttgatagctgtttctttaaagaaggaaagctaattttcttcagtatattctccattctatgaacaatttgtgaatgattgaatcatagatacactgttttaacttatttttctcttttcataggaatcaaactgccaactagaaggagaaagtggttatgcacatttaaagattgtaacgaataagctgagaaagaggcagcagttcatggtatctcaagtttcatttatctatcccttgaagattgaagctggaccttcacaagaccaagaactggaatcatttcctggtggcagtagattaggtcagttaagtctaaaatcttataagaattaagaatgtagcctttgatgagaacgagacctaactccttaacatctttcagtgcatgcctttatctttacttcattcagtctgatattgatatcaggactaactttgcctttgttgtcgtaagtgtttacagaaagtttttaattgcagcatctaccttcttgacatgtttatatctatggcttttgtaggaactaagcctctgagtcaaggatctgtgagaattctggggttgccttttagtatggccccgtttacaaagatgagcttcttcaccgacaagaaagaagttcagaagtctgcaactgccctaggatatgtagcccatgtatgttccgtcctctttttccttactgatttatgcattaaaacttgctttatacttccatatctattgtgcggccttaaatctcttggcttggatttcaggaatcactgctaatgaattcaaacaaacgaattttgtttggtttaaattcttgatagaaagtattaatggcttcctgcttggcttttgcaggccgtgtcactaatagctccttacttgagagtgccaattcgttatcctttgtgcctggggggttccaaaacatacattcgagactatgcaccttacattgagccttcaccatcagacatgtctccgattaccacgctttcccaaaatattaactttgtagagtttcctctgtttctggatggtcaagatacaacacgagctgcctatgctgtcttcttactaaacaaggttagttagagattttttttggttttgctcttctccctgatacttgaaacagtagcttgcctctcctctcatctaatcatagtcatcgtatcacagaacatcgagcaactcttgaactttgtgggggaaaatagtctaggaccacgtcaggttctagcaaacctgaaggagctaattcgaatcatccaatctccagattatatcgattatttatgacgatgatgatgatgacgacgaaaataatgacgatgatgaagatatcaatccattccttctcacacatcttccagagttccagtgtctcttcttgtttattgaatcatctcaagtcagacactttgtggaggtaaaaaagtacaaataattgattttgttagagaaattttagacatggaaattctctttaggatgagactcctcctctctagatgtgatgtttttggtttggagagaccgacgataaacgaaagcttagtctattatacagttctttcttaagttctaacagctgtattagtttttttgtttccctttatctttttgtgctagttgtaccatttgaaatatgtttgaatttgtaacaatgagcctgttgttgagtcagtacaattttcaacgtactgttggaatacgaaacgtgtgaactgtggagtgatgatgattcaaaggcgagaaaacaaaagaccaccaccaagggtaaaatgggaaactcaataagtaaaaatggaccaataggagtgtttgacgaggattgtactttaatgttcgttcaaagctcttttaacttttcccatcatctctttctcacctcctcctctctctttctctctctttctctctctgaacccagaagaaacctcaaaaaaaaaaaggtttctcaaaacaacaatg

SEQ ID NO: 29791 - DNA, 3003 bp, Unknown; identical to SEQ ID NO: 25612
  misc_feature (1)..( 3003): 2750-1469P.txt file - cDNA_ID_3022512; gDNA_ID_2214511; Annot_ID_184244

SEQ ID NO: 29792 - DNA, 3000 bp, Unknown
  misc_feature (1)..( 3000): 2750-1469P.txt file - cDNA_ID_3022516; gDNA_ID_2214511; Annot_ID_184242
atctatgtgggtgatgcatgtataatgtataagcctatctgtttttctttatttgttagtttggaaaatgaaaggtttaatatgtgtttggtttgagccattaatgacataataaatgagatcacttttttttcactaaatgagatcacatttagggcttgaataatgcaaaagagccctcatattattaatggctttgtagtagacatgtccttcaactataaaaggaaaaataaaacagccacgattataaacttttgtttttttgataacgacacaatttattcatttatggtacgtcttttatgaaaatacactaaaagagaaacacactgttctttttgctataaatccatggaaggttgatttatgaggaatcatatacatatggtgaactgatgattgcattctacgaatatgatcagtctggtttttagaacatgaaccaattattattatttgacaaagtacatgaaccaattgtagtatatattttcatcaatttcaggttttttcaccatcggcgcccactagaatcgtttgctcattttcttaatcggaaataagatatacatttcatttcatgtgcatatatatatacatcgatattatttatttattgaattcatcaaatgtacattgatttcatttttattgttatgttggatgagatcaactgggcagttggcagacataaataaattgtcctatgacaggtgaacctcatttaatttagtttactcaaccaatttatttttttcgccttcttacaagttaatacgtccggtttaatcaattccggtttcccacttttcctcacggttacgccttaaccaagcatttcaacctctgaaatagaataatttgagtatatatgaacaaatcaacaaactaaactaaaccggaattgataagaaacctagaaaaagaagaagcaaaaccggttatgtatgtaacgtactcacgagtggacgatatgtctatatatagaggtcaagactaagcttcactgacacaactactgtcttcgatctctctttcatatacaccatataaaacgaaccagttaattatgggtttaatttccgggaaggtgtgtgtgtttatctttgtattcgctctagtcgctgaattttcgttcggaaatgttgaggttaacgacgacaaacactttttccacaaacctcgtccatttttacacaaacctcgtccattcctccacaagcatggcatttacaagaaaggtttcggtaagggtttgggcggtggaggcggtctaggcggcggaggtggtctaggaggcggtggtggcctaggaggcggtggaggtttaggcggtggtggaggtttaggcggcggtggtggtctaggaggcggtagcggtttgggaggaggagggggtctaggaggcggtagcggtttgggaggaggagggggtctaggaggtggtggtggtggtggtttaggaggaggaggtggattgggtggtggagctggaggaggatacggtggtggtgctggaggaggacttggaggcggaggtggaattggaggaggaggaggctttggcggtggagggggaggaggattcgggggcggagccggtggtggatttggtaaaggcattggtggtggaggaggtcttggaggaggttatgttggtggtggccatcactgatgagtggtgaggctcatgctcatgcattcgtaacgttgttatattatttaattaaatggaaaatgataaattaattattgcaataaaatgatacattagcaattgtgtatgtcgttatttttattttgagtcgcattgtatgctgattccatatgttcggctttggtcggtttcaagtgtggttaataaaatggttattttacttttgccaacagttattgagtggttgtgtttatgttttatatacatgttcactcatctttccatatgatcttacaacacttgctaaaatgaattcggttaggtgaattttatgagtagatacactatgtaaataattagtaaagtaatatgatatttatttatcttttggaaacttttaaaacaccaaacttaatattacatgcattgatagtgatcactgtaaaattttgtactaatctaagttcaaaaagtattacatgagtatgtcttatcccaaatttagtctcaacaattgcaaacttttgagacatatatacagcaaactcttatctcacataaaaaaactttaaagttatgagtaatctaagttatagacttgtagtgctactctagctaaattaaattcattaattctggagcataaagaaatctgaaaaataaccatcttctcgatcatgtcctttgcttagcataatatttcttgttcggtttagcgatctcctaaaatgcaacgtggtcactttgccacatcactttgaagatgaacaatctacaagctgacaaacgtatctaatgtgtttgtccgtatgttaagtttatttctgtaattttgaacacatgtgagaattttcaaactgatttaattccgattccaagctatacgtaagaaatttcaactaacgtggattacatacttttctttgagtccgaatacaaagacttcacattctattttgttttcttctttcgaaaccactaagggctactaacctctcgaatcgacaaacgtatccaatgtgtctgtcgttatgctacgtttatatctgtaattctgaacatatgtgagaagagaaattatcaacggatgcatgtgattccaatcccaagttatacgttaagggattttaagtaacgtagaaatcacttcatgatttgagtggcccttagctgcttgaccatacttttgttctagcccgaatacaaaagacttcacgtatagctttaacattttctgagtcaaattgtgcaaaaccacatatctgtatttatacccttcttctctctcacatttcttaatccaaaatcattcttctaaaagatatttcaagacaaccatg

SEQ ID NO: 29793 - DNA, 3003 bp, Unknown; identical to SEQ ID NO: 25620
  misc_feature (1)..( 3003): 2750-1469P.txt file - cDNA_ID_3022587; gDNA_ID_2214512; Annot_ID_184303

SEQ ID NO: 29794 - DNA, 3000 bp, Unknown; identical to SEQ ID NO: 11710
  misc_feature (1)..( 3000): 2750-1469P.txt file - cDNA_ID_3022599; gDNA_ID_2214512; Annot_ID_184300

SEQ ID NO: 29795 - DNA, 3000 bp, Unknown
  misc_feature (1)..( 3000): 2750-1469P.txt file - cDNA_ID_3022611; gDNA_ID_2214512; Annot_ID_133864
ttcctatgtaaacaaatagataatatgtaggtaaataacattgcttataccaatctaaatgtcagttaagaatatattgatacatatgtttataatgccttacagatttatagaaaacccatatttgattatagtgatatatataagaacgtatacagagagcgcaatctcttatccaaatcagaaaaagatttcaattcgtagccaaaaccaagaaagatataagatataggtgaactataggagggtgttttttttactcgtaattccttggattctattggttaatccatcatccatagtgtgtgtatatttaatttttagaaaattagaaagaaaaaaattgtagaaagggaaagctatatagaaatggcaacccatgcatgattgccttgaacatcgcaaaccctcccttagattgcatgtctagtggaacatagtggacctgcaacaatattcaacaaaaaattcatattatatacattgcataatgcatagtaggacataataagatgaattattatgctcaataacaagtttatatgatatgcccacagtttcatcacatatacttgagtttattaaaacgaatgattctatttctctattaagattagcctttattaattgttagtggtatgagatatattgaagaaaataagtataagcaaaaaaaatgttgatagaagaattaaataagcaataatttcaaaaggtatgtaatgtggatgaaacggcacatgtcgttgtcacgtggctcgttcccatcgattcaatgcatatctcgaccaacttgacttattaatattcctcgtacaactctccaatctaaagccacctttcttctacgttatacattttctttttctgttttcttttaaatactttctcctcacaaattattgttttctattatctaaaatcaataccgttaggaaatggtgtctttataacactttagaaaaatataattaatcattttctaatgtattatttttgtaattgagtaatttgatttaaaaatataaactaatataataatattggtatttaatcatttcaaatattcttaattatattctttttgaatacacgcatattgttctaaactattaatttcttacaaaaattctatattatttattgtgtctacaaacaaaagagtcgtctaatcatttttggtttcattttttttttgctagaaatcaaaaacaaattcctcattttttttgaggtaagctaatgttattttctaataacaatcataagtaatacccgtggtttaaagtttacacggtattaattaggtactacagccatggtggacggtggatcttcatcacctaatccgtacaattaagagacaattaattacattaaatcatgtgcattagttgatttaggaactaattgataaatcaactctaaagactaaagtagtgcgatagataaagctaaagtatatattttcttcagtataaagataggaatatatggggacatatacttttgtcgattttgtatccagctttgcatcagtgaagtctgagcgaagatatgaccagacttaaaaagcaactaaaaagatgcataacagaaacacaaaaataaaattcatgcatctgctagtcatagaggttattggattcattgcacgtatcttaatgattcgttttcgtttcacctcccttgctacaaaagatttgaaagagaaaatgttaaattctttaggtcagaatcaattaagataatttcattttcttcttgtgttttgtacgtcacttgtttcttttttcgttggttatgtaccaaaacatgaaaagttcaaaaattgttaattagaagattaaagagaagagtaagaataaagatgaaatgaggaattgatatggaggagtaggacccaagtttgcaaggatggtggctggctggctgctctgttgtttgttacatctcattctcaatcttaattccaattctatgtgcttctttcactatttccctatagaataccattcttgtttttttttttcaattttcaaaaaccactataaggaactttttcaatagttgcttgtttgtttagaccaaggaagatgtcaaatagatttcttcacttttcaagtggaagcaaaattatgcggtcaagtgtattatactagtgtgtgtttttttttggtttaataccgactaatttctaactctaatctatcagtgaacgtcttaaaactaatattgctgaagaatatattgttctctgctacagcctacagcattcaaagtttcatcaaaaagataaaatgtatatataactaaaagttttgggttaatagataatagtcaaagaagacattcgtgttgaatgtttcttttttttttttttttttatcgtggggattgattcaatgcattgttccaaccttttgactctttctcgtgtttccttttttattcgttttctgaattatactttttagaccctttcctcgaatttttacttgagccctactctagtaatacataagcatatatataaaaatctctcaaatttgattaggacagttttagtatataaaaaaaggaaaaaacgcattgtttaaaacgtggtcatgacgaaaacgtttgatttcgatcgatgatatttaaataaaggaaacacctaaccatatttattcttaactgatcaaagatcctccaatttcacgaagcctaaaactctcaaaaacagattcaataacgtcaccaaaccttgaggctttttaaaggaagaagcatttgagaaaatcgtaacttcttgaccctatgcattctgctgtgtacaaggtatggttagtgcttgtaatatacaattatataatctctttgttttaataagtggttgctcattaagatgaatgttacttgtctagtgaatgagtatgacgttgttgtggttatcaggttggtcttcattatctttcttgggatatttctggtggcaatgccagatgtattgcgatg

SEQ ID NO: 29796 - DNA, 3000 bp, Unknown
  misc_feature (1)..( 3000): 2750-1469P.txt file - cDNA_ID_3022611; gDNA_ID_2214512; Annot_ID_184293
gaacaaagtttaacaactatatataactgatcagttatataaatagcatatacaccatagtgatatcttcccgatcttaaaagatattcaaattatcttgtggatatgtacttgattcgatatctttgattttttgtattcatgatcttatggttaggatcgatgccaccagttcctatgtaaacaaatagataatatgtaggtaaataacattgcttataccaatctaaatgtcagttaagaatatattgatacatatgtttataatgccttacagatttatagaaaacccatatttgattatagtgatatatataagaacgtatacagagagcgcaatctcttatccaaatcagaaaaagatttcaattcgtagccaaaaccaagaaagatataagatataggtgaactataggagggtgttttttttactcgtaattccttggattctattggttaatccatcatccatagtgtgtgtatatttaatttttagaaaattagaaagaaaaaaattgtagaaagggaaagctatatagaaatggcaacccatgcatgattgccttgaacatcgcaaaccctcccttagattgcatgtctagtggaacatagtggacctgcaacaatattcaacaaaaaattcatattatatacattgcataatgcatagtaggacataataagatgaattattatgctcaataacaagtttatatgatatgcccacagtttcatcacatatacttgagtttattaaaacgaatgattctatttctctattaagattagcctttattaattgttagtggtatgagatatattgaagaaaataagtataagcaaaaaaaatgttgatagaagaattaaataagcaataatttcaaaaggtatgtaatgtggatgaaacggcacatgtcgttgtcacgtggctcgttcccatcgattcaatgcatatctcgaccaacttgacttattaatattcctcgtacaactctccaatctaaagccacctttcttctacgttatacattttctttttctgttttcttttaaatactttctcctcacaaattattgttttctattatctaaaatcaataccgttaggaaatggtgtctttataacactttagaaaaatataattaatcattttctaatgtattatttttgtaattgagtaatttgatttaaaaatataaactaatataataatattggtatttaatcatttcaaatattcttaattatattctttttgaatacacgcatattgttctaaactattaatttcttacaaaaattctatattatttattgtgtctacaaacaaaagagtcgtctaatcatttttggtttcattttttttttgctagaaatcaaaaacaaattcctcattttttttgaggtaagctaatgttattttctaataacaatcataagtaatacccgtggtttaaagtttacacggtattaattaggtactacagccatggtggacggtggatcttcatcacctaatccgtacaattaagagacaattaattacattaaatcatgtgcattagttgatttaggaactaattgataaatcaactctaaagactaaagtagtgcgatagataaagctaaagtatatattttcttcagtataaagataggaatatatggggacatatacttttgtcgattttgtatccagctttgcatcagtgaagtctgagcgaagatatgaccagacttaaaaagcaactaaaaagatgcataacagaaacacaaaaataaaattcatgcatctgctagtcatagaggttattggattcattgcacgtatcttaatgattcgttttcgtttcacctcccttgctacaaaagatttgaaagagaaaatgttaaattctttaggtcagaatcaattaagataatttcattttcttcttgtgttttgtacgtcacttgtttcttttttcgttggttatgtaccaaaacatgaaaagttcaaaaattgttaattagaagattaaagagaagagtaagaataaagatgaaatgaggaattgatatggaggagtaggacccaagtttgcaaggatggtggctggctggctgctctgttgtttgttacatctcattctcaatcttaattccaattctatgtgcttctttcactatttccctatagaataccattcttgtttttttttttcaattttcaaaaaccactataaggaactttttcaatagttgcttgtttgtttagaccaaggaagatgtcaaatagatttcttcacttttcaagtggaagcaaaattatgcggtcaagtgtattatactagtgtgtgtttttttttggtttaataccgactaatttctaactctaatctatcagtgaacgtcttaaaactaatattgctgaagaatatattgttctctgctacagcctacagcattcaaagtttcatcaaaaagataaaatgtatatataactaaaagttttgggttaatagataatagtcaaagaagacattcgtgttgaatgtttcttttttttttttttttttatcgtggggattgattcaatgcattgttccaaccttttgactctttctcgtgtttccttttttattcgttttctgaattatactttttagaccctttcctcgaatttttacttgagccctactctagtaatacataagcatatatataaaaatctctcaaatttgattaggacagttttagtatataaaaaaaggaaaaaacgcattgtttaaaacgtggtcatgacgaaaacgtttgatttcgatcgatgatatttaaataaaggaaacacctaaccatatttattcttaactgatcaaagatcctccaatttcacgaagcctaaaactctcaaaaacagattcaataacgtcaccaaaccttgaggctttttaaaggaagaagcatttgagaaaatcgtaacttcttgaccctatgcattctgctgtgtacaaggtatg

SEQ ID NO: 29797 - DNA, 3000 bp, Unknown; identical to SEQ ID NO: 26175
  misc_feature (1)..( 3000): 2750-1469P.txt file - cDNA_ID_3022619; gDNA_ID_2214512; Annot_ID_184289

SEQ ID NO: 29798 - DNA, 3000 bp, Unknown; identical to SEQ ID NO: 11704
  misc_feature (1)..( 3000): 2750-1469P.txt file - cDNA_ID_3022631; gDNA_ID_2214512; Annot_ID_184282

SEQ ID NO: 29799 - DNA, 3000 bp, Unknown; identical to SEQ ID NO: 11703
  misc_feature (1)..( 3000): 2750-1469P.txt file - cDNA_ID_3022638; gDNA_ID_2214512; Annot_ID_184279

SEQ ID NO: 29800 - DNA, 3000 bp, Unknown; identical to SEQ ID NO: 11702
  misc_feature (1)..( 3000): 2750-1469P.txt file - cDNA_ID_3022651; gDNA_ID_2214512; Annot_ID_184273

SEQ ID NO: 29801 - DNA, 3000 bp, Unknown; identical to SEQ ID NO: 11628
  misc_feature (1)..( 3000): 2750-1469P.txt file - cDNA_ID_3022692; gDNA_ID_2214506; Annot_ID_184135

SEQ ID NO: 29802 - DNA, 3003 bp, Unknown
  misc_feature (1)..( 3003): 2750-1469P.txt file - cDNA_ID_3022706; gDNA_ID_2214506; Annot_ID_184129
gtgaaaaccctagatgtagaaggtgaagatttcttaagatgtttgtctaaagcatcattgattcgtttccgatcaatagctccaccaaggatctccgatctcgatgatccaccaccacccattattcctcctccactccgatccttgtacataactcgattcgattccctcaatgaaaaaaaacaaaatttttcagctttagattctcaaagtcttcgactttcttatcatcagaggaagaagaggggcggataaatctagggtttgttttttcttcgatagtttgatcacagagtagaagaaagagagaagaagagataaagagtgctctgcttttccctgtggttttttctcattctctactgttttgttttcttctctttgtttttttttttttttttaatcattgtttaattttttaaaattctagtatttagaaatgggcttttcggatgggccttatgacactgacagttgtaatacaaagattcacgtagaaggaaacatttttttgtacttaaactatgattccaaattatatcttaggaagaaagaaatcataaaattcatttttttttgtatcaacacggtagtaataatggacttgcctttccatctttgttaatgatgatgtgtttggtggtcgatccattgtccaaacttaaatcgaaaaaaaaaacaaatgatctagagataattaaaattacacatcttgtaaaattagtcatgtaaatgtaactgaatttacaaaatttgatttgatataaccaccacttattttcattttgctgaaacatttggacctttgcatttgcattgattggtgaaaaaaacaaagcactataatttgtacaactttcatttctaccaattataattttttttatcaaaagcgttactaaaagatttttctctcagcttttttatacattttttttaatataactgttttttagtaattttatactatttcaaaaaaagttaacagataaaagttatgtacagctatgtgttaccaattagagtttttttggaaagaagtaaaatatggcaaaatctatctaaattcaaaaaataggaaagaaatcaaacccaccgaataaaaaattatttttaaggcgttttggctctctgacagctcaaattaaagttgactccttttttaccactcaagtctcattctcattcttcacttgaaccagaataaaaccacagaaagagagagaacagggtaagtaaaatcagagaattttctcaatcaatgtcagcttcaatggctgcaacatcaacatcatcagcaacagctacaacgtttataaagtgtgtcactgttggcgatggagctgtgggcaaaacttgtcttcttatttcctacaccagcaacacgttccccactgtatataaatccatctctccctctctctcttttggattgcttttcttgatagcttttggtgactgttgagatcttgttattacaggattatgttccaacagtgttcgacaatttcaatgctaatgttttagtcgatggtaaaactgtcaatctgggtctctgggatactgctggtaaatgcttttacctaatgtcaaagttgttcttgtctttagctttatatctacaacaatatgtcaaggtctaatcttttggtccttttaaaagaagtcagttgaaaaatttgaatctttgatgcaacattgttttggttcttgaattcactatcagattttgctcatgtttcttcaaaacttaaatgagaccaattatgattcttgtgttatatatcttttgggtgattcacattatattacaggtcaagaagactacaatagggttagaccattgagttacagaggagcagatgttttcattcttgccttctcacttattagcaggcctagctttgagaacattgctaaaaaggttgagacttgagattatctttccttttacttttaatttcactgtaatttaactttacaacactgatctcatgtgcatatggatcggttttctttcgcagtgggtacccgagctgagacattatgccccgactgtgcctattgttcttgtgggaaccaaatcaggttgaagataatgaaccactctgttatgtcttgaatgttaggaatctaacatcaatgtgtaagtgatgttatgtagtatataagatgaatttcttgatattgcagatctaagagacaacatgcagttcccaaagaattatccaggtgcttgcacaatcttcccagaacaggtatgtttttttaaagattcttcttcaatgtatatgatcaagaaccatgttaagaatcaaactcttttataactcaaagattgcttcttttatagggtcaagaactaagaaaggaaataggagcattagcatacatagagtgcagctcaaaagcacaaatggtaaagtaaccattaatgcttgagttacattttacaattagaccaaatattttggacctcaatctgataaagaaagacttatgatgatgctaaatttgcagaacgtaaaagccgtgtttgatgaagcgatcaaagtagttttacatcctccttcaaagactaagaagcgaaagagaaagatcggtttatgccatgttctttgactagtgtactcaagtctctggctttggtttgttttacatcttttttagtgtgtttcttctatgaaggactcttgcagattttagtatgattagctatcttcgttataaaagtttgatcttgtagtagagattcttgtaacagaattataagcgaattctcgtctatcagtctatgtaaaagaacaatgtttgtcttctttgagttcaagagacaacaacaaagaaccgttttagcgcaaaaagaaacaaaataaaccgattgaaacagaatcgaagaataaataaaccgggttttgttttttggctaataaccgaaaccgaaatagaataaatcaataaaatctcaattctctagtcttctcctttaaactagagtcgatg

SEQ ID NO: 29803 - DNA, 3000 bp, Unknown; identical to SEQ ID NO: 11623
  misc_feature (1)..( 3000): 2750-1469P.txt file - cDNA_ID_3022712; gDNA_ID_2214506; Annot_ID_184125

SEQ ID NO: 29804 - DNA, 3000 bp, Unknown; identical to SEQ ID NO: 11622
  misc_feature (1)..( 3000): 2750-1469P.txt file - cDNA_ID_3022714; gDNA_ID_2214506; Annot_ID_184124

SEQ ID NO: 29805 - DNA, 2941 bp, Unknown
  misc_feature (1)..( 2941): 2750-1469P.txt file - cDNA_ID_3022728; gDNA_ID_2214506; Annot_ID_184109
ttcagcttaataccttttgaacaaatgtgtacaaaaccagtttaattttgacgagaaccggtcgaatatttaaccgatttggcttgattttcaaaaccatgaaaactttacaattaaaatttgagcggtctaaaccattagaccgtttagagatccctccaacccaaaatagtcgattttcacgtcttgaacatatattgggccttaatctgtgtggttagtaaagacttttattggtcaaagaaaaacaaccatggcccaacatgttgatacttttatttaattatacaagtacccctgaattctctgaaatatatttgattgacccagatattaattttaattatcatttcctgtaaaagtgaaggagtcaccgtgactcgtcgtaatctgaaaccaatctgttcatatgatgaagaagtttctctcgttctcctccaacgcgtagaaaattctgacggcttaacgatgtggcgaagatctgttgtttatcgtttctcttcaagaatctctgtttcttcttcgttaccaaaccctagactgattccttggtcccgcgaattatgtgccgttaatagcttctcccagcctccggtctcgacggaatcaactgctaagttagggatcactggtgttagatctgatgccaatcgagtttttgccactgctactgccgccgctacagctacagctaccaccggtgagatttcgtctagagttgcggctttggctggattagggcatcactacgctcgttgttattgggagctttctaaagctaaacttaggtatgtgtttacttttcttttctcatgaaaaatctgaaaatttccaattgttggattcttaaattctcatttgttttatggttgtagtatgcttgtggttgcaacttctggaactgggtatattctgggtacgggaaatgctgcaattagcttcccggggctttgttacacatgtgcaggaaccatgatgattgctgcatctgctaattccttgaatcaggtcattgaaatgttgagaagttcataaatttcgaatccttgttgtgtttatgtagttgatcttgcttgcttatgtttatgtagttgaaaagtttaaaaatttctaatccttggtagttgatctcgcttgtttgttttttcattttctagatttttgagataagcaatgattctaagatgaaaagaacgatgctaaggccattgccttcaggacgtattagtgttccacacgctgttgcatgggctactattgctggtgcttctggtgcttgtttgttggccagcaaggtgaatgtttgtttttttatatgtgatttctttgttttatgaatgggtgattgagagattatggatctaaacttttgcttccacgacaaggttattgcagactaatatgttggctgctggacttgcatctgccaatcttgtactttatgcgtttgtttatactccgttgaagcaacttcaccctatcaatacatgggttggcgctgttgttggtgctatcccacccttgcttgggtaaatttttgttccttttcttctttattttagcagattctgttttgttggatactgcttttaattcaaaatgtagtcatggttcaccaattctatgcttatctattttgtgtgttgtcaggtgggcggcagcgtctggtcagatttcatacaattcgatgattcttccagctgctctttacttttggcagatacctcattttatggcccttgcacatctctgccgcaatgattatgcagctggagggtaagaccatatggtgtcatatgagattagaatgtctccttccatgtagtgttgatcttgaactagttcaatttcgtggaatgatcagagtgtcctagatagtgtcacagcagtcgacattttagtggctagataatgagttctttccgttagagataaacattcgcgaacattgtttccagcttccgcgacccaacttctgattttgtttcttggtaccttgttttcagttacaagatgttgtcactctttgatccgtcagggaagagaatagcagcagtggctctaaggaactgcttttacatgatccctctcggtttcatcgcctatgactgtgagtcttgtagattcatcttttttttgtagtttattgactgcattgctgtatctgatttttgctgttccttccaatttttgtgacaggggggttaacctcaagttggttttgcctcgaatcaacacttctcacactagcaatcgctgcaacagcattttcattctaccgagaccggaccatgcataaagcaaggaaaatgttccatgccagtcttctcttccttcctgttttcatgtctggtcttcttctacaccgtgtctctaatgataatcagcaacaactcgtagaagaagccggattaacaaattctgtatctggtgaagtcaaaactcagaggcgaaagaaacgtgtggctcaacctccggtggcttatgcctctgctgcaccgtttcctttcctcccagctccttccttctactctccatgataacctttaagcaagctattgaatttttggaaacagaaattaaaaaaaaaatctgaaaagttcttaagtttaatctttggttaataatgaagtggagaacgcatacaagtttatgtattttttctcatctccacataattgtattttttctctaagtatgtttcaaatgatacaaaatacatactttatcaattatctgatcaaattgatgaatttttgagctttgacgtgttaggtctatctaataaacgtagtaacgaatttggttttggaaatgaaatccgataaccgatgatggtgtagagttaaacgattaaaccgggttggttaaaggtctcgagtctcgacggctgcggaaatcggaaaatcacgattgaggactttgagctgccacgaagatg

SEQ ID NO: 29806 - DNA, 471 bp, Unknown; identical to SEQ ID NO: 11613
  misc_feature (1)..( 471): 2750-1469P.txt file - cDNA_ID_3022732; gDNA_ID_2214506; Annot_ID_184108

SEQ ID NO: 29807 - DNA, 3000 bp, Unknown; identical to SEQ ID NO: 11735
  misc_feature (1)..( 3000): 2750-1469P.txt file - cDNA_ID_3022740; gDNA_ID_2214513; Annot_ID_184342

SEQ ID NO: 29808 - DNA, 3000 bp, Unknown; identical to SEQ ID NO: 11736
  misc_feature (1)..( 3000): 2750-1469P.txt file - cDNA_ID_3022748; gDNA_ID_2214513; Annot_ID_184339

SEQ ID NO: 29809 - DNA, 3003 bp, Unknown
  misc_feature (1)..( 3003): 2750-1469P.txt file - cDNA_ID_3022757; gDNA_ID_2214513; Annot_ID_184334
attgtagaatccatgaagaaatcctgtattcacgatacgttctattattgtaatatgttcttttgatttattttcttcaggtgtcccaccgacttttcgagcttacaaacacgttaaagtctgttttcataccaacaaaagacgacaagaggctgctccacaatgttctcgctggagctgccatctcgttctgtttatatttaacatctctcattcttctccagatcccacactaaccatgtaaggccttttactttgcatggtccattgcagccattgttgatcttggtgtgtactcgcttaggaagagatacaattctcgattaacacgctataaccattttattttgacaggagggactagaaacatgttgaaaaacatgaatctaaagctgcacagaggtttctatgtgaaacttgctaaaatagatacaacacacatctcatatcgacaataaaaatttgttttcaaagatcagtattttttgaagcttgccaagtgaagcatcttttgggtaattagaaccagagaagcttcaaaaaatggcttagagtgaagcatcttgtggcatttcgacggcatcatcttaggacgacttatcttgttcgttttctttctcgtctctgttgtaattttgctataagtttctcatatatagtttcattttgtcttttgttcgtccgtatttggtagtttgtccaaatacagaacatatgaattttacaagagtggatatttcaattcaattgagtcttcagataaaacgccaacacagttagagaaaaagaggttcgatttctatacaaagataccacaaaggaaagttcacaaatttacatagaatagaccacaaacaaactctctttctctgctctcattcacataataagcagccgctcactttccggggacgaagttggtggcgaaggcccaagcgttgttgttgactgggtcggccaaatggtcggcgaggttctccaaaggtccctttccggtgacgatggcttgaacgaagaatccaaacatagagaacatagccaaccttccgttcttgagctccttcaccttcaactctgcgaaagcctcggggtcagtagcgaggcccaatgggtcgaagctgccacctgggtaaagcaagtcctctgcttctcccaatggaccatctccggcgactctgtagccttcaacagctcccatgaggataacttgagtagcccaaatggctaagatgctctgagcgtggaccaagctcgggttgcccaagtagtccaatcctccgtcgctgaagatctgtgaaccggccttgaaccaaaccgcttctccgaacttcactccgttcctagccaatagctcagggaaaacgcagcctagggctccgagcatggcccatctgctgtggataacttctagctcacggttcctggcgaaggtctctgggtcggcggatagaccagcggtgtcccatccgtagtcaccggggaactcaccggtaaggtagctcgggggctcgccggagaatggacccaagtacttgactcggtcagatccgtaccatgggctgcctgatggaccctttggcttggcgacagtcttcctcatggtcacacggccgcttccgaggacatctgatgcggcaggcttcacagcctttccggcgaaggcaggggaggacaaagccatggttgaggaagccattataatctttgtttttgtgttttcttttttttggttgtgactggtgagagtgattgaaaatggttggggtatacgtccactttatagcaatgttaagagtaaggtttgttatctgtgaagtatctgtatctgtttagtgattggcttatgagattttgggattgtcgttatcttgtcctatgtgtcactctctagtccataagcttttgctagattctttagctgcaacgaaaacacttgtcatttgtacacaaagaaactttggggaaattttcaaagataaatgcttgaattattggaaagaaatatttgaaattattccaatctatttttttctttttccttgttttctttaattccaatccacttcatgctctcaataatattttcttttttttcttatcaagtttgtttcgaacgccaaactacaaagtttttaagtgaaactagaaacacttaccaaacaaatatatatcaatgttatgtaaaacaatgcagttagatgaaacaaaaagtgatacgaagttcttacgatcataagttaataatataaaaccgtcgacaatgatattaactgatacctttgattgattttgttgaatgttttcggcaacaaatatgactggtaagtttttcttgccaatacgaattagaaaacatgtctttgaagatgaactgtattttttttttttactttgttgtcattttaatgtactttcttatcaggattaaatcttctgtaatttagagtagtttttttaacaagataattaacaaacttagagtaatgaaaattgagatgttcagttttcactcatatttcacattttggtgaaagagtgggtagtatgcaacgttctaagtatgtttggactttgtatcatgttgttttgattctttgacgacatgtctatttgggaaacaccaatgacgtgtaccttgagactgatacgattcaaagggatagaaacacgtcagatttacaagtggcacgtcttcaatggacaatgggtattccaatatgctaagatgctacgagatatctaatttatctaacacaactcaattccaaaccaaaaatctgatgccagctcgacaagacaaaaaatctaagctcaaaaatgtcaacaaccaatagaaatcaaggcattgacgatatcacgagataagcaaattaaatcttcaagttttgcaattcatatgtacgttataaatacccaaaaacctcaccgtaacctagctatccaatttcatcacatcttattaactaaagagccttttacttgcgccacactctcaccgcaatg

SEQ ID NO: 29810 - DNA, 3003 bp, Unknown
  misc_feature (1)..( 3003): 2750-1469P.txt file - cDNA_ID_3022761; gDNA_ID_2214513; Annot_ID_184332
atatacttcgacggattggtctttgacgagtctagtgatcaggtcaattgaatttcaagttagtttgatgattacctttataaggtttcctccatggttaattagtaaatgtttgagctttgtttttgatccgtatcgaacaatgaggcgtggtagacgctatttagtatcgtggattgttgggttatgtgattcagggttaaaagatgataagcctgtgttggagcttgtgcgtagagtaacatggggtttgttttgtgctgtttatgtggggatcatgttgtttgccttgttggtttctgcgtttatgattagtggttttgtgattacctatttggctcatgaaccacttgttatcaaagagagcttgaattttgattacaccaagagtagtcctgaagcttatgtgcccataagttcatgtgctggtgttgcctttggtttgagtggcaaggagagtattgaaactgggaaggtcaaagggttgaaagacaggacagagataactgtgtcaatgacattgcctgagtccgagtacaatagaaatctcgggatgtttcaggttcgggtggacttcttatccgcgagtggtcatgtgcttgctagttcaaggcggccgtgtatggtaaaatttagtagcgagcctatacgtcttgtccagactttgctaaagattgctccgcttgtcacgggctatgtctctgaaatccaaaccttgaacttgaagcttaaaggcttggtcgaaaaggacattattcctactgcttgcttgaagatcatgatcgaacaacgtgcagagtttcgtcctggagcaggtattcctgagatttacgatgcatctctgttccttgaatccaaacttcctttcttgaaaaggatcatatggaactggaggaaaactttgtttgtctggatcagcatgagtttgttcattatggaattacttttcgccttagttttcttcagacctctgatcatcccaagaacaggtcagagaacacaacaaagagatggaacacattctatcaacaacaacttatatcttgacggtcaggcgggaagtagatgaatcagtggttgactagttgttgtaacggtacttacacttactgtaactttaatatctttcttcaaccgaaattgtaatatcctgtctgctaattaaagtcgcattgtccaaatagacttataagttacgttcttgaatcgttttcataagtcggaatgatacagacttttaatttgatttacagtgtactttacacagtaacatatacatatgttctactttacaaccattttgtgttgataatgattagttacaatgagagcagcgaacagatttgaagatgcttgaccttaaagattgatctacatcatcacagaggaagatcggtaactcgtttatgagaagatcctgtcttggagaactcaggctctgcgttctgtattgacggtaacattttatgaatcaaggccccagagacggcaccaagtgttggagccagcaagtatatccaaatccctttgtaacatccccacacaagtgcaggtcctatgcttctggctggattcatcgatgctcctgatacctctctgtaaaatgaaagtttggattgttcccattggttagccaaaaagattcttaccattgaagaattttaacttgcagagattgagggggaaatgtgaaacttacccagcaaatataacattcagtgtgacggttgccccaatgattagcccctctagttcctctgtctgcaagattgataaatgttaagattgaaatttatatatatcatctgatcatgaagtgtttttggttgttgatcgcttacagttctcttggtggttgtgacggcacagacgactaacatgaggaagccggtaatgatgaactccatcacgaatgcttgaagatcagacccagaaggagatgacccgaggaagacatcatgtttcttgctgcacacatcattgttcagatcaaacagaagacgcagagtcgcagatgccaaggttgatccgatgacttgaacagttatgtaggccgggacttgattcagagggaatctttgggaagatgctaaggcaagagtgacagcaggattgaaatgtgcagagaggtggccgagacagtaaacaagaaccattatcactataccccaaaccacagcaatccccacaagagtcactacatggttgtgttgagcattcacggcaatggcggcacagccagcaaatatcagatagtaagttccaacgagctccgctaagagctgcagatcaaaagtgctcatcgtaagtatcagttaacacaaaaacttgaaaagcctatgggttaaaaagaagctttgaagagtgaataaagcagtgcttcctcaatttggactgagataaacttaccttttgcaagaaatggacagagagcaaaggcggggacgatgactcgtgtttgttggaaggaagagaagtgtctgcaagagaagacgctttgatgttgagcacaacaacatttccgtggttgcttttgctcactgatatgtcatccatttttctttttgtccgagaaatagaaagaaaaaaaagttctgtataagctttgattgatgtttgaagttatgtgtttgagagattttttttttttttttccttcttgtgtgtttgagagattgtaatgaggtttcttccttttatagttactttaccaaaaccaaataagcagactgagaacaaagtgaacaaaaagtcaaattttgcttttcagcaacttgctaaaccaaaatcatagtttatttagtgtatatttgttttaagctgaatactgctgaattgcagcagatggttttggagagcaaaagacacaggtcgacccgaaatagataatgtttagaaagagtcaaatccaattcttgtttctggtttaacctaaaccgaggctgacttgtgcaccatttttaattcctgtttgtactctttgactttatgagtttgcaaatg

SEQ ID NO: 29811 - DNA, 2610 bp, Unknown; identical to SEQ ID NO: 11739
  misc_feature (1)..( 2610): 2750-1469P.txt file - cDNA_ID_3022765; gDNA_ID_2214513; Annot_ID_184330

SEQ ID NO: 29812 - DNA, 3000 bp, Unknown; identical to SEQ ID NO: 11732
  misc_feature (1)..( 3000): 2750-1469P.txt file - cDNA_ID_3022801; gDNA_ID_2214513; Annot_ID_184354

SEQ ID NO: 29813 - DNA, 3000 bp, Unknown; identical to SEQ ID NO: 25629
  misc_feature (1)..( 3000): 2750-1469P.txt file - cDNA_ID_3022817; gDNA_ID_2214513; Annot_ID_184347

SEQ ID NO: 29814 - DNA, 3003 bp, Unknown; identical to SEQ ID NO: 26181
  misc_feature (1)..( 3003): 2750-1469P.txt file - cDNA_ID_3022819; gDNA_ID_2214513; Annot_ID_184346

SEQ ID NO: 29815 - DNA, 3003 bp, Unknown
  misc_feature (1)..( 3003): 2750-1469P.txt file - cDNA_ID_3022832; gDNA_ID_2214514; Annot_ID_184393
ttatttagtataaataaatacaaatatatctatatctatgtatatattgttaatataatatttattttgttattctgtaaaatatatccaatcaacctattttaataataatttcattctatggttttttattgcgtaagttttcattctacgaatttttatctgcaacttatgttattatgatattatgcaatgttatcgatcggaatcatgtaaataataataaaaacgactgttgagactttgtaaaaaaaaagaccattgagatatttagtggccgatatataaagattttttttaaaatggagtacattaaatatatcaacaaccaaagctgtatttttattattttaattgggcttatttgttttcgtcaaccatcttagctgcatcttgtatacagaataaaaaacaatgactctctacattgatgtaatatatttaatttttgcttaacgttatcgtaataataatatgaaaatagaatttagcccatagtttatttgccactaacacttaaggactcaataaacaattacgactagatcacatcattatgaattaaatccattaattatttacacaaattgcagatgagagttatttaactaaaagccttattgggaagctgaaaaattaaaacgaagagtgcacatttcagtctgtatgtgtatgtttatatatacacatatgtagggtcccatacccatctctgtaacgtttattgtgaaactcactgcactaattaaatggacatgtttgagagattgtataagcaacttagctaaaacgcaaatccacatatcctcaaaataaacttgttcagtaaaagcttcaatcaaatcaccaaaactcatcctcagagcaatctctatatatgttccatctcaaacaaatcacagaactccttctttttattttaccaaatttatatataaatttgtgggatcattggtttcttaaaaccccttaccaagaaaagatgactgaaataagtgttgaaagcactcacaaaagttagttcactcgtttaagaatttagaagattacatttcttactaataaaagaagttcattgaggcttctcaggctagccacatcagctttctaatcttttccattaagctgccacatcagcctaattttgctcgcaatgtttctaaacccagccacattagcctaatttattactaataatcaaggctttgggcctcttaataatgtaatcaacgttttggtttccctcttagataatatacatctcatacctctctaagggttttacgttccaattcatctcccccaaatcgactctctaatagtcgcctctccttcaaaaatacgatcaccttcccgttcatcgttcacttcatcctaatatttctaaactctgcatttaataatgatagactgacaaaggtgagacaaattgttctttacgtcttattattaaatcgagatatatagcatgactcatgttatctctgtataaggccttttaacaaaaaaaaaaatgtgatttctgtatatgcatgaaatatggccacaactctctaacttcttcacttaaggtatatgtcttcttttcgcccgtctaaatatttctgtggttcatggttgggaattgacgttgcaatcataatatgttccttcatgttatatgaatatattatgacttgcaggcttacaatggaaaccagagactaccttggcagcagtttggaggaggtaaactctagaaggttgtctcgacatgtgcacgttttggttttcatctattgattctcccatgtgttatacttaggtgttatcaattctagattctcattatagtagaaacagagtaaaatttaggtttctgaggtcttaaacttggtgaatgcatgatatgtgatggtcaaggatttcactatgtaagtgaacaaagtaaattaattgtcattaaaggtcttttttatatgtttaacttttgacgagatgcatctattatatggatcatattcatatttctcctgcaaatcttcaaaaatgataaatgttgtttcttaaagcacaaaaagattatatatgaatatatatcagaagaggagggttccgtttggttatatatatgcacttccaagcatgttgtgaccaataatatactgtggtttaagggagatcttacatatggcgttcattatcaaggtttcaggcttcaaacgttcattgatccaccattatacacatcagctgcttaagataagcatgcaactctcattctcttcagctttttcttattaagattcttacattctttagtttagtttcattttatatatagaaattgttgtattactattattctaaaaagtaaaacaatatgtgcgtataaaaccatagttctttacgttaccataaccacacatattcttctcatttttttctggttaaccatattggaaaaataaaataaaataatgtactgtaatcaccgttatttttacttgctaatctattgcttgaaaaaagtacatcatgtaatttcaaaaacaaaaaaaactaaaacaaaatcacatgaattatagtaccagtatatagatgtcaagactatactttgttcacatattcaatgatagtattaaatatattaaaacttgcttataaaaagtaaccggcgcgtagagccgaccaatccctagtgaaaaaataaaatttgtaatatttattcatctaaataactaaaatatcaaccagctgtattattagcttagttgtgttttggctttttcaacctagctgtatatgaatgtagagagttaatttaattaatttgtacattaagatgtattagaatatttattaacgaaattcaaaaacacaaattgcaaatgaaaagctggaaagtaaaacgtcatgtctgtgactactatgtgtatgcatctgtatatatcggaatgaaggagaataacaatatatatcctaaaccaaagaaaaaaaagaatctccgattgagcagccatg

SEQ ID NO: 29816 - DNA, 3003 bp, Unknown
  misc_feature (1)..( 3003): 2750-1469P.txt file - cDNA_ID_3022837; gDNA_ID_2214514; Annot_ID_184391
tggaaacttgagtttctatcgtgtttccaaaaataaatttttaaaaaatatgttttcgtgacgattttcgtatttccgaaaagtttctgtttccgaaatgtttcgaaatataaaacagatctaagagcgaattttcatgcaacctagatatacactgcccttttaatttgctaagttgtaaatttcctcaaccgatatatggaacaaaattaaaattagatttctgttattttaggtataatctccgggtatacgtgatgagttagtacttttacgcagtagtgatatacaacaaagatctctgataccgaacgtgaaaagtaaaagtccttttacatcatcgttttatatcttgaattaatataacacacaatgactattttttttttagaaacacaaaaagactgttgagaaaattaaataactaaagtctatcaaccatcttagctgtacttaatcgtatatatgaaagttggccaactctcttcatatggatgacacatcatcacacaagaaaatgacatgtgtcctttaacattaattaaattaaaaatcagcaaaattaattgagagaaaatcaaaagtttcatattctgttaaatcgtccattaattcatttctttaactattttttcaaaataaaaataaaattataaaattatttatttaaataaatcaattactacttttattttacttttattatttctatttttttttaaattaatggtcaatggtcatcactctataatgactaaatagttatttgtgttgtagtttagttgtttgctaccttatattagtttagttattttaccttgatttttttatttttacgttatggttcatatcttatcatatgaaattctgtcttttcatttttgtatctttaggtaagttcgtaacattgacattcaacattttcaagtaatagacttttgagacttttggtaagtttataaattcaccttagttgtatatcaggctactatagttaattaattatgtaccacattaagatgattagtttgtttccgtctttattgtacattgtgatttgtgaagatagcatttaatcatttagttagctagctaacccataagttatttatttgccactgaagctatatgccccaattaacaatcacgattagatcatttcataaaattattacagaacatgaattatatataatgtcctatgacacatattttatttattaaagaacttaatcatctatgtgtaacactacctttcattgtttcaagtaaaacttttggtgtatattttcgtttttctttggcaatgttaattgaaacatttgcgattaatcgggtggcgtcacgaaatccgattgtgaaccgggtaatagccggataagacgttaatttggtgacgctatcacacgtaaaaagccaacaaacagtcgaattttaaccggtccaactagttctacttgattagatcatttgaagtccaccttttgcaagattttcttcgtgtaatttacttatctttaaatcgaacatatatatatatatatatatattatatatttttgagtactaatatattgcctttataatttgataaatatacttgtatgtaattaaatcttcctcctcactatataaattcatgacttttaaaactgtttctgtttatatatatatatatactaggatttaacccgtggtataccacgggacaaatattttatttatatataataatattaaattttacggttttaaatttagtattaaaattatataattttatattaatattgtaaataaaaaaattggtgatgataaaataataaataaggatttaactcgtgttatatcaatcaaatccgtcccgctatacaactcgtctcatgatagttttaatatttttttataaggataaatattaataaattgtaggtatgtaacctagctgtaggtatgtaaagagttagtttaatgaatttgtacgttaagattagactatttattaaagaaatttaaaaacacaaattgcaaagaaagctggaaaaattaaaacgtcatctctgtgaacgtgtatatatcggaaagaaggagaagaccagtatcaatcctaaaccaaccaaaaaaaaacaccaaaatctccgattgagcagtcatggacttattcggagaatttcataaggtggaaatcaatgggaaactatttctcgtataccacaacgttataaaaccattaccaaacataaacaatccattgattccgtctacgatctccctcctcagcctcttttcttatgccctcaactccgaaccgaaatattatcaattgatatcgataatgcgagggttggtgagagggtatctaaacaaattcttttcaagcacaatacttcccctctctttgatgacactagtgacggtcatcatgtactccctctgttttggtgcaacaacaaagaagtcgatccagaagcagtagacggcgatgagtgctattcttgctctttccaatccatcggtacagactattatttctgtgacaagtgtgataaaaggttccataaagaatgcgtcgagtgtccacttgagattagttatcctacccacaccaaacattctctccaactcttctattctaaatatagatctgacctctgcatctactgtagagaaagagcaacctatctgatttatttttgtgctctttgcgatagttatatgcatgtcttttgtgctcagatgaaaatacctttttttatagaccaaccaaaaagacatgaccataccctcaccctttttcctagacaagcttccttaacctgcaatatttgtggtttggtaaataaacttcatctcacctacatttgccctatatgcgatttcgtagcccatagtgattgtatctatatcccacaaaccataagaatatctcgtcaccaccatcgtgtgtcttttatttcttcccttccttttgaagaaaagtcttgcggagtttgtcgtcaaatg

SEQ ID NO: 29817 - DNA, 3003 bp, Unknown
  misc_feature (1)..( 3003): 2750-1469P.txt file - cDNA_ID_3022841; gDNA_ID_2214514; Annot_ID_184389
taacacatccttgagttaaaaaaagtataaacaaattttggttcatttattagtctaattggcctcatcgctcaatgaagctatactatcgcaatccaaaatgtctcaatgaagatatcctactatcaatgaagctatactctctataaactataccgaaagttttttactagagatttcttaatgaaatctctatcccttcgattcatatatgtaggatatcatgtaaattataatacaaaaagaccgttgagctaaatattaatactcaatctgtatcattttaaatgatgtttacaagagagaaaaattgtttcatttaaataatgtaatacagtaaaaaccttaaacattccttgaaatgaagagagtatattattatgggctatattaatgtatatgcctgaaagacttgaaaattagatatttactataaatagtttaatattaggtaagaataaaagagaaaaaaattaaaactataaatatcttttctatttatttaatttaccaaatttgccattgtctcacaacattatttattaccggatactttaggcatgatactgttcatcatatacctgacaactctattcatccaaaatttacaacactattcatcattggattgcataaaatatttatggtttatgtagataactatttgattaacatgttaactagtatgatatcgtgctagatacagataaatgtttgattaacatgttaactagtatagtatcacgataaatttatatataacgtattaaaccatttaccatattatacaaattaatatgaaagaatcaaattcggttgacaaaaaaaaaaaaaaaaatcaaattcaaattagaataacatattatactgaatataacgtgctaacatattaaatatttgaataatatttttatataaatgtggtaaaatatttgatatatagtgaaattataacaatagtttatacacgacatatttggtaaattaaacaaagtaaaaaagacagttatgactttaattttttttctcttacatacttacccaatattgaattatcaatggtaaaatctagttttcacattttctgggcatatccattaatactagatgagtacccacgctacgcgtggatttattttgaaaattgttaaaaaaaatatttacattgattgttatttttgctaatttttgtttattctttgtttattcttgtattgttaataaaattagatccataatatgtacttataatttttatggttagattcatttgtgactaatttatttataaagctgattatttataaaattttaatattttcacttcatgaatacatataacaacaatatctgatattctgatagaattatgtataattatgttacttgtgtggtttaaaatttgcttaactcgattataaataaatcaattccttgttttatgtacttcaacgatattgtgataggttcatgattaaagtttggattgacatcaactgaataagatctgaaaaatattcatatgtaaaaataagaagatggcaaaaattgaatatcatttaagtcaacaattttagattttctatcattgcatatatcaatattagaaaaatgatcatgtcttggatgatttgaaaattgtctaacttgattacaaataaactatttctggtcttatatattctcttgatataataatcaacaacattgttataagctcatgattaaatatataaaattgatataaactaaacaagatttcaagcgtattcatatgaaaaaataaaaagaaagcaaaaattaaaatatcatttaagtcaatacttttagatcttctctcattgcatatatccatataagagaaataatcatgtattaaattatttggtaggtctaatgtttcaaaggtttattatttgaaaaaatttgaatgttaatgttatcaaagactcaaaataaaattactaaactaataagaggttaggtagcaaacatcttcaatgcaaaacattttagtcattaaaatagtgattattgataataaaaaattagtaaaataaaaataatataatgtaagtagtgcttaatttattaacataatttttattttttatttttattttgaagaaatcaattaaaattagtattgatgatacatttaatttacttattaaattttattaaattttaatttaaaaaatataaaatgacacatgtcatttcttgtgtaatgacgtgtcattcatatggagagagttggtcaacttttatatatatgatttttctattatatattacattaaatactttttgaaacagagtcaaaactattacagtaaatattataaactaacgttagttggatttaattatttttaatttcagcttagctgtattttttgtcaaccaacgtcaacgtggtaacgtagctgtaatatataacaaaaatgacttctacattaatataacttaattcgtaataataatgtgaaaattagctagcatttagcgcccatagtttatttgctactatatgagtcattaaacaattacgactagatcatatcattctaaaataatatcaaacaaattgcaaactggagttgtttaatccttgggaagctaaaagtgaaatcttaacgaggacaacacctttcagtctttatatatacacatatgtaggggcaagaaggataacaacatcccaaaaccctaaaaaatactctaatcgagcaaccatggacttcttcggagaatttcagaagagagaaatcgaggggaaaccatatctcgtatactaaaacgttataaagccacaaatacaaaccccaaactcctctgatgaaaaaaccaccatcgataatccattatcaatccaaaatttaaactccatagccattgattccggcgacaatctccctcttgcacctcttttcatatgccctgatttacgatatcgattaacagcgactgtcgataatattacagtctcgggtgaagatg

SEQ ID NO: 29818 - DNA, 3000 bp, Unknown; identical to SEQ ID NO: 27379
  misc_feature (1)..( 3000): 2750-1469P.txt file - cDNA_ID_3022848; gDNA_ID_2214514; Annot_ID_184385

SEQ ID NO: 29819 - DNA, 3003 bp, Unknown; identical to SEQ ID NO: 25634
  misc_feature (1)..( 3003): 2750-1469P.txt file - cDNA_ID_3022851; gDNA_ID_2214514; Annot_ID_184384

SEQ ID NO: 29820 - DNA, 3003 bp, Unknown; identical to SEQ ID NO: 25633
  misc_feature (1)..( 3003): 2750-1469P.txt file - cDNA_ID_3022872; gDNA_ID_2214514; Annot_ID_184374

SEQ ID NO: 29821 - DNA, 1197 bp, Unknown
  misc_feature (1)..( 1197): 2750-1469P.txt file - cDNA_ID_3022877; gDNA_ID_2214514; Annot_ID_133906
ttagattattttaaataatatatgtctatcacctatattagtaagtatatattcatagattatagttgattttgcccaaagaaaaaagaagattatagttgattataccacatcattgatattctgtgacgaattagattacagttgcggtaaacgtattcgctagctagtacgacgtgcttaacgcaaaaatattcaaagataacgaatccgattaatattggttcgtttcttaattcttacatctagaatcacacataaaaacaataaaataattaaaaatttgatgaattttttatttttttgagtgataaaaggcaaaatgttttccgttttttagtagctttctctttcaaaatatctatttctggtgtatatcgtgaaaaaaactttcaaaatacgtgaatgtgatgatcgttgaaaacttcaaatctcatttcccctaggttactataaaagcccactatcctttaatgggccaggcatgctatttctgtacaatacaagatggacctgaatgttttaacttttaacttttatctttaaggtcaagttaattgaaaacaaaaaccaaatttgtggatcaatttggatgcctcagcctacgtataaaaacatgtttttttttcgtaatattaatggaaatgaatatgttaaaaaaaaaaaatacatgtttttttcgtcgacacttttaaaaataaaataaaatttaaataaatgtctttgaccaaaataaaaataatgtaaaatttgggagtggggaatgtagctcggaaaaaaatagggtatgtagatcggaattaataaatagattttatattattacataaacaataataaaatacacaatgttgtctttatttaattaatacaaaaataataaaatagacaatgttgtctttattaatattacttctcagccccaaaattaatctttgatcggtcccttttgttttatcgttttagggtttgtagctcctttctctttttttcttttctcaatttcccccaaattaaaaaaaaactctctctttcagagatttacaaatttcatttctccaaatccgaaaccccaaagtgaatatttttccttctgggtttcttttgtttgcctggaaacatttgtctcagattttgattttgaccggagtactcatattctccggcgatttctccggcgacatcgtttgtgaaatg

SEQ ID NO: 29822 - DNA, 1197 bp, Unknown; identical to SEQ ID NO: 29821
  misc_feature (1)..( 1197): 2750-1469P.txt file - cDNA_ID_3022877; gDNA_ID_2214514; Annot_ID_184372

SEQ ID NO: 29823 - DNA, 3000 bp, Unknown; identical to SEQ ID NO: 11766
  misc_feature (1)..( 3000): 2750-1469P.txt file - cDNA_ID_3022899; gDNA_ID_2214515; Annot_ID_133948

SEQ ID NO: 29824 - DNA, 3000 bp, Unknown; identical to SEQ ID NO: 11766
  misc_feature (1)..( 3000): 2750-1469P.txt file - cDNA_ID_3022899; gDNA_ID_2214515; Annot_ID_184432

SEQ ID NO: 29825 - DNA, 3003 bp, Unknown
  misc_feature (1)..( 3003): 2750-1469P.txt file - cDNA_ID_3022903; gDNA_ID_2214515; Annot_ID_184431
ataaatattcaatgcataattttctttaaattaattttatataaaataaatattttactatatattatatgaaataaatgctttattatagggaaaaaacccaaaacaaacctcaacttgttatgaataaagatggatgctcattataacgcccatcatctaaactcatcatctagatgtttctaaggttttaccctttccttgtaatcctatataaagaaccctttacctcaatggaataacacactcattttcttctatctctttctctgtttataacacgttatcaggacgctctaaaaggtagatatagagattcttacatttttttaagaaccatgtttacttatcgactcatggttcatagtatttattttctattattgaaacaaaacaatatgagccgatcgatgattatagtatagatcggtaaaagcatgttttcaatgattcaataaagaagagaatcatgcttatcatttgtttctataattactatcgcatgattcaatgattctacaaagaaaatcgttaaagaagataatcatgcttattaattgttaatttttgtgatttattattacaataatgaatatataaattaccaattttataattatataactaattttgtaactattcataacccggtggtaggtgatgcaaacatgtattaatgttttagcattccagttttgaatagttgcatctatattcaatatcattttataaatattatattgtctaaaatccatttatgattgatatgatatcccttatttaactcctttgattaaaacgttatacatatcttatcacttttagatattgacttttccatattaaatatttgatttccatatatttgattgtgttattattatttttactaaaaatgttgcaagataatttttctttttataagattccatatatctaaatctttgtgttattattatctaaaaatttttataagatttccatatatttgattgtgttattattatttttactaaaaacgttgcaagataatttttttttttataagattcttttctctaaatctttgtggtatctaaaaaaaaaaaaaaaaaaaaaacaaaaaaaattgttcatggttttgccctaattttgcacgaaatcattttacccaaatcttgcacgaattcatattagcctaaataaaagttttgtcaagatatatgtaaaatccagattttgcacaaaatagttttattctgattggttttacaatattgcattaaaattgtattagtatatcatacttgattattttatgaaataaattgattgataaataacttaatttaaaggtataatcacttatagaaattttcatgaatgactagtttaatgtatcttaagaagatatcatatttttgatggtcaaaattttttcaagaacttaaattatcaccaaaagttgagaaaataaatatggtaaaaaaaaataagaaattttgaaagaactattataaacttaaatcgagtgtttttcaaaggctaagaaaacagatgagttatcgatgataagtagtactcatattctgaagtgaatataagatcttacatagttagtcaaatttaatatcgtttatactagaatataaaaatttaattattatctcgttattgttttattagcatatgattgattattaaaatacatggaagtaattttgattataagatcttattaagggagtaactgataagcaatgaaaagtaaattaaaagttttgaaagaactagaagtttcaaaagaattaaaagtttcaagagtatatttggcttaaccggattggtcatcctggtttaatgatgatgtgaaagtattgagaattatgtggacattaggtgaaaaactagaagattctccctaatgatttatcaaatgttacttgctcagaaagcaatatgataatgtgatttttaccagtgtaagtaatttggactttatctattcgtaagtatatatacaaggagatgattatgggttgatcacccactatatgacatttagatacctaatggttataaaagatgcatcgattcaatggacgcattgactcgattgttgcatcgactagaaggtcatatttatccttgttataaacccgcaacatagagtttgcgagattactttcttgattaaagtacaagagtatttcagtgtttatttataataaccattattagatatccgttgggataagtgtttaacattttgaaattcatgttcatacacaaaatggtttagtaacatcgatacacatcaagccaatgaataattaatacttttccccattattattggttttgggtcagaaacctaatagttttcatctaaaagctttgaatgtgaaaagtgctccaccacagcacgcagagatgaaccctcaaaggaggataagaatacatgttggatatgaatgataactaagccatcctagaaggatttatataccgctcgttttgaagactatcatattatatagtcagctattccaacataagggggagaatgtatacagctggtgaaaaagataaatagaaatgaattatcaatgatcctcggagtaaagaatgtatattaagagtccaaaagataattcaattacagaatttagcgttgtaattgccagacgcatttgctgacccaaataaagtgatgaagtcacttataccagttgtaaattaaatgccccagaatataatgaatgtcctgtaaggaccaatttcaaactgctattgagtcttaagattgcatgaagcgtaatagaccttggttccaaatataaatatcctcgtaaaagtgaaggagcacaaaattaaaaatgaccaaattgaggaaataaatattttgataatctcttgaagagagtgaatgatctctaaaagagacatagacatgacaaatgaaacattcaagtacttgacaatgaagagatctagctagctatgtcatgtcaaaatataatg

SEQ ID NO: 29826 - DNA, 3003 bp, Unknown; identical to SEQ ID NO: 25646
  misc_feature (1)..( 3003): 2750-1469P.txt file - cDNA_ID_3022912; gDNA_ID_2214515; Annot_ID_184428

SEQ ID NO: 29827 - DNA, 3003 bp, Unknown; identical to SEQ ID NO: 25641
  misc_feature (1)..( 3003): 2750-1469P.txt file - cDNA_ID_3022931; gDNA_ID_2214515; Annot_ID_184419

SEQ ID NO: 29828 - DNA, 3000 bp, Unknown; identical to SEQ ID NO: 11755
  misc_feature (1)..( 3000): 2750-1469P.txt file - cDNA_ID_3022934; gDNA_ID_2214515; Annot_ID_184417

SEQ ID NO: 29829 - DNA, 3003 bp, Unknown
  misc_feature (1)..( 3003): 2750-1469P.txt file - cDNA_ID_3022938; gDNA_ID_2214515; Annot_ID_184415
agctaaaagtgttatgatctgatcaatgtgagtgggttccagtttgagtcattggccagttgttgtgtgtgtgaactgatttatttatatatttggataatgaatctttgccaatcaatggagaataatcgaaaaataatgttacccccgtgaccacaaaagaaaggaattataatgatatggtcttaattcgattaggacttattaatacaacagtactagtatactactcacattgcaactggatctcttaaataattttctaacctgcagatttcagaaagtgtttttttttatacgttcaatattcgtattttgtacgtagacgtttagcactactatacgtttttaagattccgatttaaaacacatttgctactatatttgtagcaactaaaaccaactccaaccgtagttttttagtagaaactcatacaattacaaaaaaaaattataaattaaaaaagagatgagagagaatctctaaaattgggaggatcgtttctattattcatataggttgtttttttttgttttttggatataaaaataaaatattaatactttttgtttttttagaaactatatgaatcctatacattggaggtgctctaatgtacaatccgttcggacacgttaattacagatgggggtgtatggctatatacttcacattcatacgattgttgaaccttgtgagataattgagatgattagctttagcaagaagagatgattttgttggattgtgtgcaggtttaaaacaatctgatttgcattgaggactctctgttataaaccaacatttttttattattcttaaaggactctctgttataaaccaacatttttttattattcttaaaggactctcttaattacttaaactaaaattttgattagcattgtatgttaaaataaaataatacattggataaataaattaaacaaaaacatacattggataaacttattaaccatcatacaattaacaaattaatgacatcgtcaataagatcggaagataaatgattggattttaccaatggtgtcaaagagttttacatgagaaaaaaagtagatttaatgtattgtttttcttaattacttcaaattaaagtattgtttcacatacttaataatgggctgacaagttttcggacacacattttcaaagacatgttaggattgagctgacaagtgaatctggatttacttgtattttaacttctaacttttttcaactagaaaagtagtggatatggatttcacttgaggaacaaaaatacaaaaatagaaacttagaaagcacgagggatgtacgtattttgttgcatggggagatattgacaaagaccatcgagttgggttttgttaaatatagtaatattttatgttatgatttgacgtacgctctataatttatgtgtaatgtatattagaaaattcatggaatcgtatcttgtcatataatacatatcaaataatgtgtattgtttttgttaaatataacataacgaaagattaattaattcaaacataaaatctatgtatctgtcaatcaagaatattgtgtaatgtagttaataaaatatgcttattagttgctatagtcgacgtatcacgtatgaatggttcgaattgatcccacagcatacgtgtttgtttctcaaccacaacctttattcgtccaactaaaacaaaaatgatcattatgagatttaccacaaaccacaagcatgactacaaatatcaaaactaataaaaattgattatataccaaaacggtatcaccaatttatgatgtactacgtatactttctagtaccgttatctgatttttaattatcattatataggatttttttttaaatgtctcttttacaatatttatataaaatcatattgtaatttacaaaagctgaggtgattggtaatcctaaaggcttccatatgcatataaaatcataatttacaaaattcttagatatctcgagagttttgaagattgcaaaccggaatgtgttccaaaaagttgtaatcaagcggcaattaaaaaactctaattaacttaactttaactatttttgatattgttcaaagttatggatttaaggattgataatttcggtttgagtcaactctcccagtaaacaaatgctagcaatataggggcgtttcaagttgcagaaaaacacactaattgtctctaaagtctacagccagaaacacaatctgataggtcccaaaagcaacaaacacacacaaaatccctttttaatggtagtttaaactacctatttgttttgattttctgatcaatatatggaaacaaatgaacgatggaaatggaatcaatcatgattcttacaacttaggggagacggagagatggtgaattgcataaacaactaaaagaaaagcactcattcaaaatcaacgtgaaccaactcaaccttcatgtccgcgttatcccttttggtctcacaatctattccatgttatgcccattattgtctatggataatgtttggcatataccagtgaaatttgttggacgaaatggtttaacatcccgtatattgacaaagaggtcgtgggttcggaacctttgttttgcaaaaaaatacgttttcttaaatttaagtataaaattcatataaaaatacggtttaggtatgaaaaatgccctataaatttatttgggtatgcaaatgcactcagaatgggtattaactcttttcaccagtcgagagactagagatagaacaaaatagaacaataaaacaatttaggggcttttttgcaaatatcaaaacccctcctaatttaactcttccgccgccaaatgctaaacccccaaaggccaaagcttctcctcctccttcacttcctcttcgtctacatcaatctgatttgagggatcatctcctgacgaagtttagggtttagggtttcatttatccctcccaaagtttctttctagtctcttcaattacgatg

SEQ ID NO: 29830 - DNA, 3003 bp, Unknown
  misc_feature (1)..( 3003): 2750-1469P.txt file - cDNA_ID_3022976; gDNA_ID_2214516; Annot_ID_133960
tttgggcagtacgtgtaggcacaaaaaggaatattccggtggcttctttctggactacgtcagccacgattctctccctcttcattaactccgatcttctcgcaagtcacggccattttccgatcgaaccatcaggtagttacaaagttcccatttttactgatcaaaaccgtaaagttcaatactttcatccataattagtgatttctgaatccgggtttgtttccagaatcaaaactagacgagattgttgattacatccccggtttatctccgacaagactcagtgacttacagatcttacacggctatagtcatcaagtcttcaatatattcaaaaagtctttcggtgagctttataaagctaagtatcttctcttcccttctgcttatgagctcgaaccaaaagccattgactttttcacttccaagtttgatttcccggtttactccactggtccgttaatacccttggaagaactatccgttggaaatgagaatagagaacttgattactttaagtggcttgatgagcaacctgaaagctctgttctttacatatctcaagggagttttctttcagtctccgaagctcagatggaggagattgttgtaggagttagagaggctggagttaagttcttttgggtggctcgtgggggtgagttaaagcttaaggaggctcttgaaggtagcttgggtgttgtggtgagctggtgtgatcagctacgtgttttgtgtcatgcggctataggcgggttttggacgcattgcgggtataactcgacattggaagggatatgttcgggagtaccgttgcttacatttcctgttttttgggatcagtttctgaatgctaagatgattgttgaggagtggagagttggaatggggatcgagaggaagaagcagatggagttgttgatagtgagtgatgagatcaaggaattggtaaaaaggtttatggatggagagagtgaagaagggaaagagatgagaagaaggacttgtgatctcagtgagatatgtcgtggagcggttgcgaaaggtggttcttctgatgctaacatcgatgctttcattaaagatattactaagatcgtgtgagttctattgttgttaatgattcaagtctatattagtatttgtataagtttgttaaagattcaaactttgtagagatttaagattgtttgtaaaactgttatttataagttcatttgttagactctttggtagagcttaatctcgtgtgtgcctaatttttgtttgactttggaaatgaattgtgaggagacaaatatagaaaataatttatgaaatgaattgattttggtaaagcttactggctgattggttacactatagctgtagattatttgctgtagaatattggatgtaagtgtaagctgtagctgtagatttgtaaagattttattcagtttgttagagaaaatactccaattctgcataaaattctaaaatctgatcttaataggaatgattttcacacatctcatgttttatctaccaatattttaacatattttgcagtaaatttaatattttacttgatatctaatgctttaggacaattttttttttactttatttttgatttgagttcttcgtttttaagaattatcggtttataaataactagattctgacccgcacgtatacgtgcggggtttcatatttttaaaaatgtattggaatatatttttagtgaaagatattatagtgtataaattataatatgcataaaaagtgtaaagtgttatttatgataaaatagctattttttgtaatttatattatttatattttatttgtattttgcatagtaaatagattgttagatttgtttcgatttgtagaataatatagagatatttagaaaatttgtgtatttttgttagtttgatgtatatataaattgattgtttttgtttgaaatttgatcaattagatgatataatgtaaaattttctccgtggtacacctttggtcgatttttttgtaactaaaaattcaaattttaagatatagttattttgtaaatattgtttattttgtttaatgtttaagaatatataattatgttataattattaattctaaaatttcactcgtagattatcgtcctttattaatatcaactcaaactcatcccaccatataatttcattccgtaaaatgaaaaattattttgttattttaaatattgttattgtaatataataaaaaaatcgagggattgacatgtggtacatcttggattaatatatttaaaaataatttgtatatttaaaaatcgagggattgggtaattatgaatatattgattttaaagtcgattttttaaaagaacaaaatccaagatatttattttgttgtagtgattgttaatttactaaactacccatgcaaaaattcatttacttaattttaaactacccttacaatgttgtagttcatacaatacttctcaattaataatatagataacacttattagttttcaagggataaatttttttccacttgtgtacatttaaattctaccaaagttttaaaaatttacgatgacaaaaaaataatattcgtattcataatataaacataatctaataagtttttttggttaggttcatatcgcttaaattaaagtacgatttaaaaaaaaaaaaaaagtaaaaaagtacgtttttgttttggtaaaaaacactaaagaggcaaaaacgtaaaaaggcaaaaaatatatttttacttggggaaaaagatgttaaagcccacaagacaaggcagaggtttctcccatgctttgtctttagtttaaccgccgcatcctctctctctggtcggagaaatctccagatttggtcatttctccaatcttctcggaaccctaatttaaccaaacctctcctccttcagattcatcttcctcctaatctccctaaaagctcaaacctttctctcaatcaattctaaacaatg

SEQ ID NO: 29831 - DNA, 3003 bp, Unknown; identical to SEQ ID NO: 29830
  misc_feature (1)..( 3003): 2750-1469P.txt file - cDNA_ID_3022976; gDNA_ID_2214516; Annot_ID_184455

SEQ ID NO: 29832 - DNA, 3000 bp, Unknown; identical to SEQ ID NO: 11786
  misc_feature (1)..( 3000): 2750-1469P.txt file - cDNA_ID_3022984; gDNA_ID_2214516; Annot_ID_184451

SEQ ID NO: 29833 - DNA, 3003 bp, Unknown
  misc_feature (1)..( 3003): 2750-1469P.txt file - cDNA_ID_3022990; gDNA_ID_2214516; Annot_ID_184448
tatgcaatgtattttcttaacattgttgagttttaggagtgatggtccacaacagactttacatggagcacaagtttagagtggagaacaatattctcggatatgaaatatacacatataggagatttgattaacatatctaattgtctggattttgagtaattgtcacataattttcagtgcgactgcagatttttttttttttatcacaactgcagatttagtcttttaacaggttttctttataaattacaaattaatatagtatgttatttcttaattaattaataaattacaaattaataaatatataaataagttcaattgtagtctagtttgggtcacaggatacttaagctttctcacctgagagtccatgaaaggccttgaaagacattaataaagcccaacgtagcccagatagacccataaataaatctgtcacgtttaccacgctttaacggtcaacagccactagttattaaatttatttattttttaaaaaaactcatcaaaacaaagtccactagttatattcgaggttataaacgtaattcaaggttattgtgctgttgggagctttgaagcggcacgatgataaataagttgacgccatgacacgtaagccgcttagtagcctctttcttcaaaccaaagactattcaccgttggattaagaaagctcactcaatcttaacccttcattttattaaataaatcctacgaccagaaaataaaataaataatttggttctgttatcctttcattgtcttcttcattcctggtaaaggcttttaatttcatggattatcttagcttctactctcatggtggctatcgagaaatcactcacaccaaaatctttgaagttctgagtttcaaagtttttcgaatttgaaactttcccgaagcaattttaaaccttttctcttcctttcgattttttctcttctggaattagaaaacttagttatggcttatgctcatgttttcgcttcgttgactatctcgacgatttctctccgacgattcctcccccgacttcatcgaaaccacagcgtaaaacccaattcccgaatcatatgcaatctgaaactaaactactctgctggaaaatttcgcgagatgggactatcacgttccgtggagctagaccaattcatcacaagcgaggaggaagaaggagaagcagaggagataggagaaggatttttcgaagcgattgaggaactagagaggatgactagagaaccatcagatatactcgaagagatgaatcatcgattatcttctagagaattgcaattgatgcttgtttacttcgcacaagaaggtagagattcatggtgtactttagaagtgtttgaatggttgaaaaaggagaatagagttgatgaagagataatggagttaatggtttcgattatgtgtggttgggttaagaaattgattgaagatgaatgtaatgcacaccaagtgttcgacttattgattgagatggattgtgttggtttaaaacctggttttagtatgatggacaaagttattgctttgtattgtgagatggggaagaaagaaagtgcggttttgtttgtcaaggaggttttaagaaggagagatggttttggttatagtgttgttggtggtggtggttctgaaggtagaaaaggtggacctgttgggtatcttgcttggaaatttatggtaaagttttgaacttttttcatagtttttatttttttttataattttggtggatttgagatcaaaaagatgtgatatgaagtggttaagatgactatagttgttataccttcttgttagttatcggtttcttggtctagctttgttgatgtggatatgtgtcttttgtttcttctaataggttgatggagattataggaaggcagttgatatggttatggagttaagactttcagggctgaaaccagaagcgtacagctatcttattgcgatgacagctatagtgaaagagctgaatagtcttggaaagacattacgcgagttgaaacgctttgcacgggctggttttgttgctgagattgatgatcacgatagggtactcattgagaagtatcaatcagaaacattatctcgtggactgcagttagcaacttgggcggttgaggaaggccaagaaaatgattccattattggggtggtccatgagaggctactcgctatgtatatatgtgcgggacgtggaccagaagcagagaaacagctctggaagatgaaacttgcagggagagaacctgaagctgacctccacgacattgttatggcgatctgcgcttcacagaaagaggttaatgcagtttctcggctactgacacgagttgagttcatgggatctcagagaaagaagaagactctgtcatggttgctcagagggtatgtgaaaggagggcacttcgaagaggctgcagagacattggtatcgatgatcgactctgggttgcatccggagtatattgatcgagtggctgtgatgcaaggaatgacaaggaagatccaacggccgagagatgttgaagcatatatgagtctgtgcaagaggctctttgacgctggtttggtagggccttgtcttgtgtatatgtacatagataaatataagttgtggatagtgaagatgatgtgataaaaaaagaggaaagagtatgaaatagctgagaaacaagtctaaagacaccgtctaagatggagggatcggaagtttctatttttgtgtatataaatctgtatgtagtaaacaataatatttgtctcaaatatgctgaagttccaacggcccacgtttttaaatgggcctatatattaaatattgtgagcccaaaacaaaccttaatgacttgaggacatctgtttcctcgtacgtatttctgaaattaagtgaatctgaaggtgaaagcaaagccggaggaagaaataagaatcacagaggtaaaattgtgatggagctcgaagatccaacaatg

SEQ ID NO: 29834 - DNA, 3003 bp, Unknown; identical to SEQ ID NO: 21014
  misc_feature (1)..( 3003): 2750-1469P.txt file - cDNA_ID_3022994; gDNA_ID_2214516; Annot_ID_184447

SEQ ID NO: 29835 - DNA, 3003 bp, Unknown
  misc_feature (1)..( 3003): 2750-1469P.txt file - cDNA_ID_3023015; gDNA_ID_2214517; Annot_ID_184488
attttatatcgtgcatcacaatttgtgattattcattgtattaacgagcccacacataaaagatcttaattatccatctacaccttaaaatctacggaccgtcttacattaatacagctagttcaccttgtgaaatctcggtaataccctcagctgcaaaagatagaagtttcatagaacggtacgtgttcattacccaacccagctttaaattttcttcttacgtgtgtatgactagacacgtaggtcccactcagcaccacgacaacccaataataaacatataaaaacaaaaagaaattaattaattttttttctttcttcatatatataattcgtttcttcttcctttttccccgagatttttttcctctgttcggtcggccattgaattgttgttgattcattggctctaaaacgaaaatgggaattctcaacgacgacgccgttttaatcgaaccgggaaaaatctccggagatcccaccgtcgttaccgtcaattgtcctgatgaatccggtctcggttcaactctgtgtagaatcatcctcgaatttggtctctccattacccgagcaggtcaatattcaattttacttcgtatctgtttaggggaatattctctgtttgtcgtttagcttcacggaatattcttctttatgattcgaaaaattcaattctgtttttcttattttgagggtaattaatatgtttgtaaaaatggtgtttgcagatttttcaacagatggaagatggtgttatatagtgttttgggttactccagatattagctctcctaaaattgattgggacagcttaaagaatcgtcttttatcagcttgtccttcttgcttaggctctttctacttctgccttcaatccaatgtctctaagcctccttccctttatcttctcaagttcttttgccgtgataggaaaggattgcttcatggtatgtgtaaagttattgtcttttgtcttgtgcttggtgttttctttatatggttgattaaaagtttgtgtttttttggtgattcgtagatgttactaaagttttgacagagctagagtttacaatacaaagagtcaaagtcatgacaacaccagatggaagagttttggatatgtttttcatcactgacgcaatgtgagttttcttcttctttctaattctgatgtttcatttgagagaagaaccaacattaacgttgtggtttgtgactttgtgtaacagggatctattgcacacgaaacagagacaaaccaaaacgtgtgaccatctaacggctgtgcttggtgagcatggtgtgagttgtgagcttgaactagctgggcctgagttagagagtgtgcaacgattctcttcacttccacctttggctgctgatgagctgtttggcccagatgggtttgatattagcggctctagctctaacaaagcggttcttaccgttgataatcagttgagccctgcacatacgttgcttcagattcgttgtgttgatcaaaagggacttttctatgatatcctcaggacttccaaagactgcgatgtccacgtacgttaaaactgatctctctaacattaagagaacctaaccttacctctgctaagagaagttgggacttctatggttgaaagatttgtataactcaagtagttcttgtttctttatccagattgcatacggtaggttctcctccaaggttaaaggttataggaatttggagttgtttgttagaggcacagacgggaataaaataatggacccaaaacatcaagccaacttctgtgctcgacttaaggaggaaatggtgtgtcctttgcgagtgattatcgtgaaccgaggaccagatactgagctattagtagccaaccctgtggaactatccggaaaaggaagaccacgagttttctacgatgtcacacttgcgttgaaatcactaggaatctgcatcttctccgtaagtactgtataataatacattgtgttctctaagctttttgaacggttattttcggtttgttttaagattggcattgcgttttcttgtaggctgagattgggagacattcgactttagatcgacaatgggaagtttatagatttcttttggatgagagtcgtgaattcccattggctagcctccgtgcgagaaatcaagtagtagatagagtcacaaagacacttatgggttggtgaagcggatgagagtgagctttcatgaacgttatgctacactcaaggggacaaagaaacaaagtcttcttcgcttgcggcttcgggtcgatgaaaagagtgatgcaagggggttgtgattgctgttgtgtggagctaatagcgttgtaaagctttggaaattgtaaaaggattatataaccgcaattgcaatgaatgcttgtaaactcactttgcaaaggtaacatttccgttgactaggtggtcactacaagagagcgacagagttgacccgagccagaatcgcaaacatgttacatttagccatgtagtggcctttgggggataatatggtaattagacaaattgtatcgaaatatatttagagtgttgccatcaaagatctctgtgtttttgaattctttttaatcatatactgaaatttgttttagttgtcatcaatatattcatctactactgtactaatccctttataattgagtttatataacgaagaaaaaggagatatagatgcattgacaagtccataattatgtttagttgtttaccattggatctgaaatagattcgaaaaattaaacggttaagaaaaaggaaacgcgttaattaaaaataaaaaaacgaagcggtagggttaatttcgtcgtttcgttatccgttgtcgctcgctcgtgcttcatcggcggctagtaatccagtgcagcagaggtcctcctatcttaacgaaagctgtgattctccttcgtctttcaatatcattcttaggtttttgaaattcatgtgtcgtaagaaccgaggaagatg

SEQ ID NO: 29836 - DNA, 3000 bp, Unknown; identical to SEQ ID NO: 11806
  misc_feature (1)..( 3000): 2750-1469P.txt file - cDNA_ID_3023019; gDNA_ID_2214517; Annot_ID_184483

SEQ ID NO: 29837 - DNA, 3000 bp, Unknown; identical to SEQ ID NO: 11807
  misc_feature (1)..( 3000): 2750-1469P.txt file - cDNA_ID_3023022; gDNA_ID_2214517; Annot_ID_184482

SEQ ID NO: 29838 - DNA, 3000 bp, Unknown; identical to SEQ ID NO: 11809
  misc_feature (1)..( 3000): 2750-1469P.txt file - cDNA_ID_3023025; gDNA_ID_2214517; Annot_ID_184479

SEQ ID NO: 29839 - DNA, 3000 bp, Unknown; identical to SEQ ID NO: 11794
  misc_feature (1)..( 3000): 2750-1469P.txt file - cDNA_ID_3023029; gDNA_ID_2214517; Annot_ID_184475

SEQ ID NO: 29840 - DNA, 3003 bp, Unknown
  misc_feature (1)..( 3003): 2750-1469P.txt file - cDNA_ID_3023037; gDNA_ID_2214517; Annot_ID_184472
gttatttcgatattaacaaagcttatttcgattatacccaaatggaaaatcattcctagtcaagatatcatcgagatttcatataaagagccagaaattagaaaacaggtatgtttctatataacatttagtaatcaaaaatgattagtttatcaaaaatctgtgtaagaaactgatcaatatgcttgatttaatttttgtacattttgctatatacgactaattaaggttagagaaaatcctttatgctcgaaaggacgaccacgcttgaaaactgcgtatgagctcttaaggatcagcaacgacttggagaagagacttcaagaggtaaattataagtgattacatatatatatatatatccaagatttccataaatgcatatgatattcagattggactcaaatagtggtaattaagattctaacgttagattttttttgtctctgtaaaatataaatcatccgatcgagaactaatgcacataatgatgataataggtttcattgccgtttttggtattacacggagatgatgataaagtaacagataaagcagtgagccaagaactgtacaaggttgcgttgagcgctgacaagaccttaaagttgtaccctgggatgtggcacggtttgctcaccggcgagacaccagagaacatcgaaattgtctttgccgacgtcatcagttggttggaaaaaagaagtgattatggaaatgataggtttgagtcagagcttaaacagcgtaatgatcgtttaaatttcaagaaatagtcgtttgacttattttttacacataaaagtgttttaatgaaattctggtgttttgcattttgatgtttaacgttgctattgtgaattgtactatatattttaagaaaacttatactatagtccaataatatttcctaaatagtccaacaaaataaagaaaaagttttcatcatctagtatgattttaaaatgagatttgatataacatagccaataagactccagaggaaactctctgattcggcttggtttggctaatgtttttagacgcaacgatttacttagatctagaaccatcagattaacaacataaaacaactttaagctttcgagaaacggaaaaccacaaagattcttagcaaagaattcatcaatgtaaagaacattgtctaaaatattttggtatagaggtgaaaactcataatcttgggaagcttgtatcgagctagggttttgtttatcgtatcagccttcagtcccctatacaaagttcctggtccatcaaagtatatgtaaggtgtgtcagaccatacatgcctccatcgtgtggacaagactgaagttctgatagctaaattggtcggaagagaggagaggatttgttggaggatcacatcaggaagcgagctgattgagtctatattttcacttgcatctcttgctagtttgacatctctgtagtgatgatgagcgtagcagtcaccggcggtggcaccgtctccgtttccgccgtcgtctgcctctgccattacgttatcaaccaccgattgtaaacctagatatttgtttgcaatgacatagctttttgagtttttgggtttatcacaaagcccagctatatatatccaaaatattttaaaaagcccattactaaacacgcacaacttttttcttgtccggaactcaaaatatgtatgtacttaacaacttaatctgtgaaaaaaaaaaaaaaaaaatgtactaccaacttagtcatgttgatgtgatcatcttcttcttggattgatattactagttgcagaaagtgacaatttgatctattagaaaataattgcttatactacacatttgttttctttcgtaacagattggtgggatctttaagaatgtatcgtcatgattctgattttatagaagaacaactttatttaagatgtgcttacatattctgcgaaaaaaccggcatgttgaatggttttagtctctctgaaccgacaacaagttttgtaatttttaattttatcttacagtcgtcacttgaatcttgatcgccaatttttacatacttgagaagaaaaatatttaaaaagccaaccgatttattcgtcaaagcctcaaaggctacagatttttttagccaacgagcaaatgatatgcacacgcggatatgggggatccaaaaattaaaatatttgttggtgtaactttgaagcattgacttaaaaaatagtggttttatcatatgaaattaaacacttaaaaatttttgtggaagttgatacgggatcacaattttacaaaaacaaatagttagtcaacggagtataacttagttttacgtctaatattgttagagttgacattttataacatgttaagtagtagaaattgtagatttgactttctagattcttcatttgatggttcttatgatcgttcgtttataaatttgtactacagaaacgattaatctaacattattttacgatgaagaactaaaatttgaacatatagtgtcactaggaaaaaagattgattttcaccttaacatctccaaacgtagtaagtagatgtgagtttgatttgctaaatcctaaatgaaaaaaaactaacaaaacacagtcaaacgtgaaagaatttttgagggggtgtttctgataaatttacgacttaaggtactagtttaatgttattttgaaagtttagggggtggttttgaaacgtcgccaaacttgaattgccacttgtcagggaatattttatcattttaaaaagaagtaacaaaaaaaacgtgttgccgtgtagaggggtgcgaggagaatctgttaaatcgtcgctatcaaacaagaaacggtgtcgcattatcgtatagtcctcttcctcaaaatcctacccaatataaacagagccgtacaacaaaaaactcgatatcttatcaaaaactcgctctccatccaacaaaacccgaagaaagagagattcagactcaaatctctcagtaggaatg

SEQ ID NO: 29841 - DNA, 3003 bp, Unknown
  misc_feature (1)..( 3003): 2750-1469P.txt file - cDNA_ID_3023047; gDNA_ID_2214517; Annot_ID_184468
tcttaagtaggatatgatgtagatgattgacggttagagtgttactaaattatgtggtgttgaacaattcaaatgttttttttacttggaaatattgaaaccatcattatatataactattaagctattgtttgaccaacaagatcaaagatacgcactacctcagatattatgtattttacacatgaatatatataatgacatgatgacaaggtttgaaaatgaaatctacgcataaatatatatacaaatattttgcagacacgagttcattgaaaaagaaaactgtttcttgcttaccaaagtcaattgtgtatcgatgtaagcaagttctgcaataacgctgaccagcaataagctattctacgtatagcaacgaccacacacttcataaccaaaccttaccaaactaagtgcatagaaaaagttgttatgtttgaaaaatgcaaaggtttggtcacttggatttcggctcatatgctttatctgtgtgacgaatttgaagaatattcatcctacagaaccaaaagaactaaaaggaacattcaaaagaatagagaatgtgtgaaaacaatttggcacaagagattatgcgaaagtcaactcttgccctataagacaagtaatcacaaagtcaaatttctcaaaatttgtctttttctcagaaataaattataaacaactgatgtttacatatgttcaacttcaaatttcaaacacgattacttaacaaaactacgatagtctctgatatattgcggatatatatcgccagcccccacctcttcatcttggtctaacaaatcttagtgaccaacaaagtgattcacacaagaggacatattttggtgtatcaattcttcttcttcttctttttggtcaaaatggtattatcaattcttcaaaatctcagattttttacctaatgattctctattggtgtgtaggtttcatatctgtcaacttatcttgcaaatcaccgcatcactttcgtttcttttaatatgattttttctcgggtcaaacatatgtacgcaattaaaagttttctaagaaagaatcacattgcctagagtttaccactggttgagtaatatgctagagagagtcatgtcgctgcgcgatcgagttgggtttagttgataagcaatgaactgctcaaggcaagatcgagttggagtgaagagtaatgtatagagatcactaccctaacaagctaaccctcaactgagtaatataaaagatgctatgatccaataatataacaatactgtttttctgaatcaatctttcattaagatgagcttttaatatctttaacaaggaaggaaaacaaagcaaaaactcacacgagctcaaattcaaacacaaaaattgatgtgatcaagataaaagcttacaccttaatagcatacttccttattggaaagtacatttctttcttcttctccctctctgtcttcaacgatgcctattcaaatcagccagcaattattccattcagtacaataaaacacaggatttgttcatcacttctcaatatcaatctgaatcacactaaagaatatacaaatacctgatgcttagtgagtctcctcctgatggctctagtcttcttgggacgaagatcaagaggcaaaagcttcttgttcttgtatgcctctctcaaagcagacttttgtttctgtgagatcactgtcaacacctgagcaatcgacttcctcaccaccttgctgaaatcaacataaaacataacccatttgagatcaatgtgattaaaaaccagtgaccgaacaatccaacagtgatataactaagcaagtaagctactttatctatctatagaggataatgataggacctaggatacaaaaattacactaaacaacttgcaaaacataagcagaacttaggtaataatatatgtccataacaacacataaacataattaaacctagctaaatatgattactacataaccctgactaaccactaacaccagcaagatcataaacaaagctatgaagaattcagaatccaaaaaaaaaaagagttaaccaaaatcagaaaaatgtaacatttgatcacacaaagtgtgtatagaggaaacacatacatcttagagagcttattaggagcacctccagtgaccttagcgacacgaaggagagcaagctctgccttaaattccttcaactgacccgaaagatcagcttttgatttctccctcagctcatgaaccttgattctcgctgttcagattccatttcacaatataaaatcaaatctcataacctaaacgtacgaaattgtgtgttaacagaggaaaaagtttgagaatttaggcttacccattgcgtcttcgagctctctctagcgtccctttactcttttgcggtgttgttataagagattagaaaccctagagaaaaatgaagaagaagacggctaagagttaataatcagattttaggttatatttgggctttgactgtgagtataaaacccaacacacatctaatgggctgagttttatatcttatgggccagggattataaaatcctagtagtgaaatcttgtaccaaaatcatttattaatgcaagaaaatactaaaaaagtgaatagagagttgtataattagacacgcgccgattgaactgttattttttgtttttgaaggagaattatttgatttcaaatataataataacataatttagcttttcagaataaatttcttctcttttctttttctttttgacatgtctaattagattgtgaatgaaggagtaatcttagaagaagttttggttaaagacgttatcgtaatcaataatgtgatggaaaagtgtaattatgagtcgcgtaatgaaccaaccatacatttgtcaacaagttgatacaaagacataaatgcatgtttatccatccccaagttcaatattcaaagactaaattatgagcatttcataatgactcagtatgccatttggtcaaatg

SEQ ID NO: 29842 - DNA, 3000 bp, Unknown
  misc_feature (1)..( 3000): 2750-1469P.txt file - cDNA_ID_3023072; gDNA_ID_2214518; Annot_ID_184528
actattaaatcactaggcatagaagaaacaggatactcattgacccttggggttgaggattctctcctcatctttggctcctttgctgaaagattgctctcgacagtagatataggatgatcatttaccttctgaaatgagtcatctcttctcattttggcctcttttgatgaagtttctggatcttgtacatgaaagatctgctcctcacgcaaaaatccttgctcaggtttttgtggatagtggggcaccaggctttcaagaggtgtttcaggattcacagaatacgggatataatgaggttgtggttgaacatgtaaaggagcagacctcttctcatctatatagcctatgcttgccatgtgacctgacgtgtaaatttggtggttaccaagtccggggaactgcaattgttgtcctagataaggctgtgaaaatggctcatttccagtagaaaatcctgttacaggttgagaagtttggctcgctggtaaagattcattacctgctaagggagtaagcgaagccactgctggttctgtagcagcccgatcgatcttcctatcaaaattcccatgaagtagttcatccaaattgttcccgggaggacttaatccaagggaacttctccgtgaacttagatccatcccattgacagcaacaacatactgaacctcagaatcaccctctgcatgttccataacaaactgagcctcctctatatcactgcttgaaaacaagaacatcctgggcttctcagatcctccattaccaaacacgatacattcttccatcatgttttgtaaatcctcgtcagaagatacagagactagggcatcaagatcctctcctggcagctgatattttatggtgcgtgcttcaggaaatatttctttcattttatgcatgagttcttggaaagaaatagtcttgctaatccgtatgatacgcgtttcaccacctacatacctaagtttctgatctctggggcggggtataactttaccaccaaaactacacaagaacttcgcacggttcaaagagctatcagaagctctagaagaaaccaaactatgacgcctttgaccagtatcatttttcgaagagataactggggctgactggaccagttcatgataggtcttatcttcaattctagaagggggtttcctctcgtgctcaaagctctgacgtttttcttctatgttaagcactgtagcgttagggccactctctgacattggatgaaccattcccagagcacttaagttaacagaaacaggcataccactgtgctcaccatacacatttgggatgaactgcggtttcataataaccctatctctcataaactcaaaagcaaattcttcaccggtctgtattgagtagtttagcactggccgagcaggggttgaaacaccataatctggaggtcgtacataagtgttaacattagttgaagagtcgtgggaaaacctttgattaatggagccaagtccctcatctctagggtcaggggcagtataccgaacatgttcataaccttttgcttgatccatgttttctttctcaaggtgtctatctatctagttcataagctccctcacaaacgcttgtaggcgacatatcatgatcatgacccaagtaaaatctttgcataagcatccttcgcaaatttctaacgttttggctgcagaacaggacgacttctatcatgaacaactcaaactctcattgaggtgcctgaaataggagaagagtaactttactcaagtagtcaaacatattcaagaacaaaaaaaccaaaatagcatacggctaaaactcagaaaaccatactatttaaggaacattttcggtatacaaaccaataaaactctttactctagcagggacagatcatccagtacaaatatctgactgtgcatactttccaacatgaaactagctaaaatgactactttctagtctcttcaagtttaaactaacaggaatcgctgaaactaaaatcgatcaacttcaccaaactattagcaaacccatcgtaactttgagagagtgtaaatcaacagatcaaaacatagaactaaatccaaaattcaatcaagtccgtgaaacaattccaaacctcaaaaaggaaacaaataagcgtcatttcgaaccaaaaactgagctaaaaacctctacccaaccaaaaaacaaaagccgatcaagccatcaaaaccactgaaactctagaaaatgcaagatctgagtatcattacccgaaattcaggtggaaacacatcggatccagagattttcgataataatgatcaaaattcaaaaacagcatacacctaaaaggaagacgagtaagcaaagaaggagagaagtagagaaaaaggtttataccaggaaaggcggcaccagagactgtgaagcgtcctcggtttgacgatcgatgagtaggagaagaagccaagtccttccttaaaatctctcttctaattttgacaattcgaaaaacaaaactatattctcgagaaaaaaactattatgcctaccaataaaataattgttatctacttacattatttaaaattctgaaaagcaaataaaatatcatataaaacataagaagctttcgtcatctccatagttagtcttttgtaatattaccactctgatccaataaagttttatttcttactaattagtttacacttgagaattttggtttctactaaattttttaaaatttggagttaaaatagtttagttttatttttgggggaaataaaaagagaagctttattccaattttccaaatattccaggtgtaatctaactgtcaaggccataataataaatacataattccacctgacgccaataataaattacatattttccttttttttttatttttttttctaatttatttccaaaattagccgcaaaatcacaaaacctaacagagctcaacactacacactgtttcaaaatcagactactatg

SEQ ID NO: 29843 - DNA, 3003 bp, Unknown
  misc_feature (1)..( 3003): 2750-1469P.txt file - cDNA_ID_3023080; gDNA_ID_2214518; Annot_ID_184521
aatgaagattgttgaatcttgttatatgggtcctttttgtaaagaatcaaaattttgaggcgtttatttaaggatttgaaagatttatgcaaaaagtttaaaattacgtaagttaaaaactaaaaaagagattattgctttcattgagagttgaactcaagacctcccgcttactaaacgggtgctctaaccaactgagctatgaaagcttttgcttacctgtcctgtttttaaataaatatcctttcaaacatatgaatacaagtaccatctctctgctcagtgttcgtcctcctctgatccttcaagttcaatttgttttttctgaccctaaacgctaatattcccttgagttttgacctatatttggaccaatgacgtggattagttcattctttagagttcatcgtcaacgtactggtaagtctttgtcttcttatgtttctgaatgctgtgatgctgttgctatcttaatgccacttgcgttgtacattttgatcaatgtaactaatttagtaacagatttgagataactggatgaagtcaatttaggttgcagaggatttcgaaactggttgatttgaactctaaatgacgagaatggagcctgagagaacaattttgcaacatagtttggattcagtgtacttaactctatttcatgttttgataaagagtccttgtgaaaaagacttttcttatatatacaaactttactttttgcagattacagagaatacagaacgaagcagttcatgaagaaagcagaataacactagggtggaaggaagagaccttttcagaggttacatttcttctctgttttccatagttgttatgttcttggcacaatttgctgatgagccatatcgaatgttgcatgaagaccaagcaggaaatagtatagtaacatggctaaagtgcaaacaccaaaccttacaaaagccattgctcccaaagatcccatgagaaagatgtttgttgctattgataagcacgggagccatggcactaacggtacgccccacactttcggtgttcgttgctgaggaacaaagaatacgatccccaaagttcccaagaaccagaaaggaactgttactgtgtaaccgatccatgatcccttgcgctgcattccccaatacgccgaagtacccattgaagaaacaacgacgaataagagacaagtgatgagcttaatgagatgaactcttggagtatcttgtctcacgtagtatctcctcacgagtagtgcgataggcatcattgtgaagatgaagagagtacttatcgataagaggcttgccaaaacatctaaaccagaaaagaaagcaatgagagcacttggaattgctactaggaggttagcgtttatcggtgttcctgttttgggatggacaagggcaaatataggcggaatcatgtgggtccgtgcgatgtgagtaacgtatctcgcttgtcccaatgctcctactaaaagaactgtggtcatccctttgagagcaccaagtgccaccaagtactttccccatttcattccaacgctctgaaacgctactgagtaagctgcatttggatctatatctgtatacttctgcatcatactcaaggataatgccatcaagcagtatatcactgttattatcgacattgaaccgagtaacccgattggtatgtctcttgatggattcttggtttcttcagccattgttgctatgctatcaaatcctccatatgcaaagtacacaactgcagctgctcggaacactccctcaggtccaaaaggcaagaatggagtcaaatttgatgtgtcggcgtggataaaaccagcgattataacaaaaaatatcactaaagtgttgatagcagaagctatccagttgagcaatgaagtctttcttgtgctgatcgatgcaattgtagctgaagcggctataacaacaacagctattgggtccaagagattaaaaccggaactgagatctgttttgatccgtagagcgttcgggctacgattcagaagagttgcaaaatatgaagtccaggctctagcaacagctgcagttccaacaatactctcaagaagtatattccctgcagtgatgaacgccgcaaaatccccaagctcaatccgtagataggcgaaagaaccaccagccacagggatttccacagcgaattccgtgtagcagaagacagagagcatagcagaaagacctgaaacaacataagacaagacaatagctggtcctgcttgctcatgagcttcttgacctgtcaagacaaagattccagctccaatcaccgacccgaatccaaaccatactaaatcccaccatgtcaaacaccgtttcatctcgtgctcactctgtttcttgagctcaaaccgctcgttctcatcatcagacctactaaccaacctgttcttgaacctggaacatgtctgagacagagcagctctgtaactaccaaagctctggaaagattcctcaggaaagaaatctctcttgctccatctccagtatcctctctcttcaccttccattctctctgcttcaaagatttgttaatgaagaagagctaaagagacaccatctaattttgttccattgtttgactagtagaagtttcagacagtttttttgtatttttgcagcttccctgactttcctcaactttgtgtactgtccattcataaacctccccacttgttagatttgctacgtcaccttcataactctcattgtctttattggcgtcttcttaccgtttcgtttagtacttcaaccatgaaaattcatgatgataacatacataattcagtgcttttttactcttagggggctgtaaaatgataaattgtcatattagtccttcagatttttaaaagatgtacatttaatcctcttttctcaattcgtcataaattaacttcagtttatactcagggttttagattttcccgtgagatcgaatttgatcagtgagagaggaggagatatg

SEQ ID NO: 29844 - DNA, 3000 bp, Unknown
  misc_feature (1)..( 3000): 2750-1469P.txt file - cDNA_ID_3023108; gDNA_ID_2214518; Annot_ID_133994
aactcatatacatctttcgcacgttttcggttgagagctttccattttcctgtaccaccacacatatcacctatatcataacaaaatccaattaaaccaaatgggtatcagtagtaagctcatgaggcattttgcatcatatcaaatggaaacagagaatcattacgaacttttcacataggaaggtgtctacgaaaactattatcaagagttccatatgtttgttgttaaaagtcacaatcaggtcttatatctttcaatcttaagctataagaccctacagattctaaagaaacacaaggcaaatatactatacaatatacgtttaaggatatgtttctatatcagagttccagataagaaactaaaacaaaagaacttgtcactcacaaagaacagcaccactgccctggcagttacgacatgaacctcctggtttcttgtctaaagcggctgcgctttgtacagagacaaaggtataagaattgctaattaaagctgcagatgcgcacacacatgccgtcatccactgtctccgtgacactgatttctgatctccctgcagccaagaacacaagccacataagttgacagcagaaattaagactaagaactaatgaaagcagttgcatagatagctatacactgagaactacaactagatcattgaagagtaacaaagacatactagtgttgatgtaccaatttttgtagcagaagaactaaagactaagactttaaaaaatttcttagcatagctacttaactagagaacataaccaatcaactagctgatttcaaggtaaactattagtagtcaaaacgatcaattagaaaccttttgcagctgatacaaatgcttggaataagaaaaaagatacggactttaacacacagaaccaacaagaatgtaaggcatcttgtattattaacctgggctttgtgggtagtctctgaggaagaatccgaatcgttggagtcgaagctctgattctccgggcatgatttcgcaagaacacgaactcgattccggtttggtgcagctaacagaaacgatgcgggtaagaaagaggataatataaacaatgtcggaaaggaacagatagagagatagagatgttacatagaaacggagaagcaggcgaagggagtgcgaagagatgagatgatgatgccgccatttttttcagtctgcggtcataattttactggcgaaccagaggacccgaaccatctataggatgtttctgatatttacgttttggtacacatagtttgattagtttattagattggtacattttctcttcaatttcaatttttgatccattataacttgacctctaaatgtagtagagtaagtcttaaaaggccgctagcctgttaggcctgctccaagacggccccgaaaagacttaaaaagggttaggctttgactttgattatgactttttcatgatgaattattctctcacatttttaatacaaagaacatgtgcttgttcaggttagtggtgttttattagtcttctgacttgtggtgatctttgtacgattcaaattttatgatatatgaaattagtttaatcaatgaatgtatatttgataaacaaatatatagtatgcaggaggtcttgagttcaactctcaatgaaagcaatttctcttcttttttttctaacattaaattcaaaaaagataaacaaatctatacaactgaggaataaatggtctcgagatctagtaaagtcaatgtgcatggaactgtcggttgctttaattttcttgatcaagatgtagtcatgtttttgtttttaagaagacgtagtaatgttatgaagtcaacatagtttatagccaattatttttattactatatacaaaaaggtctactctttataactctattcgaaatttttctaattataactagcaaattatcgaactatctaaaaatcatttacaaatattacaaccaaaaacaatagattttgttttgcttatcattcattatactaatattttccgtaaatttttgttgtactataatatgttggtcaagaggtagtcaagttttggccataaagtaaaagccacgtagagacttttgccgacatgtgcagcagagagttcgtcggtacgcacaggtgccggagctccctcgttccaatcaccgcgtcccttataatacttgttgcaatttcattcgttacttgtgtctaaaaatctcaataaagtaatcatttaattcaactttatagctcttctcttgtctcgtgtctcgtgttcccttcgctcgctttcaccgtcaagaccactctctttactttcctcctttgtacgtaagtcgttctaaccttttccacttagaattgagatcgaatctttcttactatagaagagagattcttggtcaagtccagattatacaacatttttgctttctacagttttcttctgtttcctcatgtacaggctgaactttggcctttttgttgttgtgaaattctgtgtcggtgtgaattctgcattttcatttttatttgaaagacctacatgttcccacccaaactggagttactgaggtttttgcaggtgcgagttttctaaatatttcgagttgttaatctcttacagctgaaactggactacgccgtgtactttcagaatcaaaatgctgaatttaggcagagctagaaccgggaggcaaaacagatctatgtcttttgaaggtacacacaggaatatcttttagacttttatgataaaacctgatttttctactgtttttttttatttgtctgaaatattttgcttacttgtttagaagtggttggtaagttgatagagattttagattttctgggggcttattagttagctccaaagtcataagcttttcttgtgtttcttatttggattcaaaatttcacacatgttgatgatttttggagtgtaggattggattttgcagacccaaagaagaacaacaattacatg

SEQ ID NO: 29845 - DNA, 3000 bp, Unknown
  misc_feature (1)..( 3000): 2750-1469P.txt file - cDNA_ID_3023108; gDNA_ID_2214518; Annot_ID_184506
gtcctcaccaagcttttaattcgtgaacccaataatctcaaatgtgaagttgtagtaaaaaggacctatacctaccttctcatgaatcaggaagaagccgaccattgtacatcttttcgagtagctcacgagcaccaggccttctaagaaggcctttgttgtttggtaaacctgtacctaaacagaccggacaaacaagcttacctcgacctgtttgcaatagaagccaccaactaatcaggaaatttcaagtgttacgaaaccaaacaagactaaagagatatcgggaaggaaacaaaccgtaacagtttggacattccgtaaactcatatacatctttcgcacgttttcggttgagagctttccattttcctgtaccaccacacatatcacctatatcataacaaaatccaattaaaccaaatgggtatcagtagtaagctcatgaggcattttgcatcatatcaaatggaaacagagaatcattacgaacttttcacataggaaggtgtctacgaaaactattatcaagagttccatatgtttgttgttaaaagtcacaatcaggtcttatatctttcaatcttaagctataagaccctacagattctaaagaaacacaaggcaaatatactatacaatatacgtttaaggatatgtttctatatcagagttccagataagaaactaaaacaaaagaacttgtcactcacaaagaacagcaccactgccctggcagttacgacatgaacctcctggtttcttgtctaaagcggctgcgctttgtacagagacaaaggtataagaattgctaattaaagctgcagatgcgcacacacatgccgtcatccactgtctccgtgacactgatttctgatctccctgcagccaagaacacaagccacataagttgacagcagaaattaagactaagaactaatgaaagcagttgcatagatagctatacactgagaactacaactagatcattgaagagtaacaaagacatactagtgttgatgtaccaatttttgtagcagaagaactaaagactaagactttaaaaaatttcttagcatagctacttaactagagaacataaccaatcaactagctgatttcaaggtaaactattagtagtcaaaacgatcaattagaaaccttttgcagctgatacaaatgcttggaataagaaaaaagatacggactttaacacacagaaccaacaagaatgtaaggcatcttgtattattaacctgggctttgtgggtagtctctgaggaagaatccgaatcgttggagtcgaagctctgattctccgggcatgatttcgcaagaacacgaactcgattccggtttggtgcagctaacagaaacgatgcgggtaagaaagaggataatataaacaatgtcggaaaggaacagatagagagatagagatgttacatagaaacggagaagcaggcgaagggagtgcgaagagatgagatgatgatgccgccatttttttcagtctgcggtcataattttactggcgaaccagaggacccgaaccatctataggatgtttctgatatttacgttttggtacacatagtttgattagtttattagattggtacattttctcttcaatttcaatttttgatccattataacttgacctctaaatgtagtagagtaagtcttaaaaggccgctagcctgttaggcctgctccaagacggccccgaaaagacttaaaaagggttaggctttgactttgattatgactttttcatgatgaattattctctcacatttttaatacaaagaacatgtgcttgttcaggttagtggtgttttattagtcttctgacttgtggtgatctttgtacgattcaaattttatgatatatgaaattagtttaatcaatgaatgtatatttgataaacaaatatatagtatgcaggaggtcttgagttcaactctcaatgaaagcaatttctcttcttttttttctaacattaaattcaaaaaagataaacaaatctatacaactgaggaataaatggtctcgagatctagtaaagtcaatgtgcatggaactgtcggttgctttaattttcttgatcaagatgtagtcatgtttttgtttttaagaagacgtagtaatgttatgaagtcaacatagtttatagccaattatttttattactatatacaaaaaggtctactctttataactctattcgaaatttttctaattataactagcaaattatcgaactatctaaaaatcatttacaaatattacaaccaaaaacaatagattttgttttgcttatcattcattatactaatattttccgtaaatttttgttgtactataatatgttggtcaagaggtagtcaagttttggccataaagtaaaagccacgtagagacttttgccgacatgtgcagcagagagttcgtcggtacgcacaggtgccggagctccctcgttccaatcaccgcgtcccttataatacttgttgcaatttcattcgttacttgtgtctaaaaatctcaataaagtaatcatttaattcaactttatagctcttctcttgtctcgtgtctcgtgttcccttcgctcgctttcaccgtcaagaccactctctttactttcctcctttgtacgtaagtcgttctaaccttttccacttagaattgagatcgaatctttcttactatagaagagagattcttggtcaagtccagattatacaacatttttgctttctacagttttcttctgtttcctcatgtacaggctgaactttggcctttttgttgttgtgaaattctgtgtcggtgtgaattctgcattttcatttttatttgaaagacctacatgttcccacccaaactggagttactgaggtttttgcaggtgcgagttttctaaatatttcgagttgttaatctcttacagctgaaactggactacgccgtgtactttcagaatcaaaatg

SEQ ID NO: 29846 - DNA, 3003 bp, Unknown
  misc_feature (1)..( 3003): 2750-1469P.txt file - cDNA_ID_3023118; gDNA_ID_2214518; Annot_ID_184502
acacttttcaagttttcatcattttgtactgattttcttctaccttcgaaagaaagtaaaatgggcttcaaagtgattaattaattggctcttttcatttagcatattccagctcgttttagtgttttacttaggtgggttagtaaacttggcggcaaagtcaaagaatgaagcacgtggaaccactaaaccagctttacccgccaaagtcgccgtcttttaccaagtccaccagagaatagaagaaataaatttttcataattatctttgttaagtaaattatgaaaaatgaaggattaggaaatcgagagaggctattggttaaaaaatgtaaggcctaggcccaaaccaaaagaatcgagagtatgcagttattgagtgagatgagtaacggcaagctgagtaaatatgtgctaattattcaattattatgtctaattaattattcgcattaattctaaaaatagctgccaaataactttaaagtgacggttactcttaaatttgtagctcaattctcagtttctcatatatcgataataacttacaattaaaaaaaaaaaacttacaatctaaatatgttatgaatatatatattataaataacatatatgttaacataagaatatttcttaattgatttttcttatctctaatttttactcagctaattatgcacgttcttatacaatacacacttcttcctactaaaaaaaaatatatttgattatgtttatgttggcgaggaaactgattaataagaaatatttatttaagctagatattttattaaaataaataaattatgtcctaataattcggaggtggttaccaaaaaaagatgtaaaacccgaagtaactcctcctttatcttcgctaaaaccctaacctctctcagtccgactctttctctctcatatataacgcgtaagagacagttaactagtaaatcaacttacaacgttgaagtctacttgaaacaaaaaagacacaacattatcgtctaaaatcaatctacaggtctttcattgattctctcatatatcctctcctgtctttacttttttttttcttaacttgttttatacgtctatctatatatgtaagctcgttactagtaattaaagcttagttaagcttaataataatgtattaaaatagtctgtaactcctctcctgattgcttcaccttcttctttactacaggtttcagctcctcaatgtccatggattgcttaagctacttctttaactacgatcctcctgtccagctccaggattgctttattcccgagatggatatgattatccctgaaaccgatagtttcttcttccaatctcaaccgcaactggagtttcatcagccattgtttcaagaagaagctccttcacagacccactttgaccctttctgcgaccagtttctttctccgcaagaaatctttctccctaaccctaaaaacgaaatcttcaacgaaacacacgacctcgatttctttctccccacgccaaaacgccagagacttgttaactccagctacaattgtaacactcaaaaccatttccagagccgtaacccgaatttcttcgaccctttcggcgacactgatttcgttccagaatcttgtaccttccaggagtttcgagttccggatttctctttagctttcaaggtaggccggggagatcaagatgactcaaagaaaccgacgctttcatctcagagcatcgcggctagagggaggagaagaagaattgcagagaagactcacgagctcggaaaactcatccccggtggcaataaacttaacaccgccgagatgttccaagccgccgctaagtatgtcaagtttttgcagagtcaagttgggattctccaactgatgcagaccacaaagaaggtaataaccaaccccaaataagaactttatcatccaattgaaactctaatcgtgttttctcacaagcttcttaatttgtttacgcagggtagctctaatgtgcaaatggaaactcagtatttgcttgaatcgcaagcaatccaggagaagttatcaacagaggaagtgtgtttggtaccgtgtgaaatggttcaagatctaacaactgaagaaaccatttgcagaaccccgaatatttctcgagaaatcaacaagttactgtctaaacatctggctaactagttttagtttcaagcctgaagttctctatgcctaaatttgtgtctgttatcgttgttttgtcttcttagttagtgttttgtcttgttgatttaggggctaattatcctggttaatctcctcttaactgggaactaatacttcatctgtattagtctatgtattagcttttgtctgacattgttcttgttagttaatgtatgtccgcatgttgaagctttcttacatttaaaagagatctttgtgtaaaatcaagcttttatccataagaattttggggctttattattttctgggttttacaaattcaaagcccgaacattttctccgatttacccgatcgataaggggacttgattttccggacttctgatttactatatacattttttttttttacaacttcatataaaaaaatatgttttctgtaaatttgaattatttatggattgaacatcaaaactttagattaaacaacaataacaactttagattaaattttggtttaaattctttaaatctagttaatcacaacttgttgtcaaaacattttcttatgatttgtttcgatcatttgtttgatgatttgttttgatcatttctttcactggcagttaaaatttccatcattttcactattttacacaaaattaataagtatggttcaccaaacagtgcgcatgacctcataaaatattcaatggttacaaataactaaacccatcccaaacattctttatttagcaacaaacccacactatataatagttgtaaattcaatggtaaaaaagtaaaaaaaagctatccaataaaataaaaatg

SEQ ID NO: 29847 - DNA, 3000 bp, Unknown; identical to SEQ ID NO: 11818
  misc_feature (1)..( 3000): 2750-1469P.txt file - cDNA_ID_3023127; gDNA_ID_2214518; Annot_ID_184498

SEQ ID NO: 29848 - DNA, 1771 bp, Unknown; identical to SEQ ID NO: 11817
  misc_feature (1)..( 1771): 2750-1469P.txt file - cDNA_ID_3023131; gDNA_ID_2214518; Annot_ID_133987

SEQ ID NO: 29849 - DNA, 7 bp, Unknown
  misc_feature (1)..( 7): 2750-1469P.txt file - cDNA_ID_3023131; gDNA_ID_2214518; Annot_ID_184497
ccagatg

SEQ ID NO: 29850 - DNA, 3003 bp, Unknown
  misc_feature (1)..( 3003): 2750-1469P.txt file - cDNA_ID_3023131; gDNA_ID_2214504; Annot_ID_184080
aacctggcacagccgttgttttttttgaatatattgacgattcgttggcctccgagatctaaggcatctctcacaatcaacggtccagattccatctagaagatatattacaccgaccttgttttctctatctaattctcacacacacaccaacgcaaacctccaaaacagggccggggcgattcattcacaatctcggcgattctctcttccgtctcgagtcgctgagatccatcaggttcgtttctattcgaatctattctcttgaatccgtatttgtttcctttcctctctagatagatttcatttttctggaaacattgagatttccattgatttgatgtttagtggtttagatcggataatttttgttattgactctcaaaaaacgaatcataactatcttaaaactttgtttacgcattgttattgaaggctaaataaaaaatgctcaattgttgctagaaaggaaggtgtctcgaaaacatgtgaatttattttttgagcctcattgtttctcactgcaacaatagtgaatgattcaattgaaaagaacttttggttaagccatttttctctttaatagattatgtgtctcaactcaattaggaactgtgtgtttttttgtttccttgatgttaacttgtgagttgatttatttgggtagtttacttgtatatatatttggtggtgggtcctggagggaaatgagtgagagggagctctgttcatacattctatgtttttaaatgattagtatttttctttcatctaatacttgctttttgtgctaggaatttcgatttttgggactaatttatcgagtatatataattggataagtgagtttggtattaatattaagagcaattaggttggttatcttgccaaacagtagacccctgtcgttttcttagtcatttaagaagtaatgcttaagattcaggcctctaatctggttatgatagtgaagaggatctgtaaatttacctatacgacctgttgaaaaggacctctggtgtttgttactatgcgtttctgatcaatatagacatagttggatcatattcttctcttgatcgtctgtttcattttttttcaaaatcagtaaaaggtctgcaaaatggttgctcagggattcactgtggatcttaaaaagccccttgtatttcaggtaattactgtttcccagggttttaaatagtttatgtcaacattttccttgagaccatagtcacccaagattgtcttcgtttctttcttagagctaatcaaagtaacgctctctctttaacccctcctgccattgctttggatgttttacaggttggtcatcttggagaagattatgaggaatgggttcaccaacctatcgcgaccaaggaaggccctcggttttttcagagtgacttttgggaggtatatattttattttcatcttttctcattctcaatttccaatatcaataataagcaatgtcaatgagactctgatctccattctctgacgtatttgcaatgaaacagttcttgacacttacagtttggtgggcagttcctgtcatttggttgccagttgtagtctggtgcatatcaaggtcagtaagtatgggatgttcacttccagaaatcgtcccaattgttgtcatgggaatattcatctggacattttttgaatacgttcttcaccggttcgttttccacataaaaacgaagagttactggttagtcactttctccctctctctgtgttacatttcatagagacagtactctcctatgaatcctcctcaaacagacaaattcctggaaacatgacttcggtcagatgctaatgattttgtgaaaccactccaggggaaacactgcacactatcttattcacggatgccatcataagcacccgatggaccaccttcggctcgtctttcctcctactgcaacagcgattttatgctttccggtatttatctacattaacccaccattctacatgttttcagcgccaaccctaaaccgttttcttttcttgtgtcctagttctggaacattgcgaaggctatctcaactccttcaaccgcacctgcattgtttggtggaggcatgctcggatatgtgatgtacgatgtcactcattattaccttcaccatgcccaacctactagaccagtgaccaaaaatctcaaggtaaaacaatgtcaagtctcaaaacctgggactttcttttcttttgtatccggattgcataaagagagcttatttgttatgttttttcttatgattctgcagaagtaccatttgaatcatcacttcaggattcaggacaaaggatttggtataacttcgtcgttatgggacatagtctttgggacacttcccaccacaaaagcccccagaaaagagcaatagtagtaaaaggcaaaaactaaaaagatgtttgtaatacatttaatttaatcttaagttattaatcatccttctgaattttgagatgtttaatctgaggtttcatttggatcactgtcttttgtagtttgtaaatcaatacttcacaatcctaatataatatttttctgcgaaagcaataaaaaatctactaacatgaacatctgtgtcttgactttggccatatatatatttcttgaattgacagacattttgcaataaatatccgaagtttaaaaaagacaaccaaatatgggaagagaaactaaaaattaaaaaaaatcgttattgggctgggcctgggtaaagaaataaaatcaacactcactcaccgacccgcccggaaatccaaatcgctcgaggtctaatctgactcctcctcgattccttcttctcaaactgactgcactcttccttctttcttctgctcactgaaaattagggtttagggtttttgattttcgttctctattagtttctccccctcactctcatggcgatgaattttcaatttatgtgagattttattccacaatcggaataattttcctggcaatg

SEQ ID NO: 29851 - DNA, 3000 bp, Unknown; identical to SEQ ID NO: 11838
  misc_feature (1)..( 3000): 2750-1469P.txt file - cDNA_ID_3023149; gDNA_ID_2214519; Annot_ID_184562

SEQ ID NO: 29852 - DNA, 3000 bp, Unknown; identical to SEQ ID NO: 11839
  misc_feature (1)..( 3000): 2750-1469P.txt file - cDNA_ID_3023156; gDNA_ID_2214519; Annot_ID_184559

SEQ ID NO: 29853 - DNA, 3003 bp, Unknown
  misc_feature (1)..( 3003): 2750-1469P.txt file - cDNA_ID_3023170; gDNA_ID_2214519; Annot_ID_184548
aacaaaaagaccccacaaagtgaatattcccccaaaacccaaatcacaccctcaggattcagattcttccattaaaagcaacaaaatcgaaaacgttacacaaaatctggtttcgacattcacatatcaacaccattgttaaaataatctattcgcagcctgaaatatccggtttcataaaaagcaagagaaatcgattccctaatacattaagagaaacgaattcgtattcgactattcgtttacacatcaatggaagagaaagttgtcaccttttattataaaaaaaaaacagaaaaaagttgtcaccttttccagaagaaagaaacgaaacccgtgaatgaatgagtcgacgggtttatacttggaagaattatccgggagattttaaaggagaggcctttaagcgttaaagaggtagctctggtgactgctattcgtttgtctctttgctgttttatggcgatttatatatcatcatcatgtgttccttctggaaaacacaaatcaccatctgaacgaaataaagagttaaaagagttttctactccaatattccttcaaactacaaataaatattttatatctttttttccgtggtcttatttttattagagttttatttctttagcattattgtcgctaaagagtagtggatttggtatcatcgattttagtcctattctgtttgttttgaaattgtttttctttatgtcacgtcgccggaaatttgttggccataatttagtaggatatattgggtgcatgtctaccaaaataatgagataaataataattgatggaataattagaaattaattatattttatatcttttattggaaacttttctcattattctttttttatttattttatatttcattgtaaatggtaaaatttgtgaggaatctattattttaccatataataatgagataaatggataataattgatggaataattagaaataattaatattagtatatctttttgggctaagctaatgcaagactggtcaattggagatgaacccaaaagtcatggtacattctatatgggcctcaaaagtccatgtgacataataattcaaggcccaataggcgtcttcttgttatatatttttttttgtttctcaataagacaagaattgtcttcacgcttccgcgaatcgttaagcttcacaatttcaagcgaagaggatcaaaaaatcaatttttttggagaagaaccagaaatcacaaaaccctagagggctctcttcaaatcaaccattaaaaccgccaattccgttatgacaaagaagagaaagctcgaatctgaatccaacgaaacgtcagagccgacggagaagcagcagcagcaatgtgaaaaagaggatccggaaatcagaaatgttgataatcaaagagacgacgacgaacaagtagtagagcaagacacactaaaggagatgcacgaagaggaagctaaaggtgaagataacatagaagcggagacgtcgtccggatctgggaatcaaggaaatgaggatgatgacgaagaagaacctattgaggatctattggaaccgttttcaaaggatcaacttttgattcttctcaaggaagctgcagagagacatcgcgatgtagctaatcgaatccggattgtggcggatgaagatcttgttcatcgtaagatcttcgttcacgggcttggatgggatactaaagctgattcacttatcgacgcttttaaacagtacggagagattgaagattgcaaatgtgtggttgataaggtatctgggcaatctaaaggttatggctttatcctctttaagtcaaggtctggtgctcgtaacgctcttaagcagcctcagaagaagattggaactcgtatgactgcgtgccagctggcgtctataggacctgttcaggggaaccctgttgtggctcctgctcagcatttcaatcctgagaatgttcagaggaagatttatgtcagtaacgttagtgcagacattgatccgcagaagttgctggagtttttctcaaggtttggggagatagaagaaggtcctttggggcttgataaagctactgggagacctaaaggtttcgctttgtttgtctatagatccctagaaagtgccaagaaggcattggaggagccacacaagacttttgaaggccatgtcttgcattgccacaaagcaaatgatgggccaaaacaggttaagcaacatcaacataaccataactctcacaatcaaaattcccgttaccaaaggaacgacaacaatggttatggtgcccctggaggccatggacatttcatagctggtaataaccaagctgtgcaggcgtttaatccggccattggccaggccctcacagctttgctggcatctcagggtgctgggttgggtttaaaccaagcatttgggcaggctttgttggggacattagggacagctagcccaggagctgtaggtggaatgccaagtggctatggtactcaagcaaatatctcacctggggtctatcctgggtacggtgctcaagccgggtaccagggcggttatcagactcagcaacctggtcagggcggtgcgggaagagggcagcatggtgctgggtatggtggtccttacatgggtcgttagattagccactcaggtaattattttcagcttcttttcatctatttcattgatgttctgtatcagaagactttttttgtagttcgcttggttcccttgtgtatttcaagacatggacttgctgtattttgaccttttcatggttactccattatgttaaactttttgcgttgcaagatcattttgttttcaaagttcctgtgactttgttgtgtttctgaagggtgttaggttttgcatcagtttataaaagtcttctcttaatttcttaattcattgtgcagatattccaatacagtactttttaaaattggcctggtgaatcttctgaagttattaaggagctgatgcaaatg

SEQ ID NO: 29854 - DNA, 3003 bp, Unknown
  misc_feature (1)..( 3003): 2750-1469P.txt file - cDNA_ID_3023182; gDNA_ID_2214519; Annot_ID_184544
cggctttaccgtcggtaagaaggcagttacgtttccgtttagctcctccgccgatgatttctggatcagaagcaccggagacggtagaggagagtgtgttagtggaagaagggtgagaaacagcggaggaatcgaagaaagcagaggaaggagtgagagtatgaggggctgtgacggtggtatggagagctcttgcgagcaaatcgttgtcgtgagagaaggtatcagaaagcaaccatgaatcaacgttgaaaccttggcgatataaccaagaatcaacgcttgctaatccctccgaagtcaccataaccggtgaagaagatggtcgctgggtttctgaaaggagaagaagaagaagttagagaaagaaagagagaggtgagaaatgaaaaatggggccgaggaagtttatataaggacggcgagaagcgatggaaaccgcgttgagcggagattgaaagggacacgtgtcacagcttactcgtacggaacttttattcagctaacgagtgagagattatcataaaacaaattagattattgaattatgtcacagattttttttttttttgttaaagatgaattatgtcagacttatacaaaatcgaatggataacatgtggatagtatgtatgtactctgtaacaagcgaaagaaatttttttttattgcgtatatccaatattcagacaatctcctttgcaatattgattgatccaataagaatatcttcaacttttagatacatcctttctacgcggtgagacatgcaaattagccccaaaaagaaaaagaaaaatgaggaaggtcaatatccaacggctgatgtttacttacttaaacgcttgttgctctcagtgggaccaaaagagttagagaaatagaatcggtcgttttcagcttcggtctttcttttgtaccctcctatatctttctgtatatcatactcatagtggctttaacaaatattttaaacaatatatgaaggtgatttgcgtattctattttttttttcatttagataagacgcttactctaagttttacatggtgttaagtaagtacaagtttgagctataatttttaatacaaaccaaaattaataactatgtttaggagttcaaaacttcaaattatatgcaatgaattggcttatgtgaagggtcaaacaaaacaaatgtcaaaattgattataactttattttaaagacaacaaaaatgcgtttatatgtatattttatccttttatgacaatgatattttcatcctttttatggagaaaagtaaaagaaaattttgaatattgtttatttttgtttgcttgtttaaataacacgaatatatatatatatattcaaaattccaggtaagcccaaaagaactaactgtgttaaatgagtttttttcaacgcgttaatatgattatacagttatagagtgaagatgaacgccattcaaagtaatcataaagactgttgaaatagttttttttacaagttgtttcaccactctcaactgcatacaagaaaaatgttttcaataaaatggatttctagtttaatcgacaagtaaaactagataaatgtagtgcacacaatagttttctatatattacaatgatttaattatttttcttatgaagatgatattttaacagtttacgtctttataatgccacgataatagcaaaataagtctgctatggtcgaacgacgcttaagtagcacatcaaaaacatagtttttacaagcccatatatactttcttcaagttgcaaaacatccaactgaataaatgtaccagcataccaaaaaaatgattcttgaatttcacctgtcatataacattttaaaaagttcacaacgcatacatgtaccactcgcactcagcacacaagatctaagatgtcaactgttgactcacacggtcacaccgtttattacgattactgatttgtacgagtcgtcgtcgtttacaaaatgcaaaaaaacaataccaattcttatatatatataaaagattcaaaaatataaaagacaggtgaaataattaatcagattggtttccgcgacgtttcttttgcattttagtattttcgtgatatcaactttagcacattaacattatacattgacgagacgactctcatgagcttcacttgttcattctttaaaaagacatatctggtacgtatataagaatttgttggaaatttctataatttgtggtcttaaagactcagattagtcagaaaaaataaataaagaaaatgtctttattcttatagaagaagaacaaagtcaaaagccgccaacggtgacgtgagcatttttatacgatgtaatgatgatggtatgatgacgagaccgaacggaagcatgtgatgaaggaagaagcggtcgtgtgtgtgtgtcttcttctttcttcttttcaccgaaagcttttctctcattactttatttccaatacattactgactctgacactcctctcttgtctcccatgtttcttcctactgccttgcttcggctctatagcttcttcatttgatctcttaatccgaaaagtaaaaatacattgttttatcatttagtttacatataattaagtaaagatcacaacttgacgtttgttaacaatccattacttcaaactttccacaatagtcttgtaaatttatccccacatgatgtctgttaacaatccattatttcaaactttccacaataatcttataaaccaagatagagccaaactttagcttccatttttatttcttcggtttatgatctctacttgaccagccagttaatatatgggcttgggccttatgggcctaattgcttatcgcagaaattatctagggctcggattccgattctctctgtgactcacatcgacatcgtactggtttgttgattttgattggtaatcggaagtaaattacgacgttgaagctccctcagtctaaaggattcggaggttgacgctgaactaaataatg

SEQ ID NO: 29855 - DNA, 1898 bp, Unknown; identical to SEQ ID NO: 11871
  misc_feature (1)..( 1898): 2750-1469P.txt file - cDNA_ID_3023214; gDNA_ID_2214520; Annot_ID_184591

SEQ ID NO: 29856 - DNA, 3000 bp, Unknown; identical to SEQ ID NO: 11864
  misc_feature (1)..( 3000): 2750-1469P.txt file - cDNA_ID_3023222; gDNA_ID_2214520; Annot_ID_184587

SEQ ID NO: 29857 - DNA, 3000 bp, Unknown; identical to SEQ ID NO: 11868
  misc_feature (1)..( 3000): 2750-1469P.txt file - cDNA_ID_3023226; gDNA_ID_2214520; Annot_ID_184583

SEQ ID NO: 29858 - DNA, 3003 bp, Unknown; identical to SEQ ID NO: 24880
  misc_feature (1)..( 3003): 2750-1469P.txt file - cDNA_ID_3023230; gDNA_ID_2214520; Annot_ID_184580

SEQ ID NO: 29859 - DNA, 3000 bp, Unknown; identical to SEQ ID NO: 11894
  misc_feature (1)..( 3000): 2750-1469P.txt file - cDNA_ID_3023266; gDNA_ID_2214521; Annot_ID_184634

SEQ ID NO: 29860 - DNA, 3000 bp, Unknown; identical to SEQ ID NO: 11896
  misc_feature (1)..( 3000): 2750-1469P.txt file - cDNA_ID_3023273; gDNA_ID_2214521; Annot_ID_184631

SEQ ID NO: 29861 - DNA, 3000 bp, Unknown; identical to SEQ ID NO: 11910
  misc_feature (1)..( 3000): 2750-1469P.txt file - cDNA_ID_3023277; gDNA_ID_2214521; Annot_ID_184629

SEQ ID NO: 29862 - DNA, 3003 bp, Unknown
  misc_feature (1)..( 3003): 2750-1469P.txt file - cDNA_ID_3023281; gDNA_ID_2214521; Annot_ID_184628
aagaaagtatccgtgaattcccatcaacacagtagccaagaagttgaacaaagttatcatgtttaagcctagaaaccatggaaacctacaagcagtgtcaaaatttcccaagttcttaaacacaaaaaaagtgagacatttatgtgaccataacacagtagtaacagaaaaccacacaaaacctgagcaaggaattcattgtcaggctgtttgttagaatccaactttttaatcgctgaaggcagatcattgtttaataccccgtagtatactcttccataagagccttcaccgatgagagaattcgatccaaaatcatcagttgcttctttgagttcactaaaagggataataggtacttcaataggctgcaacttcacaactggaggacccttctgtgcagtttcagaggcttggtggtgccttgcatcatttccttcacaccaaaaccaaaactccaatgaggaaacaggaaacaagtaaagtcttgattttttggatagcaagatccaactttgatacctggaggaaagtgtttggcttggttatgacgacctccataatcagcagttttatgcatatcatcatcctccccacaacacccaaagcaactcattttctttaaagaatcaaaattggagttcaaaatggaaaagagaagagcataaaaacggaaaatcagtcgaaatcgagaagagaggaacgaaatagaaataatctggggaaaaaggttttacctttgggggatccaacaacacggagtgaaacggaatgtgcaaaatgttctggagaattattagagagagtgaagaagaacaaatgacaatcaatgtcttgagcttaattagagagaaattataggtacgagtgattagctctcccaagtttgactggattttcaacgccagcgtgtcgacattaacaccgttggattatttgacaatgacccaaaatccaacgaccagattgccacatcgttttatttcattttgtttttgtcttacatgatataataattacaatcataataattttcttaaatgacgctttctatatggagtattttcctttgtttgttaattagtgccatatcttttagatataaaactattaactatgacttggtaattaatacgtatagtcaaatactaggcatcctacgttacgtttctatgcatttttttatataaaagtgtaagaaccaatactagcttaaaaggaaacgagtagaatttcgtaatgaaaaaagacttcaaatgttaccttttaaattcagtttatgtttccgcgttaccttttgaaatctcgttgctttcgtacgaaaaagacaagaaaatagaaataaattagaaagggtggtttggtgagtaatgggtcgtatatgtgggagtcgttatcgtgcatgtgaacaaaatatggccatgttcgagacgaatcatggtgtcttttaatttggtgactacattattttaacactaatcaatatctttctcgaaccatatgatcatgattagccgtttctatattttctcttttaaatagattatatatgggaattattagccggaactttgccgctgcggttggtaataccttttaatacacttatgatttgtctctttattcggttcctaattcagtatacatattggggcttgagtttgaacggaaggtatatcaatgtcataccaccaataataatcagcatcatgcatggtttttaaaatgtggaataatatatacttttaaggacgataatgagattatataattgaaaggaattagatccattgagattctaaagctaccaagacgaggaacatggaagacgtggcgcattggattcttcgttcgagtttatcatcatatcatgtgactggtctctctttctttgtactcacactaacaaaacaaaatgttaatatcccacgttaaattaaatgattagaggccatcaaaggataaaaacaagaaaccaaatctaatatactattttataataaaaaattaaaagcgggtttatgtaagtgggccaaataaaaagagtgggccaagaaagcccagaccataatgaccacatggagaccgaaaggttgacccaattagaaaacttgttatatctttaggagtcaaagtcaaagcgcgtttacaaacaccgacactttctttgtcaactagcggttaccgcggttgttcactaggcacggaacactcgatttcttcccaagaagtcgcaaccaacacttactatgtatggtacatcacaacatagacaataaaaactcttggaatgttccgcgaaacaggtgattattgactaccatgagtggggaaatgtggggtaagttaacaagtacactgcttcacatgggaaaaagaaaaatgagatacacataattcacaaaatataatttttatcttagacaatttttttaaaataatattaaaatcagtgtagaagtggtccccaccactattttgtttttccttaaaattaattattatttttgctggactaaataaaattggtttttttttttctctctctgtcctaactctttttctttctctgttttgtatctctctctctctctcactctttgtctctcccctaacctttattgtactagcataaccattaccatacatactcttctctatcacgccacaaacgcagattcatcacatcttcttcttgttcatagcatctccatcactattgggctctcttcaaaggtgtatttctggggttacttattccttctttgtattgattagtgttgaaaaggtgtctctgttgcgttcaagagctagctttagggctatatattaagaggtttccagaggttttttttggattataggcatctgtgtttggcttacatggatcctttttttaaggttttctgggcaagactaattgattaggaccaaagtttgtgtttttatttgtttggatctacaaagatcaattaggctgttgttgaattggatcgagtgatg

SEQ ID NO: 29863 - DNA, 3000 bp, Unknown; identical to SEQ ID NO: 11887
  misc_feature (1)..( 3000): 2750-1469P.txt file - cDNA_ID_3023285; gDNA_ID_2214521; Annot_ID_134071

SEQ ID NO: 29864 - DNA, 3000 bp, Unknown; identical to SEQ ID NO: 11887
  misc_feature (1)..( 3000): 2750-1469P.txt file - cDNA_ID_3023285; gDNA_ID_2214521; Annot_ID_184624

SEQ ID NO: 29865 - DNA, 3000 bp, Unknown; identical to SEQ ID NO: 11888
  misc_feature (1)..( 3000): 2750-1469P.txt file - cDNA_ID_3023289; gDNA_ID_2214521; Annot_ID_184623

SEQ ID NO: 29866 - DNA, 3000 bp, Unknown; identical to SEQ ID NO: 11890
  misc_feature (1)..( 3000): 2750-1469P.txt file - cDNA_ID_3023293; gDNA_ID_2214521; Annot_ID_184621

SEQ ID NO: 29867 - DNA, 3000 bp, Unknown; identical to SEQ ID NO: 11891
  misc_feature (1)..( 3000): 2750-1469P.txt file - cDNA_ID_3023297; gDNA_ID_2214521; Annot_ID_184619

SEQ ID NO: 29868 - DNA, 3000 bp, Unknown; identical to SEQ ID NO: 11892
  misc_feature (1)..( 3000): 2750-1469P.txt file - cDNA_ID_3023300; gDNA_ID_2214521; Annot_ID_184617

SEQ ID NO: 29869 - DNA, 3000 bp, Unknown; identical to SEQ ID NO: 11893
  misc_feature (1)..( 3000): 2750-1469P.txt file - cDNA_ID_3023308; gDNA_ID_2214521; Annot_ID_184615

SEQ ID NO: 29870 - DNA, 3000 bp, Unknown; identical to SEQ ID NO: 11878
  misc_feature (1)..( 3000): 2750-1469P.txt file - cDNA_ID_3023312; gDNA_ID_2214521; Annot_ID_184614

SEQ ID NO: 29871 - DNA, 3000 bp, Unknown; identical to SEQ ID NO: 11877
  misc_feature (1)..( 3000): 2750-1469P.txt file - cDNA_ID_3023320; gDNA_ID_2214521; Annot_ID_184611

SEQ ID NO: 29872 - DNA, 3000 bp, Unknown; identical to SEQ ID NO: 11876
  misc_feature (1)..( 3000): 2750-1469P.txt file - cDNA_ID_3023324; gDNA_ID_2214521; Annot_ID_184610

SEQ ID NO: 29873 - DNA, 3003 bp, Unknown
  misc_feature (1)..( 3003): 2750-1469P.txt file - cDNA_ID_3023328; gDNA_ID_2214521; Annot_ID_184609
acgccgtcgttctttctcccgcatctcggttgttttctctctctcccggaataacaatctacagttctaccggtttaaatgtaccggttaagtaaaaaccggaaagataccttgttctcctaaaaaggttgagagaagcgagggattagcgtgtatcgacgagataatcatctagtcgtcggtgtcgccgcctttctccgccgtctgaaatcgtccttgttcgattttccgaagacgaagcaggagaagatatgtctgggaggttgctgaagaaggttctccaggaacatgaagattcgaaacttcagaaacatcacgaagaagaagaagaagaggacgaagaagaatcaggagcccgttcttcgattaatccattcgatctcttgaacgatggtgatgaagatcctgaggtcagtctctcagattttgacgattagattgttcggtagatttagtatctagaattttatcctcctccgtgttctaaaatagctaatgtgttgataagtttgaatgtagatagtttcaatggtttgatcttcagattcttatggttttttattctgatgtctagagctgattcatattttgttggtcgtaggagtaatgattacaaagtgtttctgtaacaattgggtttgattgcaggagattgatgatgagactatagctgagaagaagaacgaagatgcggatcatcagtcaagtgtcgctgatcatgtgcagccggtgtcaaagaataagtcgaagaaaaagaaaaagaagaagaacaaagagagtggctctaatgtgcctaaagctgaaatgactttggatgaaactttggaagcacttggtctcaatgctaactctaagcaagataaggttcaggagacaaaaccaaatgctgattcttccaaaaaggcttcttcacgatttgtgttggaaatagattccaagtatctgaatcttgagaacgagttgaggagaacgtatggttcaaaggctatgcgatcatttgagagtgagagtggctctcaaggtggtagtagctctagacgagggggaaggcgtggagtccatcatatcacaaagacggttctggtatctccaaaagagaattggtctcgatgggatagatctttctcaatggagtttctagagactaaagatggtaacaactacttcaggtaacaatttttacagctttttgttttttcgttgggtgtgtgtatagaaaatacagacattgtaaatttgtacatctgatgaaatacttttcttttgatgtgtagatatacccattcatcctcatatgagcaggctcagagagcatttcaggctgcacaagctatccatgatttgaatggtgtagcaagtgtccttatacacaatccttaccatattgagtcgctcataactatggcggattactttaagtttgtaggtgagaatgatatggctgcagattccattggaaaatgcttgtacggtttggagcgtgcgtggcatcctatgttcactccgttccagggtaactgccggttggagtttaaccacgatgaaaacaagctgttcttcaagacgcttttcactcacatgagaaacatggacaggcgtggctgtcataggtcagcgttggaggtctgcaaactcttgctttccttggacacgagtaatcctgtgggcgctttgttttgtgtggactactttgctttgagagcagaggagtatgcgtggctggagcaattctcggaggagtaccgaaatgataactcattatggctctttccgaatttctcttattcgcttgcaatagcacgagtttatcttgaaaagatggagcctacctcttcctcagaagccactcccagagatacttcgaagcaaagctctttggatctcatgacgcaagctttgaagcttcatccaacagtactcaacaaactagtggaaaaagtacctttaaaagatcaggcatggacaaagatactcaagcattcttacttccgatcagatgaatcaaagatcccgtctttagatcacctcatcaaaatatatgttgagaggaattatcttatatggaggcttccagatgtacagaaattgcttcggagcgctgctgatttagtcattgaatctctggaacaagatggaaccgaagctgagagctggctttgtgtaagattagaagctttctcttctgagaataaccagtaagcgttttgaactctcactcacttgtcaatttctttttttttggctagagctgatcacgtatggttctaacccattgcaggtactctcatttatcaacccatgatttctctgattcgatgccaactctcccaccagacaatttgcagaactttgtggctgatccaagaatggtgggaggagagcaaatggctgaaggtggcgggagaggtcaacaccaagcaccaccaccacgtccacgtgatttggcaaatcggagtccattagctgtgttgattgagtcaatacttccatgggctaattttggagatggagaggatgagattgcacatgatgctcaccaccaaccagacaacaatggctaatcaatggctctaactgaagaaagaagaaaactgctttaaagtttacaaaatgtggccttccttttgttgtacagtgccattttgatggtttagtctatggatcatttgttacttgggtaaatcggacttggtcattttcgattcatgttctggtggaataattgacagctttcattgctcaaaggctcggttaaggtttgagccggttcacgatgtcaggtcaaaatactgccacgtattaaaataaaaaaatgaagagtaattatagaaaataaagctgtctcatcttcctcagttctcagtttgtcaccatcctcgagcagcttttgagctttgaaggtatcgactaaattattattattatttttttctcctagacattgttactctttggggataaattttttatcttgtataagcttatccatcaggttcgaaaatg

SEQ ID NO: 29874 - DNA, 3000 bp, Unknown; identical to SEQ ID NO: 11923
  misc_feature (1)..( 3000): 2750-1469P.txt file - cDNA_ID_3023351; gDNA_ID_2214522; Annot_ID_184662

SEQ ID NO: 29875 - DNA, 3003 bp, Unknown
  misc_feature (1)..( 3003): 2750-1469P.txt file - cDNA_ID_3023355; gDNA_ID_2214522; Annot_ID_134099
ggcgttcactgacagcttcttgttctcctagcggtttcccttgtgctcatcctcacaccttccaaaatattatcaactcggataacaaaacatatatatgtgatcaaccagacaattttttaatatatatttctatagtcaacgatgagtacgcattttaataatccggtgaaagattagtcggactaactaaataatttttttgacatataataaacacttggaccccccaaattgagccttaagaaaagactaaaccagttctattagttgcgtacaactaacgatgatcaacttgagtgatttatatcggagatcgtgggtagtgatacgggtcaacaatataaggatttagagatcaattaggaattgaagttaaaccttttcaattttcttaaagttccctgatccttattcattcatcgtatccacaaccattcttaacattgcccatggctaagacgctggacctcttttggcacgaacatcctttatatgaaaaatatcgtatgttcacttgccaagagtgccataggagtgctatacccttctttgaagttttttatggatgcttcagatgcaatataaaatggcatccctattgcgtgccaaggtcaacgaagaatattaaccacccttgtcacccgaaccatcccctagaggttctcctccaagggccacctagttactctgacgagaagtgcagcctctgtcaacggaaactctccaacttcgtttaccattgtaagttatgcaatttcagcatagatatggaatgcggaaacaggcccccgccccacaaagtggatcatccaaagtgccacgagcatgcactcaccctcatgggaagggaagtatccttcacttgcaatgcttgtggtacgcatggtgaacggaacccttatgtatgcctaccatgctctgtcatgtttcattatgattgtattgatctaccacacgtcatcaacatcaatcgtcatgatcatcgcatttcacattcatatcctctcaaacgtgggaattgggtatgtgaaatctgtcgtcaagatatcaacaccacgtacggaggctattcatgcaacaaatgtccagatttttttgttcattcaaaatgtgcaactagaaaagacgtgtgggatgggaccgaactcgaagggatacctgaggaagtagtagacgttgcgccatttgaagtgatcgaggaaggggtaatttatcatttctcccacgagaaacataacttattccttattgaggatgtttttatagatggtgctgaagacatgcattgtgaagcttgcgcccgtccagtctcttctgagaagcactacaagtgcgtggaatgcaagtttattcttcacgaagagtgtgcgaatcttcctcttacgaaacgacatggactttccacaggtatattttatcttcgcttcgggaaggattttagcgaacaaaatttcagttgtgatgcttgcaatagagatggaaggggttttagctacaaggatgaagagggtgtggtactcgatgtgttgtgtgcgtctctctctttcttcaagcaccccaaacttcatcctcacacgttatttctaaccacaatagatcgtggtacttgcttagcttgcggtgagaataaactcaatgtgctgcgttgtgttgattgtgattattctttggattacaaatgcgccactctaccattagtcataaagcataggtgtgatacacattatttagttttgcgctctggggaggaggcgcctgaaggtaaatattggtgtgaaatctgtgaagccgaaaccaatcctgaaagatggttctatacatgcgatgattgtggggtcgtgtgccatattgaatgcgtaaccggggactttttgaacataaaacctggaataataatgaagaacagggagaataagtttgaagtgggtttcaacgatcacgattctagaccaaaatgcactgattgtggctctcgttgtaggttccctaggtttttcaaggttactagaaaaaatattgagtactactattgctcaaaagcttgttttcagaatgcgaaattctgaatgcctgaaggaaggcgaaaggaaggatttggaaacataaaaagaatatgggtttttacagatggaggctgtgtaatgtttttcaattattttcagataaacttgttttctatatttggatttattgttggtttgctcattcagttcataaaactatttatgagaaagagagaaagagagagagagagactttgaaggtaattattcttcacaccttttattataattcaccaaaattgggatgtttgttctattcttgatcacacgcctctctgtcgcttccttttgacgttttctttcttttcttagctttttcttttatcttttgtgttttctgtcttttcttttccgtagttatttgggattccaaatttttttcattcctaaatttctccacgagctcatcacctcctttcgtctctgcctctcatttgtctacaaacattttttccttttgattcgtctctctggtttattgctcgttgatcgtttgtttctaaattgcattctgatttctgatggatcgtgattttcatcgtcgtggtcaagtggtaagcattacacgcaaacacagctttgatcattaaaaatgtcatcttatttaaatcatgtcttgagatcacgtaatggtcttaggtcaatcaagatcaacgcgcaacaaattctaatgtttttacaaaatttgaaaatacttatctacaaatgtatttataaagaaacctaatttgcctttgtgttgatcatgatagacaattgttgttattagcctgttgatttgaaggcagagtcctctgttttcctgcaacatgttagaacagctcatttatgtgttttggtgaaaacgcaggcgaatgatcgtacacaaagcaactttgttcgattggataaaccgagagctgtagacgatcttgatataggcaagagagggaagatg

SEQ ID NO: 29876 - DNA, 3003 bp, Unknown
  misc_feature (1)..( 3003): 2750-1469P.txt file - cDNA_ID_3023355; gDNA_ID_2214522; Annot_ID_184661
cagtttctagacccatattcatctgttccttgtatagctgccattggattcagtggtacacaagtttggagaaccggtaagaccatatgtactttagattttaagtatttacacgttatagtcaagcaaacgtactcaagtttgttttctatccctttctatctttcagaaggatttatcactgctgaagaccttgcatccagtttagagaaagcgtggttaggacttcatatccaggtacgtgatagctgctttctcacttatggtggtgttcgtccttctatacattttcagttgacttttctcattttcaggaaacaactgcaagtatcttttcagcagcacttgcatcacagaactcagagacacctgtttctagtgcttcgagtgttgtcttgcctcccggaagtgttcctttagatgcagcggttgcatctccatcgacggcttctagtgttcaaccctcagagacaaagtcaacggtaacatctgcatcaacaacagaaaacaatgatggcacagttgcagttaaggttgtccctggagctgaaatcatttccacattactttagtttgttgttttgcttacatgatgcagcctttttttaaaacagggcaaagaatctgctgaacccagtaatttgtgtgatactactaaaaaccagccagcaccctctgttgatggaactaaggccaatgttgaacatgaagcgacagagacccctttgcgtgttcaggcagaaaaggagccaattcgtcctacagccccaggaacaaatgataatacatccagggttcgatcttctgttgatagaaaaaggaaacagggaactgtgataaatgaagaggatagtggtgtaggtgttagtggaagggacattaatctaacaaaatctgtcgatacaaaagagaccatgaagccaaaggatgaaggaggagaggaagaggatggagaaaaatccaaaaaagcatctgacgttcatttaaacattcgattacctgatggtagtagccttcaggagaagttttctgtgacaagtatattgagaatggtcaaggattatgtgaacagtaatcaaacaatcggactgggtgcttatgatcttgcggttccttacccacgtaaggtgtatactgaccaaggtacgtaaaatctacaatgcatccaatagatttttatttttatttggtaaagaacattttaccttaaaaccagcttcatcttgatcgaagatgatgttttctgccatttaggttttttttttttttttttctggtcagtttggactagtgtagtagatacataactccattactcttaatctctgcagatctggataagtctctatccgagttgagattgttcgatagacaagcacttgtagtagttccgcgaaaaagagcaaccgtctatcaaagaggaacatcttactcggagtctaacaacaacacagaccctaatagtggcggttactttgcttatgttagaagagtactgtcttatgcaaacccgttttcatattttggcggtggtactgccaacgcatcaagctctgttccagaacgtcaaacaagtatgcgggaatatgatgagtttataaaatccattctaatgcagaaagtcgtgtaattgctaatctgattctctctttttctatctataggaccaaatacggaggtgagaaacaatctggggcaagtagggacgtcctttcaagatccatcagaaggtaggagcaacgttaggaataggagaccaaccacttctcggattggaagtaacatccatacgttgaatcacaatgaagatgaggctccgtttggtgatggaaacgctttttggaacggaaactccacacagtacggtggtggaagcggtggagacagtaatgatagacgatgaaataagagaagttgaaatctgtgtggatagatacagaaacagctcgggtgtttactttttatacttgactctttatgaaccatttaagagaccagctgcaaaatgtatcctgatgcgtttccgttttttcggttgctcgtattaaatttaaatctaaaaaaactagcaatttctgtttgattaaattcggttctagaaattaattagtgtcgtttgattaacttcggttccaatcataacaaaaatattagagttaaatggttgcttaaatataagaatctgtatattcttttctatgcaagtgaagacttcattgaactgtgaaaaggcgttcactgacagcttcttgttctcctagcggtttcccttgtgctcatcctcacaccttccaaaatattatcaactcggataacaaaacatatatatgtgatcaaccagacaattttttaatatatatttctatagtcaacgatgagtacgcattttaataatccggtgaaagattagtcggactaactaaataatttttttgacatataataaacacttggaccccccaaattgagccttaagaaaagactaaaccagttctattagttgcgtacaactaacgatgatcaacttgagtgatttatatcggagatcgtgggtagtgatacgggtcaacaatataaggatttagagatcaattaggaattgaagttaaaccttttcaattttcttaaagttccctgatccttattcattcatcgtatccacaaccattcttaacattgcccatggctaagacgctggacctcttttggcacgaacatcctttatatgaaaaatatcgtatgttcacttgccaagagtgccataggagtgctatacccttctttgaagttttttatggatgcttcagatgcaatataaaatggcatccctattgcgtgccaaggtcaacgaagaatattaaccacccttgtcacccgaaccatcccctagaggttctcctccaagggccacctagttactctgacgagaagtgcagcctctgtcaacggaaactctccaacttcgtttaccattgtaagttatgcaatttcagcatagatatg

SEQ ID NO: 29877 - DNA, 3003 bp, Unknown
  misc_feature (1)..( 3003): 2750-1469P.txt file - cDNA_ID_3023363; gDNA_ID_2214522; Annot_ID_134093
cttccttgagattgttttagggtgaatctgaacaaagacaaattcgatcattgctgattgctttgttgccgttcctcaattccatgtatctggctcttacgattgtgtaattgaaatgagattatgatgaagaatgattcgtttgtttctttttgttctatctatacatttgtggtgatatatatatatatctttgtttgaaacgttaatagataagctgctcatactagttatacaacagactccatagaaggtgacatttgtttaagatactcttgttcctggaacacatacgaagatgaagaaagtcttcggacaaactgttagagacctgtaagtattttcgtacccgaaatttaatgatattctcaatctgtgtgtggtttatttcttttttcattgacgggatgcttcattttatgttccatttattcagtaagagagaggtcaacaagaaagtgctcaaagttcctggagtagaacagaaggtaatggatgctcttagcttcttctctctttttcttcttatcagaaattcttccgcagcagagatttagatactgttttccatttttatgcttgagtttatcaatttctttatttgtttctaaaaggcttttataaatagagagcttatcttggttgcattcatcgtcttgctaaacaatgtaaagcgagatatccaactttctcttatcttgttttgtctgtgctttctcttattcaggttctagatgctactagtaatgagccatggggtccacatggatcacttcttgctgatcttgcgcaagcttccagaaattagtaactacgaccaccttccaacttgctatattttgctgcgattttggacattgcacaggaattataaaaacatgttacttctatttcagtcatgaatatcagctgatcatggtggtcatatggaaacgccttagcgacaccggaaaaaactggcggcatgtctataaggtaaacaatattattgtcttgctggcttaatttgtgttgaatttctgtagcagtgactaaagtatttcatgctgtttacctcttctctctccccttcaggctttgacagttttggagtacatggtaggccatggatcagaacgtgttatagacgagattagagaacgtgcatatcaaatttcggtaatgactaccttgagtacattattttggaagtattcaacatcaagagaatcctttagtgctatatctcagtagttgactatcttacttgtatatatgtctattttccttgtggcagacattgtccgattttcagtatattgattccggtggtagagatcaaggaagcaatgttaggaagaaatcacagagcctggtggctttggtgaatgacaaggaaagaatagctgaagtcagacagaaggctgctgctaatagagataagtaagtttgcttgtcattgtatctttctggaactggtggatagttttctctctgtgtgagtctcggtggacactcgtttgatttcttgttgctagtggcttacaattgttattatgcttctcggtagtctattaattggtagtactggcactttaactgtattagcttctgaattttgaaagtttttatctcgagaaaaaaaaatgacatgtcttttggttcattcaaaatatgctgaacatatcaacctacattattttacaacaggtatcgcagctcagcaccaggtgggatgtataagccttcaggcggatatggggataaatatgattacggaagccgggatgaagagcgaagtagttatggaagagaaagagaatatggttacagagatgatgatagaaatagtcgtgatggagatcgtcattccagggactctgaagaccggtatgggagagatggtaatagggatgatgattacaggggaaggagcagaagtgttgataactatgggtcacgaggtaggagttcggaaagagagcgggaggatgatggccattcttcatcacggtatgttaaatttcaagtcgcctaaatcctgaaataaaaaaggaaggggaaaattttgaagattatcaactccatttggatagaatatttttattttgaatactagcgtagatgtccttgattttaaaaatcatttcgaaccgcaatcttcttagtctagttccattttcaaattttaaatggatacactcctttttgtcctgtaggggcagtggtgctcgagctgatgataattctcaggatgggaggtaatttctgataaatttctactgaagtttaggcattcttttattgtatgacaactcatctcaccttctttcgggattataatggtagaggggggctccagaggaagttttctgaacaaaatattggcgctccacccagttatgaagaagctgtcagtgattcacgcagccctgtatatagtgaaaggtgatcattttctgctttgaaaattgaaagctaccttggtttttattggtgctgatgaatctttctatgccagggatggtggggagaccccacaagttaccgctccaggagctgcttctcctcctcccccacaagttgctgctccagaggctgcttctcctccaactggaaccaacacagccaatacaactgctacttttgttaatgaatcaccttctcagaaagttgagactttcgatgaatttgatccacgcagtgcgttttcaggtacagaatactcaaactcttgcaattctttagttgtatcttgagatattttcttagtttttcaaactcctcggcagcatagagattacatgaaaatctttaatcaataactataactaattcagtaaatgtttcaaggcttagttggagggtgtatgattgtattctcatgtctgtatggtatatttctatcccattaaactctgcttgttctgagtgtggccgttgtgttcctttacttttccagctggccctccagcatatgcatctacagatggtgttacagctcctccaactgtgacttctatg

SEQ ID NO: 29878 - DNA, 3003 bp, Unknown
  misc_feature (1)..( 3003): 2750-1469P.txt file - cDNA_ID_3023363; gDNA_ID_2214522; Annot_ID_184656
cggtgaagaatggcgactccggcatggagtcatgccaaggctcaatgggtagtcgccatgttggcgttactcgttggctcggctatggctaccgaaccttattactatagctctcctccaccaccgtatgagtataaatctccacctcctccggttaaatctcctccaccgccttatgaatataaatcaccaccacctccggttaagtctcctccaccaccgtattactatcattcaccgccgccgccagtgaaatcccctccccctccttatgtttacagctctcctcctcctccggtgaagtcccctcctcccccatactactaccattcaccgcctcctccggtgaagtctcctcctcctccatactactaccattcaccacctcctccggtgaaatccccaccaccaccatattactaccattcaccacctcctccggtgaaatccccaccaccaccatactactaccattcacctcctcctcctgtgaaatctcctcctcctccatattattaccactccccacctcctccggtgaaatccccaccaccaccatacctttacagctctccaccaccaccggtaaaatctcccccacctcctgtctacatctacgcttctcccccacctcccacacattactaggctcatcaaattcaacaaaatttccccattattcaagtaagtcctatacttatacctttacctcataatccgttttaataattgtgccctaaataaaatcggaatttcttctttcacaggttttcttttaaaaaatgaaataaaggaagggtcaaagtcaaagagaagaagaagtgaaccaaataaggatcgtggcgtggaaatcagaaacaaaacatctctaacaacgatccacatcacttcctcttcttcaatgtcgctcatcttccacttgtgcatcattatctttgcgtcttcgtcaagtcaaattgtttccaagacccttttagatcgtatcatactcctctttgttcccttttgttgttaagtgaaaaaatgggttttggtaatttaattgttgtgcatacattttctattttgttattcttccgttaatgtaatgaaagagttgttagcatataaaacaaagttcagtttcttctttctttggattatgcgatatacagtcataacattttctatcttaaaacatagttccaacgacaaaagtagttccaatgacaaagttaaaagacatattcttttaggttgggcacgacattgtttcgatctgttcgtccagagaaagttatcattgcttcaaaaggtgggaaagtggaagtaacacatcactttgatctcattggatcattaataattgtgtttatgtaatacgtcagagactcactttcattcaactaatttccacctactctttttgtttcaaccttaaaaaaaaaaaatattgagcaatactatatgcttaatacaaaaccattgactaaaattaaagaatgttgaaatgaattaatatcaaagttatagtttatattcttctatttaatcgaaacatggaaccaaacaaaagcaaatgaaaagcagcaagtgctgaagaattggttcgaaataagtggagtggttgtactttgggctttgggatagcattagctgattttgaggcccattggctaaacgtatttggtaatttgcctccaatttttttgtcaccgtcattttgtttgttgtttggcaacgacaccttccaaactttatcgttatgcttaagttgattttgataaattaatttgataatgatgaagtgaaattcaatgaagctaataaacacaattttgataaattaatttgatttcaacagtactgaaatatatagtattaggtctagtagcttccaactccactagacataaagcaattttgtcccaacaaaagttttggaataaagcatattgtatcttctcatttccaaactgtatatgagaatagaaactttataaaactggttagaccaaagtaataattatgttgttctcaattaaacagctgtgatttttcaaatccaaacattatattgatttggagcgccttaataatattctccgtgtttagttgcgctgtcttatttgtattattctttttttttttcactatttcatttttatttatttattttatctgttgaattttctcttctggctgctgttttcctctctctctctctctaaactcgagaatttttgtagagagaggaggcaaagtgcgaaagctaaacgcagatccacgatcaatctcctccaccttcaaaagccttcaaaagtgtttcttcttcgtcttcttccttttattatctgtgccttgacagatccacgatccgattctggtcaaattttacatttctgcaggtacgatcttagctctttttgttctttcatgttcattattctttttctggatctattgtttccatttttaaatttccggttgatttttttatcttgttcgatgtgattctattttgtggagggatgttattagctttaagatctgtgtgagctgcgtttttgaatgtgaatcttcctttttattcgattttgattgttaccgtttgaatttttagtctgcttaggagtcggattttgttgattttgacttcttctttatatcctttaattgttgcaaaattcggaaattttgttacgagctggggattttttccacttccttgagattgttttagggtgaatctgaacaaagacaaattcgatcattgctgattgctttgttgccgttcctcaattccatgtatctggctcttacgattgtgtaattgaaatgagattatgatgaagaatgattcgtttgtttctttttgttctatctatacatttgtggtgatatatatatatatctttgtttgaaacgttaatagataagctgctcatactagttatacaacagactccatagaaggtgacatttgtttaagatactcttgttcctggaacacatacgaagatg

SEQ ID NO: 29879 - DNA, 3000 bp, Unknown; identical to SEQ ID NO: 11918
  misc_feature (1)..( 3000): 2750-1469P.txt file - cDNA_ID_3023371; gDNA_ID_2214522; Annot_ID_184654

SEQ ID NO: 29880 - DNA, 3000 bp, Unknown; identical to SEQ ID NO: 11917
  misc_feature (1)..( 3000): 2750-1469P.txt file - cDNA_ID_3023374; gDNA_ID_2214522; Annot_ID_134089

SEQ ID NO: 29881 - DNA, 3000 bp, Unknown; identical to SEQ ID NO: 11917
  misc_feature (1)..( 3000): 2750-1469P.txt file - cDNA_ID_3023374; gDNA_ID_2214522; Annot_ID_184653

SEQ ID NO: 29882 - DNA, 3000 bp, Unknown; identical to SEQ ID NO: 11913
  misc_feature (1)..( 3000): 2750-1469P.txt file - cDNA_ID_3023382; gDNA_ID_2214522; Annot_ID_184647

SEQ ID NO: 29883 - DNA, 3003 bp, Unknown; identical to SEQ ID NO: 26195
  misc_feature (1)..( 3003): 2750-1469P.txt file - cDNA_ID_3023398; gDNA_ID_2214523; Annot_ID_184687

SEQ ID NO: 29884 - DNA, 3003 bp, Unknown; identical to SEQ ID NO: 25728
  misc_feature (1)..( 3003): 2750-1469P.txt file - cDNA_ID_3023417; gDNA_ID_2214523; Annot_ID_184675

SEQ ID NO: 29885 - DNA, 3003 bp, Unknown
  misc_feature (1)..( 3003): 2750-1469P.txt file - cDNA_ID_3023421; gDNA_ID_2214523; Annot_ID_184674
actgatccaattctctttgatactgcatatgtttctttttaactgattttataatctgtgctcttgtgcagtatctgaagaactttcagttcaggcaattcccagtagtggagagatttgctcttattatagcgcttatcatcgtgtgggcttacgcgcatgtcttgaccgccagtggggcttacaaacaccgaccacaccagacacaattaaactgcagaacggatatgtctaacctcatttcatctgctccttggttagttagttcatattctctagatataataaaaaaacattcaatagttgatagtgttttcatatatttatgcttctcttgacttattttaggatcaagattccttatccacttcaatggggagcacctagctttgatgctggtcatgcttttgctatgatggccgctgttttagtctcactcattgaggtaataatgtctctctgtatcagattattactcttgtctcagcatagaatgttctaaaagaattgaaatgtgattagtcaactggagctttcaaagctgctgcacgactggctagcgctacgcctcctccacctcatgttcttagccgtggaataggctggcaaggcattgggatcctcttaaacggtttatttggaacactaagcggttcaagtgtctctgtgtaagtgtaattgtgaatgttttcaaagcattttctccattagttggacaagttagtctcattgatttcttgattgttacaaattctgcagagagaacattggattactaggaagcaccagagttggaagccgcagagttatccaaatctcagcaggatttatgatattcttctcaatgctaggcaaattcggggcattgttcgcttcaatacctttcacgatatttgcagctgtgtactgcgtcttgtttggtcttgttgcttcagttggactctcttttctgcaattcacaaacatgaactctctgagaaatctcttcatcgtcggtgtgtctctcttcttaggattatcgatccccgaatacttcagagatttcagcatgaaagcattacacggcccagctcacaccaatgctggttggttcaatgatttcttgaacacaatcttcttatcttcaccaatggtcgcactgatggtggcagtgttcttggacaacactctggactataaagagaccgcgagagacagaggattgccttggtgggctaagttcagaactttcaaaggagatagcaggaatgaggaattctacactctccctttcaacctcaaccgtttcttccctccttcatagaaagttttactctctttttttttactcagaattgtgttgtttgtgtgtgatttatataatcaccccaagtattatttaatctataagaatcattcttttttctttatctaatggataaccaccacccattaggatcaccataaagatcatattttggagcattccaatatcataacactttactcttaagggtctaatttgagttggtggcaacatgtcatatagacttcagagctgcttccaaaatgggtttccaatctacaccatttattacagattcatttttgcttttcgtatttggttagtttaggagtttagtttttactttttttagattcaggaagtctttaatgggtttcaccggtttagtaggttcacctttatcggccaacaagaattacatttctctctatttatgacgactgccaccaataattcaaaacaagtttacatattaagttttcttaaactactcctatatattaagtctaagattatattaatcttatttatataatttaattcaactaaatttttagtttgtttatttacatgatataccatggtcctgttattttagctaaagtatatattaaatttattacttttttatttcaaagattttttctattgttttttattttgttttcttttcatttaagcttatattattattattatacacacacatttaaggtttatatttatatttcttgcaatgcaaacatgtgtcaatattagttgatttaagatacaaaaatattaaggactaaatggttgagataatactactttgatatatatatatatatatatataactatattctataaacttaatttatttgagagggtaaggattagatgaccaagaaattggtaaaaattggaaaaataattatagacattattattttacaagatattctcaaatggctagagatttgtgaagttctgttttttttttcctcaaagttcaagtgtaatatttttcgatgacaatgattattccaaatttatttttttgttaatcgtaaacagtgaattttgcataattggtttgaattagagttgataatagttgttctcatcatcaccaaacattcttctgcttaccaaaagtaagggactttcattagcaaaaacaaaaatcatacacaaatgggttttggttgtactgtccaaaatggaacacacagttttatagaaagacaaaactgaaacggcaagtgagagttaaagtaaaaggaaattgcaatcgagagccagctgagatttttagatattttgcaggtaactcttaacgccgagcatacatacgtttctcaaagacataaagctgattgtgtttctccatttgctgaaagatctgagccataaagctgaaatagaaaccttttttgtgttttgttgttccccagattctctgacgctgcttaaaccttaaagttcgtagctttttcttgctagtgggtcttttgaggtggatctggattctgggtaaggttttgttttttatatctttaccagtaaattgaagttcttatggtttcaagaaattttacagggttttcaattattggaatgttgtttctgttggctctttatctgaatacaatcttactaagaggttacggatcttggactttgtaggaacttgagcaaaagccatcctcttttgttgtatatatgaattaaatg

SEQ ID NO: 29886 - DNA, 3000 bp, Unknown; identical to SEQ ID NO: 11958
  misc_feature (1)..( 3000): 2750-1469P.txt file - cDNA_ID_3023447; gDNA_ID_2214524; Annot_ID_184712

SEQ ID NO: 29887 - DNA, 3000 bp, Unknown; identical to SEQ ID NO: 11966
  misc_feature (1)..( 3000): 2750-1469P.txt file - cDNA_ID_3023451; gDNA_ID_2214524; Annot_ID_184708

SEQ ID NO: 29888 - DNA, 3003 bp, Unknown
  misc_feature (1)..( 3003): 2750-1469P.txt file - cDNA_ID_3023459; gDNA_ID_2214524; Annot_ID_184706
tcattagcaaaaccaaactcatttacatacaaacatagaagattgaaacgtatacatttttgccttccctatattatctttttatcttataatcccatttataaccacacaataacagttacccctaacatagaaatttattttcccttttttgacattgtggctatggtacattcaccaaataccgatgccttagcccctagacctataaattatcacaatccagaagagaagaatcgtatccaaaaaagcaaagtatagatctgaaattcgtagattcaacctcctgtagtcacttgcatccatcacatatcataaggtatgaccttccatacccaaactccaatctttagggtaaaatcatttgcttttgcttcgatctcttatgtctcaaacaacgatgtgtttcttaataaatttcttctatatatttaatccaatatcgtttggttcctctttggtgacctagcctttgattccgacattcctgttaccactcaccatatgtatcctaacaagttattgttgtgttatgtggcctttagtgttgactgttgagaaataagatctctatgtgaaagcagaaagatggtttgtgcattttaacatttttttattcacttgacccagtaacttttccaaaattcagtatagtccttttaagtctaatgataaaacaccaaaaattttaagttttctttttaactccgttattcataaattgtcagcaacttttaaactttggacacaaattccaagttactaaagctatagatctcaaaactctatctaattagttttaattttgatgctgattaaaattttataatttttttgtcaacaaattcaataaaaaagatttcttaaatctttaatgcgacaaccactattaacaaaaaaaaaatacttcaatatttgtttgattcaaatatttccaataaaaatatatatggtcagccattaattaggcgtttactcctaaaagttttaggatttttctaaaaagtattttgtaatatatttggaaaaacatttttttctgtattttacatggaaatagactgttttcttttagtgacatgttttatactatactgaatttgttggtaaaaatatatatatatttaagatatttttggtgaaatgatatattgccattcaacccaagttaaagtttaaccaaccaatatataatttcaatgaattttaagtattaaaaataattgttactgtgtgtaaccttgaatttgctttaagaagaaaccaaaacagtgttaaaaaaagcttctcctttactactatgttaggtaacttttttttcttcgtaacaaattttcgctgacatttaaattactttgtttttttctcacaattatttttcttaatataaaagtactttattttgaaaaaaacgaaagaataaaaatgccaaactgatccatttttaaaaattgtaactattttttattttatttttttaatcacatcgctaacataacctgcacataattttcctttcttatagtattatatttttttttatcttataagtcaatttataaaccacacataaaaataattatccctattccctagcatagaaacaattgttactgtgttaaaaccttgaatttgcttttaaaagaaaccaaaacagtattcaaaaatgcttctgatcctttactatgtcaagtaacttttttttttttcaagtaactttttttcttccgaataatttttttctcataattatttattattaatataaaagtattttattttgaaaaaaaagagagagaataatactgccaaactgacccaatttttaaaatccaaactaaatttatgtgtaactatttgtttgtttgctttttattttggaaagctaacataaccatatatacatacatagataaatatacctaatcatatttttccaatcctatagtattatttttatcttataattcaatttataaaccacacataaaaataattatccctattccctagcatagaaaatattttatcttccatattttcgacattttggccatggtacatgcccaaataccgatgccatcgaccaataaaatcttcattcataatccagaagaagataagaatcacacatatagtaattcttttctccttttataatacaaatctcaaaattcatagattcaaaaaccaaatcctctcttaatttgcatcgcaccaccacagatcaaatcacaaaggtgtgtgacccttccatgcccaaaatccaaatctttaggtttaaaaaaaaaacatttgcttcttattatatgtcacatacatgatgtgtttcgtgttcccactttataactctctttttttttttcgttggttcttcttccgtgacctagcctttgattccgccatgtctgtttccatatcctaagtcctaacaagttattgtgttacctgaccttctctcatagttattaaaaacccaaatgttaaagtttttgttttgtggcagcattttaacatttttggtcacctccacctgggtttgttgattggtcatgttattgatcttcaatttggtatctttggaccaacttttttttttcttatatatatctgtataattcaatattgggttctttctaatgtagggtttagatcaattcttcatttcttggtgttgattttgttttgtggaattcagggttttagctaattgttcttccccagttaggagttttacttcttaagatctgaattgtttagattagtaattctgattagtaccaacaatgtcatgtaatataattgacttcgtatgtctgaaaatgccttattagaaatttcttatggtgaatgttagaaatttgattaggataggaaagcaatttatattgactattgtttttgtattcccctgttcttattgcagaattgtgtgtttgtatcaaatcctgggtttaaagaagtgaaatatcttctaagtggtgatttatggaagttaaaatg

SEQ ID NO: 29889 - DNA, 3000 bp, Unknown; identical to SEQ ID NO: 11957
  misc_feature (1)..( 3000): 2750-1469P.txt file - cDNA_ID_3023463; gDNA_ID_2214524; Annot_ID_184705

SEQ ID NO: 29890 - DNA, 3000 bp, Unknown; identical to SEQ ID NO: 11956
  misc_feature (1)..( 3000): 2750-1469P.txt file - cDNA_ID_3023474; gDNA_ID_2214524; Annot_ID_184702

SEQ ID NO: 29891 - DNA, 3003 bp, Unknown; identical to SEQ ID NO: 25742
  misc_feature (1)..( 3003): 2750-1469P.txt file - cDNA_ID_3023547; gDNA_ID_2214526; Annot_ID_184760

SEQ ID NO: 29892 - DNA, 3003 bp, Unknown; identical to SEQ ID NO: 17247
  misc_feature (1)..( 3003): 2750-1469P.txt file - cDNA_ID_3023557; gDNA_ID_2214526; Annot_ID_184748

SEQ ID NO: 29893 - DNA, 3003 bp, Unknown
  misc_feature (1)..( 3003): 2750-1469P.txt file - cDNA_ID_3023565; gDNA_ID_2214526; Annot_ID_184761
gtttatcatgatgccgattgcgcatctggttgaactgacatataaagtgttgggaccatatgggatgacagtaccacaactaacaccttcaagagttaggcttctctcatgcagcagaactttcgattccacgaaagcaaaggatcgactaggctatgctcctgtggtcccacttcaggttatacaatatttgatttgaaagagagagatatttgaagcctttattgttctttatatattgcatgcatgccttgatgatcctgcaggaaggtatacggaggacgatagactcattctctcacctaacagctggaagtcaatccaaaagagagggcccatccaaggcttctaggattcttggaggcggaaagggtatgaccatatatttcaattagcatgcttgtcctctcagctgatcgtctctcacatgataagcacccaatgtttatttttaaaattcactggatatttttctttttattaaaatcttgagtcagcgtcaacatctgcacgctctcctgagaatgattgtgttcagtggctagctaccatattaatgtgaagaggcataggatgttagtagaactagacatattttcaaatctaccctggtcttgattcacttgttctgacatgattttgcagttgctgatacacttctctggaaggatttaaagcagactcttattgccatattcattctaattagtatctattataactttgttgcaactgggtctaccgtcgtaactgctctttcgaaggctctattggtagcatctgtatttttgttcctccatggcattctaccagagaaaatgtaagattcctgagatgccaacttttgatagattttcatttatgtgcaatatgaactaccttaacctagttctctaataatggaaaccagaaggtatatgccaaacatttttgaaacactgtgtatcgtactcttcaatcaggaacaagtaatataagcaattgctgtctatttcagtttacgaacaactgaatatagatgcttattttgcagatttggttatacagttgaaaagattcctgcatcgcaatttcacctctcaaaagactcatcacatgacctctcattgtcagtgatctcttcatggaacaccactgtaaaagctttaagatctctttgccaggggaatgattggagcttctttttcaaggtatttttccttgaactagttattgctggcaagttccagtcgtacgatatcttatcccaacctgaaacagaaatagggacaaaattcgattgctgaagttctctttggtaataatattgtaacaccgctttggtgtttttaatgtcataggtggtcttcgttttgttagcattgagtttggctggagccatatctcttcacagcatatttgttataggtacacactcactctctatctagttttactacatgccaacgctacggttgtatgaattatagttcttcaacaataactggttttgttgttctgtttttgttcaacaggactgcccattgccttccttgcttttctcgtgtacgaaaagaaagagcaagagatcgactcaatagtggtgagttttaaatctttcgcatgcaagcacaaatccgatgtgtatgagaaattgttcggaagcaagaaacatgactaaaaaccctttttttgcccagcatttgtaattttcttttgtttccaacgacctctaactctggtttgagcttttttcaagttttattatttgtgaatctcttttttactcatttctattggtctttgtttacatgcttggagaaaaatggatgttgagagatgccctattaagccacaacttttgtcctctaacatgaaagtaagcattgaaaaatcgaatgaatttgtgaaaaaaagaaaggagagaagaaagattcgcaaggttgattcctaaagcacatgtccttagtcccgtgcctttgaatatagaatcaattgatagattatcaaaccacaaaacaactctaatattgaatttaatgacaaaatattagtaaagaccaactttatgaagtggcagcctttttatctacttgttgtaagtctatttctcgaattttcctttccaaatatccaaaatgtaattaatgtaaattgagttaactatattccaatatcattaaaatcatagagacgaatttcataacgaataaagaaaaaattttaagcttcaattttattgttaatattttgttgtacacatgttaaagcgaataatttagcatatgaaattcttacagaaccacgttatattacatatgtaaacaacatatctccgaagtagttcttttgagtttaatttaaagttgttaaaaaataaagattatctgaaaataaataataatacaaaaaattataaaaataaatagaaatgtttaactggatcccatccatctaaaaacagaagcttacaaattaaaatttgtattatcactccacttttattaaaaagccaaaattacaagacttgttataattacaagagttttggtgtaagtaattaataaaaagaagtcgggtcgggtcgggtcaagcccaactatttttgaatcacaagagttatctctcagtctcactagtcacttgcaaagaagcgttgtgtgagagttttgaatagaaagagtagttgtctctcattccccaaatttggaatcacgccgataaagccaaaattagccccacgaaaaagctccgacaaccaaagtaaccatctttttccgaggattcatcacttaaagcaccattttgtccacaatcactcaaccctaaaatctttttctcctttgaatccttttcatgcttcttcttacattccccgatttctttttcctctgagaaagtgatttccttttgattttgattcttttttagtctttctgcaatgattccgtattttgaattaaggatttataaaaaagcagagattggagcttggtttgttgtctatcatcaactatcacaatg

SEQ ID NO: 29894 - DNA, 3003 bp, Unknown
  misc_feature (1)..( 3003): 2750-1469P.txt file - cDNA_ID_3023585; gDNA_ID_2214526; Annot_ID_184766
tctatattgttgaacagttattgcatgatggaacaaaggagtttgctcaaaatgaaacagattctgctaaatatatgttatcttctgaaagtattgtaagtggttagattcataggtcacttgagctgtctttgttagagttttgagtcttgtgagtaccttgtcttatggtagtcaacttattatcgtaatatcaggcaattggggagaaactatctgagattggtggtaggttagactatccacgtcttaccaaggacatcgctgagggaatagaaacactatggaaggatcctgcaattcaggtgtgtttgtgtgtgtgtgtgcacgttttatttactattgcactcaaagttgaatacatgatttaaacgtttcattttgtaggaaacttgtgctcgtggtaatgagcttcaggttcctgattgtacgaaatatctgatggagaacttgaagagactatcagatataaattatattccaactaaggtataaccaaagtatcattctttgttgaaaacatttcaagtaatgatcttaaaatggttgaataaaactcattggatcagcctcggaggatcaatgtattaacaaacagaagccttttgctttccatattagcctagttgagctagcattttcagagaccagagtcaatatgcaatttctgtgacatgtgtcttccggaatgtgttgtcattggtgcattttttctatgttggtgtttcaggaggatgtactttatgcaagagttcgcacaactggtgtcgtggaaatacagttcaggtaccaactactttttgttttaccctttttcctgtttgattgttagtctttcatagatgagtaattgtttgataagctctaagtgttagtctggttcactaggcaatatgattagctaggcggtttgtagtagctgtgttaacagctcagcaacaatcttgttaatgtagtctctctgcgatgtgtaagttatttggtgaaatgaataaaagtgtttacggattcgattcctatgattgccactaagatgtactaatagaacatatgaattccataccaatatcaaacttgttgttgtggtgaatctacttgtaatgatccgttaccaaagatgaattcacaaatggtatatgagataaagcttcgtttatgcagccctgtgggagagaataaaaaaagtggtgaagtgtaccgattgtttgacgtgggtggacagagaaatgagaggaggaaatggattcatctgtttgaaggtgtaacagctgtgatattttgtgctgccatcagcgagtaagctcacttcattataaattataagatatcctcgtactgtccacatattgccaaaacattaactgagttttgatcataggtacgaccaaacgctctttgaggacgagcagaaaaacaggatgatggagaccaaggaattattcgactgggtcctgaaacaaccctgttttgaggtttttagttacatttttatctcatcttttaaaaatttaaagacactcttgagatgggtttggttacaaaaacttggttctctttacgcagaaaacatccttcatgctgttcttgaacaagttcgacatatttgagaagaaagttcttgacgtaagaagaactaaagcatatttatttgttttgataggcaagcaagtctttttgttcaataacgctttcttattcaatgtgcataggttccgttgaacgtttgcgagtggttcagagattaccaaccagtttcaagtgggaaacaagagattgagcatgcatacgagtaagcttgtctccaaactttactgattcccgccaaactgttaccgttatatgaccttatttttaatttggattcaggtttgtgaagaagaagtttgaggagttatattaccagaacacggcgccggatagagtggacagggtattcaaaatctacaggacgacggctttggaccagaagcttgtaaagaaaacgttcaagctcgtagatgagacactaagaaggagaaatttactggaggctggccttttatgaccttattattacatatctctagtaaattacctctccttattattataagaaaaactcgaaaactgaatgaccgtgtaatttatctttcgggacaaaagacttagcgattcaaaatctaatgtgtctcgatggctacgactagtttctattttatcattgtttttgttaacattcctctgtctttgacttcttatttttttttctcatcaaaaacatctcattttgatcttgtttttggggttatattattattaaaatgaggcatccacatcccgaaatctagaaagtgaaacacaacacaaaacgtaactttatcagtactaaaaagttttggaatgttcctaacatgaaaaagttcttacattaaaaaaaagtatgggggtgaaactgaacaaatacaaaatatgatgtaaaaactgaaataaaagtaaaacacatggggtctaccgtgatttcagaacattcgaaaaagcgactttaaaaataattgcaccgaagaaagaagaaccctgaaagcaaaaaactcttcgccgttgttgtttcttacgtcaaagaatattccttcttctctttcgttaatagatcccaaaaaaaaaaaaaagcttcattgattcttcttcctctgtttttgattccgttttcgagcaatcctctgaaacatgtatgttgttgttctctctttcttccaatggtgttctgattttgctttttctgttatacgataatgataacaatcgcttcttagtttgattaatacgaaactctcaaagatcacgaaattggttttgttagggaaccatttagatcaaggcttgtttgtgattgttgttgttgattcagctttgatttgattcgttagccattgattttgatttgagaatttgtctttgtttgatttttcttgcagaatctttggtacaattggagttatattcaaaagcttataaatgtcaaatatg

SEQ ID NO: 29895 - DNA, 3003 bp, Unknown; identical to SEQ ID NO: 25754
  misc_feature (1)..( 3003): 2750-1469P.txt file - cDNA_ID_3023613; gDNA_ID_2214527; Annot_ID_184802

SEQ ID NO: 29896 - DNA, 3003 bp, Unknown; identical to SEQ ID NO: 25755
  misc_feature (1)..( 3003): 2750-1469P.txt file - cDNA_ID_3023617; gDNA_ID_2214527; Annot_ID_184801

SEQ ID NO: 29897 - DNA, 3003 bp, Unknown; identical to SEQ ID NO: 26202
  misc_feature (1)..( 3003): 2750-1469P.txt file - cDNA_ID_3023632; gDNA_ID_2214527; Annot_ID_184790

SEQ ID NO: 29898 - DNA, 3000 bp, Unknown; identical to SEQ ID NO: 12004
  misc_feature (1)..( 3000): 2750-1469P.txt file - cDNA_ID_3023636; gDNA_ID_2214527; Annot_ID_184784

SEQ ID NO: 29899 - DNA, 3000 bp, Unknown; identical to SEQ ID NO: 11995
  misc_feature (1)..( 3000): 2750-1469P.txt file - cDNA_ID_3023640; gDNA_ID_2214527; Annot_ID_184783

SEQ ID NO: 29900 - DNA, 3003 bp, Unknown
  misc_feature (1)..( 3003): 2750-1469P.txt file - cDNA_ID_3023644; gDNA_ID_2214527; Annot_ID_184782
agacttaaattgaatattatatttctaaatagattatttctgtaaaaataaaccctaaaatatatttatcaaatcttttaagattttaaactttcttatattttctatttgatcatttcatattaacgcgattaattaaaatatgttttgtgacttcaaatattttggttttatttaaattcttgctttgtatttatgtgattaacttagtagtctctttaaatagataaaataatcctcagaactataatatttaaaatctagtgacaaaagttttctttattaatactatacttttccaatttttagatttttaaagatatttttaaaaaatttgaaagaaaaaaggttgaatgttctatttcttacaagttacaaattaaatatacacaacacaatatataccaatgtcccagttatcttcccaacaattatttcaaaagtataacgttatacactaatactaacaatgatgcttaatcagacagtgatcttcttccttctttgggtgatcatagcacttgtagtcgaaattactttggccggaaagatcacagtttctgatatccatgagcagaaaatcgaacaacggttgaaccaactcaacaaacccgccgttaaatctatccatgtattcgcaacgacttttaattacccgtggtttgctattcccactattttcttggctaaatgcttttatgttttcctttaatatttatattgaatagagtccagatggagatataatcgattgtgtatggatctatcaccaaccagcttttgatcatcctttactcaaaaaccacaccattcaggtttttttgtaatacttttttttattcactcttcaaaatcatattacctctacgttttgccctaacgcttcttgtttttttcgaggaagatgaggccgaaaagtgactcgacaagggacaaaactggaggtaacaagacagacattatccatcaattgtggcgcacgaaaggtgaatgtcctaagaacactattcccatcagaagaagaacaagagatgatcttctaagatcagattccatcaaaactcatggaagaaagaacccaccaaccatttctccaactacttatcacctccccgatgatcagacagaagttcatgaggtatctatatccccggctcaaagttttttttttaaaagtgattaaatatttttgacgctttaatttttataattttgagttaaactattaagagctacccttaactattataccttactttaattgtagcatgcgagtgtgtacctggactatggtgaataccatggcagcaagagccgtataagtatatggagaccagacgttaatatgaccgagtttagtttggctcaaacatgggtcgtcggtggagattgggacactgttttgaacactgtggagtctggttggcaggtcagtgctatttttttttttttaggctaacacttctctttttgtgtgtggggcttttttttgtaaaaaaaaatggatctcaattaggatatatgtgttgcattgttgcaaaatttactgattttataaactcaatttgaatcgataataattggatactcagatataccacattatgcattcagaagttctactatttctaacttcagtttttttttaactctttatgatagatcctacattctatgtacggtgacaataatacaagacttttcgccttttggacggcaagtttcccttttttattaatcttaactaagattgtcatgcattgactaagggttaattactaatattttctgacaaaacatatagagcgattcatatggagacaacagctgctacaatcttgactgtccaggctttgttcaagtgaataaagatattgcccttggtgcagccctcaacactatctcgacctacaatggtaaccaatatgatttccttctaactattgagaaggtataatttatctacaagtactgaacaaacacaacttatagcagtttcaaaaagagtgtcatcactaaattgagctactatacctattttaggaacaagataccggactttggtggcttaagtttgatactcatctagtcggatactggccaagctttctagtcccgaagctagcagactcagcacggatgatcgcttggggaggtgaaattgtgtatgatgctagtggccaaaatgaacatacgcttacgcaaatggggagtggccatttcgcggaagaagggtttaagaaggcggcttatatcaataacatagagtacatcgataaatctaatcatccgatcaaaccctttcctcaaaatcttgaagcttctgttactcggcctgaatgctataacctcaaggttggctctagccgaagatggggaacttacattttctatggtggacctggacgtaaccctcaatgcctatgaaaagtgacatgatttttcgaaatttatttagaaaatgtttgggacaacccttgtgattgaactgaatagcgttctaaagatgtaaactttttaagactaataaatggttttgcatttgagataaaacaaaaaagatcatatcaatattttaataagcaacacatttttcttgttaggtcataaaacgtaacaagtcggtgtcactaatttacttatcaagtgataccttgcacgatttgtaacttgcagaaaaaaagaagatagaaggatatgataaaattttatgcatatgtagaaaaaaaccttgcacgacaccttccgttagatcgatcagctttgacttatacgtttaaatttgcgtttttgtcattcacagagaagaatatgctttacacttatcctctctttcttatttctatattcttgatgagtaaagtaattgacaccaagatactgcatttctatataacccatgactacaagtttcctctgttttaacaaaaaacgaaaaaaacaaacaagtttcctctgtttaaatatcaatcttcctgtttatgttccgctatcccaaaaatg

SEQ ID NO: 29901 - DNA, 3000 bp, Unknown; identical to SEQ ID NO: 12038
  misc_feature (1)..( 3000): 2750-1469P.txt file - cDNA_ID_3023706; gDNA_ID_2214528; Annot_ID_184849

SEQ ID NO: 29902 - DNA, 3003 bp, Unknown
  misc_feature (1)..( 3003): 2750-1469P.txt file - cDNA_ID_3023710; gDNA_ID_2214528; Annot_ID_184848
tgaagacaagagtgttaaagctggtggtgttattggttcacaggagctaaggaatatgcaagggattgataaactgatggataagcatacgaggtcttccttgtctaatacaagtacatcgtcttctctctggactgatgagtcatcgactgattccagtagaggtctttgtgcttctccttttcgtaaaaagatcaatcaccctcctttgcagtattatctcatgtcttctaagcctggagataattttcaagatttggagccacctcaagataacggtgatacttctcacagtcatagaagagatgggcagtttcatcagacccctcgtgcaactgcggtccaacagaatgagaagaaagatactgatgttaagattgttccaaagacaagaactctctttagtccatcgaagccagatagtccttcttgcacaaggataatatcaaagaatctagccgaggattttaagaagaaaggagagaagttggaagagagaatccgaaatcctcgtgttcatgatctctttggaaaagaaaagcctgctgctgtatttgtaccagggattgtttctcagaaacagtttattggtttgtccaagttctatgattcgaaagtgttactagctgagcgattggcggaaagtaaccgaaaggggttcacagagaggttagcgcatgggaaaactgcagttcttgactctgatgtaggtcctttccgacgtgaagctgatggaggaagtaagccattcttaaaacgtatcagcttcttatcagaaagatcatgttcagctccacgatcaagaaaggctgaatctagtccctctagaagcaggactctagatagaaggtcaacagaaacattacctaaacagtcagatcagaaaccagctaaagtcttatcagaaagagctaggagcatttcaccatttcgccgactcagcttcagcattggaaagtccagtaaaaactccaacaccgaagatgctaagactcctccacacttaagcacagcacttatttcatcacgagctggtttagacaatccatctgcctcttctttcagtgacagctcttcttttgataaaaccagtgcagcaaacagaggcaggtctagtccattgagaaggttactcgatcctttaataaaaccaaaatcaagccactcatgtagatctcctgagccatcactaaaggaagcaccttcaagtcaaccatcttcgtcatcctttctgtcgagaaatggaaaatcttcaactgttcaggctctatttcgtgtgacatctaagaatgatcaaccactcttcacttttgcggttgaaaaggaacaaagtattacagcagctacaataagaaaacagactctcccagagaaggaagactatggacacaagtatacttttttcactgttcaagaagtacagaagaaaaatgcaaaatggatgaacaacagcaggaaagtccaaagccaagagtacacatccaacattgtcgctcagatgagagtctcagatcctaagcctctatttctcgctggagaaagatctgcggaaaacctcttaactagagagtttgtacttgttgcatctgaatcgcagcggactaacgagctagctgccatggtgatcaagataccaaaacttacagacacaacaagctcaaccactcttggagattactttgcagaggttaacgcaacagtggtacttccaagtggagttcacagtctcccgcacaaaggagggccgtcatcactgatccaacgatggaaatcagatggatcatgtgactgtggaggctgggacacgggatgtaaccttagaatcctcacaaatcagcataataaacccataaacccttctccaaccacttcagatgccttcaagcttttctttcaggtttgttatataacatctcaaaactctgaatactaagaccaacctttggcttaaattatgaatctcactaatgtgagttttgttgcagggaggagtacaggagaataacaaccaaccatacttgagtttcactacatacagagaaggtgtttacgcggttgagtacaatacatcgctctcactcttgcaagcattctccatttgtatagcggttaacgagggacgaaatccgttaataaagaccaccgtggaacccaacacttcacgtgtagagaagaaagcttatggaggagagatgtcatcgattcaaaacgagaatttgaagtcattttcaggtcctattgaagctgaggctccggctaggtatctctcacaccacccacctttgtctcctgttgggagggtttagttgcttcttcaaataatcttgttatatatatttttttcttttcttttctcttctgatggggttcgtattttctgtgtaattacggcgtggaagtagattacgttaaatagagaaatttgtgaaacttgttgtaatcgaatatccacatttaagctaataaaaactcttatgttcttgacttctttcttcttcaattacaattaccatgatcatgtaacataaactctgtcgtgttagttgttactttagtagtttagttagcattgttaaaaccataaaatgcaaacattaagcaaaaaaaaaaaagaggaaaaagatggtgctgcccaggatcgaactggagaccttttgcgtgtaaggcaaacgtgataaccactacaccacagcaccttgctgttcaagattatcatttaattctatataaagtttagaatacagaattggctttggtttgcgtagattgcacaaaaaggtgagtcctttctccgacaacgcaaagactcatttgaatcggttccttcaaaattattgatttgggaatatattcttgtcaattcaggtgaatcaaactggtcggtgcaattcaagattgccctcgtatttgtgtcggggaatgaaactgttctgtctttcttacaaaagcagttgcatttgatcttgctgcagagattaatgttcattctcaatcttaaccatg

SEQ ID NO: 29903 - DNA, 3000 bp, Unknown; identical to SEQ ID NO: 12030
  misc_feature (1)..( 3000): 2750-1469P.txt file - cDNA_ID_3023716; gDNA_ID_2214528; Annot_ID_184836

SEQ ID NO: 29904 - DNA, 3003 bp, Unknown; identical to SEQ ID NO: 16046
  misc_feature (1)..( 3003): 2750-1469P.txt file - cDNA_ID_3023719; gDNA_ID_2214528; Annot_ID_184832

SEQ ID NO: 29905 - DNA, 3003 bp, Unknown; identical to SEQ ID NO: 26209
  misc_feature (1)..( 3003): 2750-1469P.txt file - cDNA_ID_3023723; gDNA_ID_2214528; Annot_ID_184831

SEQ ID NO: 29906 - DNA, 3003 bp, Unknown
  misc_feature (1)..( 3003): 2750-1469P.txt file - cDNA_ID_3023727; gDNA_ID_2214528; Annot_ID_184830
agcagaagttcacacttgcgctcggaatgagtacgagctggagaattgtttgagtgattggaaccgttctggttttcgagttgctggatccgtttgcgatgtctctgatcgatctcagagagaggctttgatggagaccgtgtcatctgtgtttgaagggaagcttcatatccttgtaaggtttaatgccattgcttagagataatgcacataaagtgtttgttaatttgtctgtgagaacaattgtaaataaataactttactttcttgtgtaattatgatgcttttaggtaaacaatgttgggacgaacattaggaaaccaatggtagagtttactgctggagaattttcgactctgatgtctacgaatttcgaatcggttttccatttatgtcaacttgcttatccattgcttagagaatctaaagctggaagtgttgtgttcatctcttctgtttctggttttgtttccctcaagaatatgtcggtccaatcttcaaccaaaggtaggtatttgttcttatgcagcattcattcatttattcaggttttaccaagatgtattagattctttaacgagcaggcgatggataaactttggttcttttcgttggcctttgtgttttaggagcaattaatcaacttacgagaagtctggcttgcgagtgggccaaagacaatataaggatcaatgctgttgccccgtggtatatcaaaacatctatggtggagcaagtatgggtttaaaagccttattatctattatgcggttaaatataagctcttgaggctgaaaatcaaaatgagaaagactaagctaatttgtgtgttccttgtttaagatggggttgtttaatggttctcgtcttttggtctcaggtccttagcaacaaagagtacctagaagaagtctactcagtaactcctcttggtcgacttggcgaaccgagagaggtgtcttctgcagtggcttttttatgcctacctgcatcatcatatattacagggcagattctttgtgttgatggtggaatgtcaataaacggtttcttcccacgacatgattaggccactctattgttttactagtttccttgggatcctttttgttttatctttagcatgtctcctttctcccgtgaaagacagttcatcgatatgagatgagaattgaagttgtgctactaagtctactgttaatgaaaaggataatttagcatcagacagcgtgattcagtttcccttgtcttttactgattatcttgattgtgcatgtgggggaaaattgctgaggaaccttttcatgttatgacttttatgaaaacaaaaactttatgtttcttgagttagtattcattagcttgtattctgtgtcatcctttctcggttttggctttcattgtgtcttgaacctgcactcatatccaacaaacaatggttgaggaagagagaagctgcatagaataaacgaggaacctttaatgaattaccgccacctgtgtctcgggtcactcttcttctgcccttgtatttacagcacattaagctctgcttttggttaatatcgctttgtctctgtgtttaataatgtttttggttcgatgtatatatacaggtaagcaatgcaggaaagtgtatagccaaaccgaccacaaaatatgcagtagaagatttctcgttgctgatggctacaaatctggagtcagctttccatctctcacagctcgccaatcctttgttgaaagcttcaggttcagggagcattgtccttacgtcctctgttgatggggttgtccatctgagagtcggatccatctatggagcaaccgaagctaccgtatatatgtctacatccttaaaacaatgttcccttgcgttatgatgctttcgtaacatatagatgcgtttcaggagccatgaatcaactggctagaaacttagcttgcaaatgggcgagtgacaacataagggcgctctgtttgtccttggttcattaaaactcctttaactaataatgtacggcgaaaagtaaaaagtctccttattattatgaaaatatatctatatcataacttcccaattttgatttgtatgaaatgtttcagtttctcaatgataaagatgcaaaagaaaaggtggagagtaggccaccgatgggtcgtgttggaggtgccattgtcaacgttttttccttcaagactctgccttaaaatacatatatgcatgtgtttggattatattttcctgcgtaataattaagaaatgtactttagataagttcctatctaaagtcgcttgtgatgccaaagggattgggtcccccttcttcttcttgttattctctatgttttgtttcctgaaatatttatgcttgtggtgaacgagagttcaatatctgaattcattatctactttggccaacgcctaatggtatcatttggtgtctcaacatgtgatggagtgtctaatttggtttgaaatcccaaaattcaatatccatgggtattctctagtaatttataaaagaactttggtccaaatcctacaagtggtcatatactgacataccacatagtggaagaactagctagctgggtttgaaataaactcaagataagacaagtggtcagaattgatgttgagagatttttttcctcagcatgggtgtcaaatgagggtccatcaaagtatgcagatgtcactaagggtttccatttagagtaatgagacatgaaatagtgggttttgggttttgagtatttgggttttgagtaagtattccaatataatatatgttcggataattttgatagctaaaatcattgtccacggtcccaaacgcccactagtttaggtaagatggacagccctagatgtaactatcaggagttgcccaatgtctatcatgtaattgtatcttttcttatttacaaagttgttagtaatctatctttatatacaatttaaagaagctcttgttagttatgtgatagataaagatg

SEQ ID NO: 29907 - DNA, 3003 bp, Unknown
  misc_feature (1)..( 3003): 2750-1469P.txt file - cDNA_ID_3023743; gDNA_ID_2214528; Annot_ID_184823
taatgattttatgaatgaagaatcctaatttgtatataccaagaggttttaaaaagttttaagtttttatttctaatggcatacctatgtaattacttacaaaaaataaggttacatttaaaatgcttatttataatttttgataagtgtgtatgtgagaaggtacggacatcgtgatggtaatctgcttatttataattttaacttgcagtataccacatgtaggcttatattttatttaaactaaaaatttttattgtaaagatgattataaatatatgatattattttatttgattttaaatgtatagtaaactgcgagttgtatatgttttgttgatattatttatattgtttagtgtttaaaattatacacttgtattttgattgttaattttagagtttcacatgtagtataccatcttgtattaatatcgatttaaacccgtcaattctaggattttctatcttgtattaaaaattgaatcacatcatacacataaaaaaatctaatatgttattaattattgtagtatataagattataaatttttaaaataatatgtatgaaattgaatataaatattcaaattatgacccagtattcagtagaaaattttcttaaatctatttttgacccgttataatattttttcatgtattgaacagtttatattagtttttaaaaattcaaattatggcatatgcgaaaaaactctaattatttttttataacgatgatattattttttcgccaaaatagaatcatataaagatgagaggtgaactataataattaataaaaaattaatatgataatttagatatcaaatctaatttgttgattttaattggttacttttttggaaattaataatgtattttgttttttaattaaatttaattaattaaattagtatttgacttaattattaaagagatgaattaatgtactctttaaattttatttctaatggcatacttatgtaattacttacaaaaaataaggttatatttaaaatgtacttcctaaataatatagtaggatttcttaattaggaaaatgacaaaaaaatattatatttacctcttaacttttgagattttatttaaatttatgaaagttttgcttttttttcagcggagatgttaggcgaaacttacattattttcttgtcagcaaagatttggtgaattcgttaattcgatgatgataacgttagtgacggttgcaaaaatgtttctgtttttacggttttttgattcatgtagaggcaaagtttgtttgtaattggaaagaaaaaataaattaaataacgaatcttaaaaagtcttccaagttgatttttttctttactgacataaattttgctttatatatcatacaaatacgtcaaagtccataatttcgatgatggtgatgacaaaagaaaatatgttattatcttttgcatgacatgccctcatatatgaaactgaaacacagagttatgagctcatctatatatacatttttgctgctactttgtgaaataaatactggagttgggatttatttacaacggctgccactggcatttaataattgtttttgataattagaaagaaaatcttctaattaaatatttgacatttaacaatcttcccaaaatctctcaaccttaactacacgattaattactaaaataaaacttctaaaatatttaatatcatttaattactacaaaattatcatttttgatattgcttttctgcatgattataatcatcaaaccgtagagatatttgatagcatttaattactacaaaattacaaaatatttagacaataattcataaacatatcataaataaaatcaacattaataaaataaatgagttttttttagaggacgggttggcgggacgagtttggcaggacgttatttaataacaattgtaaactatacaataaaaatattttatagatagataaaatttacaaacttttatatatattaattaaaaaaataaattgtttccgcggtgtactgcgggttaaaatctagtctaatacaatattagagataactatagtcattgctctcatttttccatttgcatacttatatgttctcaattctcatacctaccttatattgtgtgcccatacaccttccatgcgcacttgttgtccacacaaattacgatcaaacaactgttatatagtttccacccacactttcacctatggtttaagaaacataagttactctaatgtagtaggacgagttgaccaaacctaactccttcattttgttgcaccaacccatatttttaccgagtaatgcacaccccaaaacttataatcatagtcatcttcctttcacgtcccataaggttcacattgattactctaatctatttcactttcaagattaccaccacatgtaacttttccattccttttccacatttatctcttaaacctcaaacactttcaagtttcatcttctctctctcttattaacttcatctaccaaccctacttaacctaaaaccattttcaattgcttaatcagtccacacaatgcacataaatttccgtgaccacactgttcgttttagaagaaaaaaaccacttccaaaattgcatatgtaccaataagataaaatgttttactcattcaaatagacctacgagattaattaagactaggtttgctttgggctaaaactggcccataagctatggcaattgaaaccaatcagattacaaaaaaggcttgtcaagaagatgagaccgaacatgttccaataaatggcaataacgtaattctcaaaacctctgagggtaacaatggaaaaacaaaatgaagtgagtccgatatagctagggctcgttaaaaactcttcaaaatctctgtggaagccccattttcacatctaaatctcacaaatctctctcaagcttcgatctttcttctagagacgagctagtgcttccacaaaccctaaactatg

SEQ ID NO: 29908 - DNA, 3000 bp, Unknown; identical to SEQ ID NO: 12046
  misc_feature (1)..( 3000): 2750-1469P.txt file - cDNA_ID_3023747; gDNA_ID_2214528; Annot_ID_184822

SEQ ID NO: 29909 - DNA, 3003 bp, Unknown
  misc_feature (1)..( 3003): 2750-1469P.txt file - cDNA_ID_3023761; gDNA_ID_2214528; Annot_ID_134197
tcaaatttaatttagttacttgaattttttttttgttaaagagttacttgaaaaattttcggatatcaaaacttcgaaagagaagtaaactttatatcaaatattattttatataaatatgtggcgataccaaagtaagataagtaaataacgagtacagtgatatattatagtaagcagggatgatgtagaggattgggacgtgtacgttggttgtttgaaaacatatgttccaacaaaagagagtcttgagtgaatctaagctttaaggatcttcacagtctcttggaagactctctctttgacactttacccaattattccattcctttcaagcaacataagacaacgatcgttggattcagcttcacttggcaaatctactgttaatctgtctcatctcctttttctctagatatttggtaactttagaattaagatggtgcattcaatgtttaaatttggtgagattactcacttcatttccatttatctcatctgactataagaaaacatcgaacttaattaggaatgtttgaaatgtaagttaagattggtgtcttgctcatagtaggaaaagaatgtaaaaagtaaaaaaaactatatgatttggaaaaatatctaattaataggtggcaagaaggttcttgcgaatttagcttcgagtaaattgttagacgatacttaaaaatcgattacttcaaatgaataacttgcacatagtttgtgatgaaatgaatctaagctataaaaaaaaaattgtgtgttcacgatgagaaaagtatagtaagtacaaataaacaaggcaccaaattcttgaggagtttcgatttctttaaaatatacttttttttggggtttttttacacgtctcgtgaatgtttactaaatttgctaacaaccaaatttagaaattaaaatataagttcagaaagtaactagtaaacaagagatggtattagttaaggctaaagtgatactggtaaatgatgaggaattagaaatttagaaacatggttttactaaaagtaagaaagaacataataatgttggtcgttagttgtagccttgtaggtttaccaacttcaaccctttcctttacttattacatatttttaacatttatgtttgtatccaataaacattaacaagttgtaactacataactttttgttttctgaaagaataaattactttactgtgcttttgtaaatcctcttgagattttttttgagagaaaattatcattactttatttggaaattggttttacgaaaaattgatcatacacaatttactaaccaactcatgattcgatcaataggtatatcacccaaaaaatatattctcttctagtgtttcagcgtgtaagtttagccattataataacgcttgactttgaatttataaaataatgtgattattagtcggtgacaagaataattcaactaatcataagaatggtggcttccaaaaggaccaaaaccatgaataccatacgtatacaaacgaataaattcgatttataaggccgaattcattgggccttataactaatcaaatttacaaaatggataaaataaaattgaaactaaagcccattatatgaatttaaagcctaacaaaatttcattttgccgtccttagaccaacaccgattcgcacgccgactcgtggacttcggagggcaatcatgaccaagcacgatcggagactcaaagatacctttcttaatttaatcgcattactctcattctaaccgttatggacaacattttaaccggaatagttacaaataatgccattaaattgatacatttaaagagagaggtttgactaatgaccaacttttaacctccaaattaggaaataaatacattaaaagatgaacagtgatagtaggtggtaaccaagtaaaaaaaaaacttccattttctgaaaactcacaatgtttaccttttggtatttgattttacttcaaaaaggagcatttataacaaagaaactatactattgcagagagaacatgcaaatcaaatggactttttgtttcagagtttcacaccttttatttatttctgtttttggtgaatcaatctgaatcatatcaaaaacagaaaaacagaaatagtatgattccattaatatctagtcagaaaaaaacacagctggactaaatagcttacattctaaagtttgaatgaaaacagtttgtaacaattcatgttttaagtattaaataccgaaattatgtcatttttaatccaatttaaatgatgaaaaattagattacaattttttttaaaaaaatttcaacaggaagatctttgagtatattttcttataaagaatattaacatttacgtatatatcttctctcgcgaaataagcatatatccaaaattataagtatatataaatagaaaaaataatcatagaatcttgaagtgttgtactttgttaaagctgtgtccttaaacccaaaactgaaacacacacagaagacagaagaactcgaaacagctccaaacgtgtgagtctgagattcctcagctctctctgaaacacaaaagacaatattaaagttttgctctgtttttttttttttaattaatgctttttataatttttcaattccttatgcaatcactaggtcagatcaacaacaacaaccctaataatgattcacagtaaattttttttttaaaattttttttcacaaaaaccctaagggtttcttacatcgccgtcgatttttttcttctaactctctataaaacccagtttcttcttaaagtttcgatttttctatttctcatcatctgatcattgtgtttagggttttttttttttttaattgaaaacgacagtaatacatggagattggattttgagtactagcttaaagttttgatctttgggtttagttttggggtataaaggtgtcatctttaggatttttagcgtaattgattttgggggtttcttgttgtttaggtgatg

SEQ ID NO: 29910 - DNA, 2981 bp, Unknown; identical to SEQ ID NO: 12066
  misc_feature (1)..( 2981): 2750-1469P.txt file - cDNA_ID_3023777; gDNA_ID_2214529; Annot_ID_184882

SEQ ID NO: 29911 - DNA, 3000 bp, Unknown; identical to SEQ ID NO: 12070
  misc_feature (1)..( 3000): 2750-1469P.txt file - cDNA_ID_3023793; gDNA_ID_2214529; Annot_ID_184876

SEQ ID NO: 29912 - DNA, 3000 bp, Unknown; identical to SEQ ID NO: 12088
  misc_feature (1)..( 3000): 2750-1469P.txt file - cDNA_ID_3023822; gDNA_ID_2214530; Annot_ID_184915

SEQ ID NO: 29913 - DNA, 3003 bp, Unknown
  misc_feature (1)..( 3003): 2750-1469P.txt file - cDNA_ID_3023834; gDNA_ID_2214530; Annot_ID_184912
taaaatattatagtatactgatattataggtaattattataggctaaacaatcagaaagtgcctattctgaggaattgaagcgaaggaaagatacggagatagcagtagcgaaagagaaagagagatttataacaataaaaaacgagcaagaggtgatcatggaagaacttcaaagtgcaatggctcagaaagcgatgcttgagagccagatagcaaaatctgatggtacaatggaaaagctaaaccagaagcttgatatagctgtgaagttgttgcaaaagttgagggatgaacgagaggagttgcagacagaacgtgacagagcactcagagaagctgaggagttaaggagtcacgcagaaacctcaaccctacagttgcctcagtacttcacggatttctcattctccgagattgaggaagcaactaatcactttgattcgaccctgaagattggggaaggtggatatggaagcatctacgttggtttactgcgtcatactcaggtggctataaaaatgttgaatcctaacagttcgcaaggccctgtagaatatcaacaggaggtattttcttgacatattattagtgaaatttcttgtttagtttcatcatcattgtttactggtttattgtgcacaaactgctgcctctacgaaaaaggggactttgaaacacagttctactgtagttttgattttatagtgttcgctgtggaggagctttgacttattcttgcggcattgcaggttgatgtcctaagtaaaatgaggcatccaaatatcattacgctaattggagcatgtccagaggggtggagtcttgtctatgagtatcttccgggtggaagccttgaagacaggcttacttgcaaagacaactctccacccttgtcgtggcaaaatcgtgtgcgcattgccactgagatatgtgcagcacttgtctttcttcattctaataaagctcatagcttagtacatggtgatttgaagccggcaaatatcctactcgattccaatctcgttagcaagttaagtgactttgggacctgctcactacttcatcctaacggaagcaaaagtgtgagaactgacgttacaggcacagttgcctatttggatccagaagcttccagtagtggagagctaactcctaagtcagatgtttactcgtttgggattatcttattgcgcttgttgaccgggagacctgccttacggatatcaaatgaagtgaaatatgccctcgataatggaacattgaacgacctcttggaccctttagcaggggactggccctttgttcaggctgagcagcttgctcgcttagcattgagatgctgcgagactgtcagcgagaatcgtccagatcttggaactgaagtgtggagggtacttgaacctatgagggcttctagtggaggatcttcatctttccatcttggccgtaacgagcaccggatagcccctccatacttcatttgccccattttccaggtaactaatctgtatatttgagtatggatttccagtattattatcaatctgagaagacttcgatcacaaagtcattaaaatttgcttatctgaggtctcaaaccgttatgttgcagtctaatggtactcaacccgttcttcctctgctttgttttcaaatatttcaggaagtcatgcaggatccacacgtggctgcagacggtttcacatacgaagcagaggctataagagcgtggctggacagtgagcatgatacttcaccaatgaccaatgtcaagctttctcacaccagcctaatagctaaccatgctcttcgttctgcgattcaagagtggcttcaacatcatttgtgaaaataaaatccttcaaaccctcaatccctgttctcttatgaaaaaacgtttttgccttttctgcgggaggcaacagagtaagtgagtaagattagtgttttcagtcttccttatacatatacatacgatctaatcatggatagcagcatatttgtttactttttcaagcatagtgtaagtcctccatatcagtcatatatgaaaagaagaagctggtgagatttgtatgtggatatgtatatatatatatatatatatatatatatatatatgttctgtatgaaaaaaaaagttatatgcttattcggtttgtgtgagaagaactgccactattttgttcttccattatgttcggctctcttaagaacaaagattagcctctaattattggacatgatctcactgatgatgcctttgcttagctaaaattaggatgagtcttacatttttagtcaagactatcgtgtaagacttgttttccacctggaagaagttaccttggattgcctatagtgatttttaatgaactcttaaaattcttgtgattaatcttacttaattagcagtggggtcaggtcgttttggcggctagtggcataactgtataaaaattcaggattgcactgaggtaagccaacctaacgcagcctttaaagacaccaacctggaaaatgctgagagtattcttcaggattttctcaaaagtcttgtgaaattcgtgtatttgtgtcaatatgtcgacatttctcttcatacacagatactgtcgcttttgattcctggtttggcttgttgaaagtcaaaaagccttcattattttaatacatgattcagcttctgcgttaaggctaggtttcgtcattggtaccgtggttgacttcgtgtgcatgttataacataagaaaatgttcttgcttgttgattgctccctctgttagataagtcatctcttttctcgtattgcaaattttaagtttgttcttgtttattctcttgagtgaattagaggtatgttttgagtgttctcatatggagtgtgttggagataggagcttcgatccaagcaaaggggaaaagtgttggcttcatgaggcttcgatgcagccttaaacgctaaaatccaggccaagcaagatggagatagagagagatg

SEQ ID NO: 29914 - DNA, 3003 bp, Unknown; identical to SEQ ID NO: 26213
  misc_feature (1)..( 3003): 2750-1469P.txt file - cDNA_ID_3023838; gDNA_ID_2214530; Annot_ID_184911

SEQ ID NO: 29915 - DNA, 3000 bp, Unknown; identical to SEQ ID NO: 12087
  misc_feature (1)..( 3000): 2750-1469P.txt file - cDNA_ID_3023846; gDNA_ID_2214530; Annot_ID_184908

SEQ ID NO: 29916 - DNA, 3003 bp, Unknown; identical to SEQ ID NO: 26215
  misc_feature (1)..( 3003): 2750-1469P.txt file - cDNA_ID_3023850; gDNA_ID_2214530; Annot_ID_184907

SEQ ID NO: 29917 - DNA, 3003 bp, Unknown
  misc_feature (1)..( 3003): 2750-1469P.txt file - cDNA_ID_3023854; gDNA_ID_2214530; Annot_ID_184904
tgtatcacatatcaatgtccatatgtgatttgagcataggaataccaaatatggatgaccaaatgtctcctactaattaataaaatattatctatttaatatttaaaaacattttaactcttcgaaaaactaaaaagtaaacaagattcacacaaaaatatgaacgtcattaacacaaaagatgtgaactctggttagtgttgaagataacgtgaaacaagattcaaatcctcgtggaagagcaccaatcgatcaccagaatcaaacctttgagcttcctcctagcttcggtaacgtttaatctcacctgattctcgtttttcttctcttcctgttgaatgtttgtgaacatagatatatataaagctgagatagatatagattcatgcttcaacggaaaagcatgaagaggaacaacaacaatcttctaacgaacaagaataagtatgtctatcttaaaacggcgtcgcatccagcaaaaagcatcgctaaagctactctgttcctcgtcacctctctcttcatatctgctggtctcttagacttattgggttgtttcgatttcgtgagttcgaatctgaagtaacttcttttttagaaactttttattcaatcaagtgaatcttgaacttgaagagttaataaattcatatctctctgtacttcagacaacttttacaggtctgaagcaggtaacaactagtatcagaaaatcaccaatcacaagccaaagattccctaaccaatgcggcgtcgttcagaaccaaactcaattatttccccaaaatggctcctcgagaaacaacgacaaacccagaagcagccattcaagaatatccacgtgtccttcttacttccgttggatccacgaagatctacggccatggaaagagacaggtgtaacgagagggatgcttgagaaagccaggaggacggcgcatttcagagtagtaatcctcgacgggagagtgtacgttaagaaatatagaaagtcaatccaaacaagagacgtttttactctgtggggcatcgtacagttactacggtggtacccaggtaggttaccggatcttgagctcatgtttgacccagatgatagaccaaccgtccgatctaaagactttcaaggtcaacaacacccggccccgcctcctttgttccgttattgctctgatgacgccagcttggatattgtcttccctgattggtccttctggggctggtaagggcttaacacacatgttaattctattctgttctctatttaatgggcttgttattggacctagctaattatattattattgggctagggctgaggttaatataaagccttgggataaatcgctagtggcgatagaagaagggaataagatgactcaatggaaagaccgcgtggcgtatgcttattggagaggaaaccctaatgtggctccaactagaagagatcttctcagatgtaatgtctcagctcaagaagattggaacacacgtctctacattcaggttaggatttctcaaaatatgtataatttttatatattgcaatttttaaataatctaaatgatcaaaaatgtttattattgtgaaggattgggatagagagtcaagagaaggattcaagaactctaacctagagaaccaatgcacccacaggtttaacttaagccacactttttgtacttaggaaatatttgcaaagattcgattttaaatgtgtgataatgatggaataggtacaagatttatatagaaggatgggcatggtcagtgagtgagaaatatataatggcatgtgattcaatgacattgtacgtgagacctatgttctatgatttttacgtacgaggaatgatgccattacaacattactggccaatcagagacacctctaagtgtacttccctcaaattcgccgtacattgggggaatactcatttggaccaggtttgtatttttttttttacattaagacccaaaaagttttgttttgtaacaaattaacacattgagtgtggttttttttttttatataggcgagtaagataggagaagaagggagtaggtttattagagaggaagtgaaaatggaatatgtgtatgactacatgttccatttgatgaacgagtatgcaaaacttttgaagtttaaaccagagattccgtggggagccacggagattacgccggatattatgggctgctcggcgacgggacggtggagagatttcatggaggagtctatggttatgtttcctagtgaagagtctccttgtgagatgccttctccttttaaccctcatgatttaaaagagattcttgagagaaaaactaatttgactcgtcaagttgagtggtgggaagatcaatattttcatgatttagccaatatcaagaagccttgaccaaaaaggctcttgtgtttgtttagatgattgagttgtattcatatattgaaattagtgaaaagtaaacgagtaattttttttccgactagtatgtgtctctatctccactagcgatcttttttccgactagtatgttaattgagttgtatattctaatgttttagtaaatgttataagtttagttctattttttttaaaaactttactaagatatttatttaggttggaattttttaaaattaaattcattaaaattataagaacaaaaataaaatagtatgttctaaaagtataatgatgtttttatagtatcagaccttgttaattttcaaatcatataaaatgtaaagatttatattctaatttaacttgcattaaaaaatctatagcattgaatatataggcaactgaaatagttcattttggtaataataaggtaaattaagaacatcaaaatttggtatctgtagatattagaaagaaaaaaatgtgtgtttggtaagtggttcaaagagaatgaaaataagaaaaatatgtgtttgataaatgtgatggtagaattaaataataaaaaatataaagttgagaaaaatg

SEQ ID NO: 29918 - DNA, 3003 bp, Unknown; identical to SEQ ID NO: 25789
  misc_feature (1)..( 3003): 2750-1469P.txt file - cDNA_ID_3023858; gDNA_ID_2214530; Annot_ID_184901

SEQ ID NO: 29919 - DNA, 3003 bp, Unknown; identical to SEQ ID NO: 25788
  misc_feature (1)..( 3003): 2750-1469P.txt file - cDNA_ID_3023862; gDNA_ID_2214530; Annot_ID_184897

SEQ ID NO: 29920 - DNA, 3003 bp, Unknown; identical to SEQ ID NO: 24875
  misc_feature (1)..( 3003): 2750-1469P.txt file - cDNA_ID_3023870; gDNA_ID_2214530; Annot_ID_184892

SEQ ID NO: 29921 - DNA, 3000 bp, Unknown; identical to SEQ ID NO: 12075
  misc_feature (1)..( 3000): 2750-1469P.txt file - cDNA_ID_3023874; gDNA_ID_2214530; Annot_ID_184891

SEQ ID NO: 29922 - DNA, 3000 bp, Unknown; identical to SEQ ID NO: 12108
  misc_feature (1)..( 3000): 2750-1469P.txt file - cDNA_ID_3023903; gDNA_ID_2214531; Annot_ID_134290

SEQ ID NO: 29923 - DNA, 3000 bp, Unknown; identical to SEQ ID NO: 12108
  misc_feature (1)..( 3000): 2750-1469P.txt file - cDNA_ID_3023903; gDNA_ID_2214531; Annot_ID_184943

SEQ ID NO: 29924 - DNA, 3000 bp, Unknown; identical to SEQ ID NO: 12111
  misc_feature (1)..( 3000): 2750-1469P.txt file - cDNA_ID_3023916; gDNA_ID_2214531; Annot_ID_134283

SEQ ID NO: 29925 - DNA, 3000 bp, Unknown; identical to SEQ ID NO: 12111
  misc_feature (1)..( 3000): 2750-1469P.txt file - cDNA_ID_3023916; gDNA_ID_2214531; Annot_ID_184934

SEQ ID NO: 29926 - DNA, 3000 bp, Unknown; identical to SEQ ID NO: 12103
  misc_feature (1)..( 3000): 2750-1469P.txt file - cDNA_ID_3023924; gDNA_ID_2214531; Annot_ID_184930

SEQ ID NO: 29927 - DNA, 3003 bp, Unknown
  misc_feature (1)..( 3003): 2750-1469P.txt file - cDNA_ID_3023974; gDNA_ID_2214532; Annot_ID_184981
aaatcaaactaatcatatatacaatttgaattcaagttataaattatagaccaaaatattactatccttttttaaatccaaatatggttgtgtgtgtactgttgaaaatcaagctagcatagcactggaatcctataaaacttaagtggactaagcatccacggataagcaataactacacatagaaataaatgagatgacgacaataatatacgtcacattctttggcctgtctctcttatataatccttcttctcattttgtttttctattctcctaatgttttttcagtggaatgccaacgttattatgtagtaatatagtaggagaactgagcaagcagaaccgtaaaacgattctattgttgaccggtttctcttatcttttaattgattaaataatgaattatcttaacgtgtatgttgcttcatatatagtagcttatagtaaaggataccatatcatggtaccccaaaatcaaataaaatgttctactacatggagaattttaaatgtttgaaataataattaatctaaattatactgtagttgcttatatagaatcacaattagttttttacggactaaaattaaataaagattgatgaaaaaaactatatcacatgtgtttgagaatcaccttacaaatgggccataggcttagaactgaagctctttggcccaaactaaaactatatttacttcatagttttattttcattaccaataagttgtatgaaaatatattttccagaatttctgatatttattttgttaagagtttctgtaaactttagttagtttgaagaaaataggtacaagttcaaaattttctaacaaaaaacagagcttttcaaaaatttacaaagctttcgatatatattttttttttttaggtttcgatattttgttttgttgttgttgttgtaagttgtagataattttggataataataaacatgttatcggagacttgaatgttaattacgatagtatgagaaacactacttcttttttttttggccaaaacatgagaaacattacttaaaaaagtatttccattcaacatcttttcaaaaaaatatgagaaacattacttaaaaaagtattgggaaccaccgaaaaatttaacatttcctcgtcagaaactgtcggttgtgccaaatagctagtgaaaataagaatatacaattcgactactggacaatgaatcataaggtcgagttttacgcaggcagataagatatgcttcttggtagtaactagctaggaaatcgactatggttttctttcagcggtaataacatgaccaaactatctggtcgtatggtttataggtttatgtttggtcgacatggtgtgtgctttacgtgctaaagtgctgacatgactttgtacctatgcaacaagccaacaaatatcttagtggctcaacagtccaagtcttaaaaggagttcacgaaaatggttttctaaaatgcgattccgctggtcaaaagcttgctacggtctgatattttcagaatgctgaatatgtcaccgactcgctttattacattttcgacatgcttatcacgattgtattgggcctattggctgacgaaaaattatttgtaacagtgcaacaaaccactgttatttgatacttttttaaaaaagatacttaggtaggatctatgattctcagctacatttgtgacagattaattaattatcgtataaattactatgtatccaccaaattagtgaagatgaaagaagatatttgtaaaagacgcgtgacgaggtctcatctatatatcacgtgcatcattttgttttatgtcctttgccgacagtgtctgtgtggtccgtcttagtcgtacactcgtacagagacctgtacctttcattttttcactttgtttatttttaggaatctctaactcctactactactactcttatactattattattatccacacatatctatttcataactggtaataacataaatattttagatcttttttttcgatttcactaagaaaagagtacaaacattatgtataaataaaaattaaatatatttaaaagaaactagtaacgtatgaataaataaagtagggtccaataggaggagccattgacttggaagcatatgagacagttgagaggcccaacagcccatcgccagctggatttcccctaaaagtcacgtgacctctctccccatctttcttcactatctccttccttcccacgtgaccttcctctctctctgtccctcgtccttcttcttcttcttcttcttcttcttcttcctcctccttcctcgatagagccttctccgattatgctctgtgtcctcattgttatctccggtacaatcatttctcttccccgatccttttctattccacgaatttcacatctttcgcatttgatcgtctttatattttatcttgttgattcaatcatacggatctgccggagtaaatgccgttgctctcggtcattgaatttgatatctgtaatgtgggtttttattggttttggtgattatgaggtttcattagtgctctcttgttaaagtttgcattttggagatttgagtttggctctttgatgtgagaatgtacattgaactttttgtgttgttgaatgatgaattgtaccttttgtgcggattttttgaggttactctcttgatattaaattctgtgggccaataacgaattgatgacataaagttgtttttactacagagaacagaacagagtcttcttattttgctcattttaaccaatgtcaaacaaaaacctcgttttaatccatgttacactttcagctaacttctctgtctaacaaaggttaacatgtctttctctcatttagtgcagaaacaagagcagatgggtctaattctacaccaatcaaagctttgttctcgatttagaaagcctcttttggggtaaagagatggtgagaaaataagttatacaaattatctggaagatg

SEQ ID NO: 29928 - DNA, 3003 bp, Unknown
  misc_feature (1)..( 3003): 2750-1469P.txt file - cDNA_ID_3023988; gDNA_ID_2214532; Annot_ID_134313
gattctttggggatttgaacttaggttgtgtgttaagtatgctcagaagaaacatttgaaatcactttcttgataagcctcttgcgttgttatgcactgcttaattatgttaaatccttcttattccacaggcatctttcatgaaaccaggtcataatcatcacgccatggaatcgtgaaacccacatggttatctgagacttgcgccaacaaactcctatgttctgctttgcttgcacctccttctttgccacgattcctgatcatgtaaactgttcatagatcatttattcctatggttattttggaatggacatcctttgttcgattctatttcctccacttcaaatttttgacacagggccaaaccatattacttgcatcttttgatgtttagagtccataacctcaaagtttccaggtgttttctcggtactgttagtaagagaccatgtccatcagtgtttctaatgggtttctaatctaaaatcctaaagaataaaagtccaaaaataaaggaaaacccaataaaattgttaggatcgttcctattttaggatttttaggattttctgaagtgtttagaaacagtgacgtggctagaaatgataggatgaaaatttagacaaaaaaaacaaaaaagaaaaaagcgtgtttctctttcctcttgtcctttctcttttcttttggttctccgacgaaaattaggtgattccaatcgatccctttcgattacaaacttcggcgtatcgaccatgaaatcgggagacaagagccacatgtactcaattttcaaccgctatgtactcaattttcaaccgccgggatgatgatcgacgacgaggttgttcactaaattgattcttcgaaccaaatcgaaaggagtggcaaaaagcttcagaaaagagtagggtggaggctgcttggattaaagagaagtatccagatagaattccggtgagtgtctctcttgtcattgatcgatcatacaataacttgcttaactttcacaacaattatagccttttctctacgcattgtttggaattgtggtgttctctacgcattgttttaaacttctgttgtttaagaaattatagaatatctgcataaagtatgttaaggtttatacgtttattcacatgaacatgaccatgcttctgctatcgaagaagaattgcaattctcatggaaaagcctctgttttttatagtgcttagtaagtatagagactagtaactagaatattattagattggtttatgcatttcttttatggcttttgatgaacaattggtccatatgccattattttcggttatatggtccttatgtgacacattactgttaagtgtttctttctcatctaaacgttgaagagtagtttgattgttgtattgaccgttaagcatttgtactcttactgaaatcttgagagctgtcattttcaggtgtatgtagaattgcagactacattctttaagttcttgagcttggaacaatacttttctcactctacttgtttctgcaattaaatggtaataacaatttctaatgtcagttaaaaatctttcaagttgatttttgtttagctttttctattgaggttcaaacttgtaagcacgcgattgaaaccaactgtagaatgacagatcttgtttgttattctgtctttatgttactttgtgtcatcttctatatacttttacataccttacagggccgcttagtgatcttgaaatggctttaaagaacaaacttatcactgacatgttgtcaaatgcttgaatggtgccttttatgtcttgaaagttagtctttttgtgtcggttaatgcttcttcacttgtttttgttctgttcggttatgaatcttattatcttaagttgtttgtgttctgttctaaattggtttcattgtgctctgttctaattggtttgtgttcgtgttcaaacttcaatagattggtttgtgttctgttctaaatgaatttcaacttcgttttaaggatgatgtccctgtcgagatgcaagagttcaaggaagcataaatagcaagcacatgcaagtgttgttctgttctgtgtataagtgtataggctatggtcgtgtgaagatgcacttgagtttgtgtgtcgaattttgtgagtgtatcaagttttgagagcgtagagtctgtgtcaagttttgagagtcaaatgtatcccaaacactttcacatttttttcaaaatttttttttagttttattagaaactcacttaaggatttttttaatggaccaaaaatttttcaaaaactctacaaaatctctaaactacaaaaatatcaaaattaattaataaaaaatacatagaaaccttacttagaaactaaccaatgtggttgctctgagagtactacaaaaataaaataaaatgtgtaatatacaaattgcaagagaatacataacataacagagaaattcatatgtacagtaattgaaaatcgtcgagtaaaccaattttggtttggataccaattcagtttttggttagattcgggtaattaaattaaaccactcaatgaaggacacgtaagttcttcacgaaccacatctgttcccttaaaaaaaaatctccaagtcccttgcactattctcctctctttctctccatcctccatatttgcagagctcgagattctccttccctatacaactctcatctgtaatcgatacaggtttgtcttctacctcttctctttggttagattcttttataatctccgtcgctgcataactctgactgggttttcttcggcaaattctgatttcgtcgctttgtgttagttttagttccttgatttctaattcactgaattaagaactcgaagtatgtttactgttcctttgatctgagggttaggttcttgtacttgtaagaaacttgcttgttctgtctcatcgttcatgggatttgatatatcatctaattaatttttcttctttgatgaattttcagatg

SEQ ID NO: 29929 - DNA, 3003 bp, Unknown
  misc_feature (1)..( 3003): 2750-1469P.txt file - cDNA_ID_3023988; gDNA_ID_2214532; Annot_ID_184974
caatatttaaaaatattttagaccttcattattaaagtttgtatatttatttgcagtggatgcggaattaccttgttgaaaagttgcggtaataattgcattattataaggtaaaaatgtgcatttagaaaaggataaagtaaccaaagatacaactttcggtgtcgcaaagtaatgataagaaaagaataaaattggttcactgtttcttctctttatttgagtattaataaggtacggaatgaggaacacatgattatgagagcaagtgggggcacatatttgttagcaacaacataggaaatgaaaaatagattcatgtctataaatcttcaattattttcaattttatcttagtaaataataagtcaagagtactgatttaagatccctattatccaatactaacaaaatgtgttaaatcgtaagccctaaaaactctatgatatttgttatagacagagtcaaaacaaaagttcttaacctcttatgctacatctttggattctaccaaatcttcttgcactctttaaaaacgtattacaaaaaaaaaaaaaaaaaaaaaaaaactcaaatgagaatgcaggagtggctagagattttactgattcacactcttattgattcatcatctttatcaccacaaagactcagagtaatgaatagaatcatatcatcacaaggatcagatttgatcaaacaaaaactctctcaacacacttccttcttcggcatcaagctatggatcctcatcacagcttctgcctccatagccttcctcttagttctgataatttctgtcctcctctgtttcatatttcacaggagaagatgtagccaagaaccattcagactaagatcaaagctttgtctacctttatcacacattcccttaactaacaaacaacagattccttataaccgttgcggcgacgatatagagagccagagaatctctcaggttggttggtcctctgctcgtctttcctactacacacgcagcttctcctctaccggcagctttggaagcttcaatgtgtttacgttcatggagatcaagaacgtgacagatagttttgcagatgataatgtgattactaaaggagattcttcaacggtgtatcgcggaatcttgatgggtacagtcactgttgctgtcaaacgattccttccaaggtttttacatttttgcttgatgtcctcgtatatcttagaatcttaatattttgatctgagataaagagtaatagcaggtatgaagataaagatttcattacaaaagctgagatgattgcaaatgttagacacaagaatgttgtgagactccttggatactgcatagaaggagatgagaggtatatagatatataacctatgatgtgtgacttacgttaaaattaatttagactcatacttaagtctgtataaattttagggttcttgtatatgaatacgctgagaaaggcgatttgcacgaatggcttcatggatctgcaggaagaaatcggcctctgacttggagaaagaggatgaagatcattcaaggagtagcaaaagggtttgatgatcaaaccacattttggttttcttgtcttcttttatgcatgaatcattctgatggttaattattaagtttatgttctgatcagccttgcgtatattcacgaggacatcgaaccaaagatcactcatcaagacataagaccaagcaagattcttcttgattatcaatggaaccctaagatacttgatgttggattcattggtcacagtgatattccaactttgattccttcacctggtaatatggatgagaaaatcgacgtttattcctttgggaatatgataatggagcttgtctctgggagagtctctgtagaccaaagttcaccacatgtgagagtgtatacacaatacataatttaccaataaaaaccatttttagctaactagaaacactgttgttcttggcaggtttatctagtggactggatcaaagagatggtggcaaatcatatgatagtagatgttcttgatcctagtcttcccgaatttcctacaataaaggaactcaaacggattgtgttgatttccctgcgttgtgttgatcccgagctaaaagagagacctaaaatgggagatgtgattcacatgctccaaccacatgacttgctgctgaataacaatgtaataaaactttttgacattcagtttcttgttccccaagctaaatagttatccttactttgttctttctctgtttccaggcaatacagaaggctcagaagattacccggtcacatgaggtttctgcaataagtatcagacaatgagtcctaagcaagcaataaaatgattgttaatataggatcttctgctttgtattaactaaattaagggttccttttaatttaggtcacagcaggctcagctgtattgattgtgttttgcatcctttccaactttgttatatgacttccctatatatcacatgtgttgctattgatgcaggatagtaatcaggaagataaatttcttgaaccaaatctgtataggaacactgataaaatagaaacaacgattttcacaatcttggtttccaaggaacttgaataacaataaaaactagggatagtataatgaagttacaaatttattactttgacccttcttttacttaaatttccactgttgtttttctttttggaaaattatcttttacaagtttttttgcgtttcattaattctatgttacgaacacaactttttgaccaatttataaaatcggtgagttacaataaccggtagacgagtaaaccgggattttataagtgctctgaagatcaccaaacaatctctcctcacgaagatcttcagcttcaaggacttttaaatcatcgaatctctctgtaagttacgatctccgactgactcttactgggtaaatttcgaaaacttgaaactgggtgtttccgaccgtcgaatcggattcgactagatatg

SEQ ID NO: 29930 - DNA, 3000 bp, Unknown; identical to SEQ ID NO: 12139
  misc_feature (1)..( 3000): 2750-1469P.txt file - cDNA_ID_3024018; gDNA_ID_2214532; Annot_ID_184959

SEQ ID NO: 29931 - DNA, 3003 bp, Unknown
  misc_feature (1)..( 3003): 2750-1469P.txt file - cDNA_ID_3024036; gDNA_ID_2214533; Annot_ID_185011
ataacttttttttgtcaacaaaatatttttggacccttgacctataatctcatgcggtccggaactagtcgggaaaaaccgtttacataacatagtgacaacccatgctgcctcaactatgcttgcaatgcttcgaagttcggacatccagatattgctcgatttgtattgctgccacttttactaccattcggatctctatcttggtgatacgaagatcaagtgtgcatgatcttgaatcaatcctataaaagaaaagctaaagatgatgatgttgttagaggttcttcggagttgcaataacataagcatgttgtattgtcggccaccttaatttcgagttttttctgcttcgtcgttgtcttcttctctcacgacacttatcaacataaacagcaacttatgtctctactatgttttgatccttagtaccccaaaaatattattttaaagcaaatcaacataatcttaatcaaatgtctctcttttcattattcataacattttttttagtctttaaaaccacgcgccttaatgtcaaacagtttcttgattacctttcactttgatttctatagatttttctctctttccgagtaagtatatacttacaacatgtcatacatatatagagtcaaattcgattagaaaagaacattaaagtttagtaccaatgaatgacatgttgcacttgcaatgtctaatatgttttccaagtggattgtttcgatctgtaacttggtaatatggtatgggtcctttaaaatctttaaaataatatcttattttttggattctaatctaaaggatatccatacaagtggtggaccgttaatatagtacttcacgttcacggaagggcagagatcttcccagaagcaaacaaataaaataatttttcgtaacataaatatatatctatctttatatgcgataagctgcggcggatttttttcataaagcgacgtattttttattaagtaaataccataggtaattagatggcaagtgtatcgaagcaggaaaaagtatttaataattttaataaattaattaattactaactagtgttttgtcaactcatgaatttagtatttgaaaatgattattcatgaacttttttgttggtcaacattattgtggaattataagcatttcaaatgaaaactacattttttttcatatcctcaaggatcacgttgagtaaattatctgttttattacccaacaaaagacaagaaaaacaataatatttaaaagtagaggtggaggtggtgagtgcacgtcaatagtgcgatcttctagcaaaacattagtgagttcggacaactggagtctttggttctctgttggagaacgtggaccaacaagctagtgacacataagcttccaaagtagacccctccaaagatctctagttctttaggtgcccaagtgatatacctctctctcaacctctttgaacaactaactcggtcgctacacgttacttactcgcttccaatatttgtttggttcgcttatttttaaaggtcttccccgtgcttcgtgtacaaacaccgatgcaccctcgtcgacatcaattgttgacactttttaagcactaaaagttagttggaggaaattgatccaatgcatattactagagcatctaatatttgtttcgatttcatccgatagaccttctaagttctaaccaacatgttttcaacaccttttgacagaacactagtgtaggccttggaaatttgtagaaagaaagccaaaaaagaaaagaaatttaaggtcattaattattaaaatgttgttaagaacttttaaattaaaaacgggaaaaggactccatctcctcgcatttaacaactcgagatctctaccactattgtacatagacattctataaatctatcggtaacagaccgcaaactcaaacttttgtagtttagggttaggactattttctggtgtaacagacatgtatgtatttagagactgtacgagtgcctcaacttagacatgttcgttttggtaatgttttgagatatataaaagaaaataatgtttacaattatgagatcacaaagtttagaagagtgattgattggattaaattttattctttgaacgtagtccaaaattgacaacaaaaagtgataattgattcgtcttaattaagataaaacaattctcttcatatgattggctactacgtaatttgttatcacgattacaagaataataatacatcattcgtagattacaaccgaatattccatgtctctgatttcctataacacgagtcaacaaagaaaaagaaaaactaaaacgcgcaacaacaacaacaacaacaacaaaagtcaaccgaccaaacaaagggtccgaaaatcaatcgacacgttttgttagtttaccgttcccacgactcgtcgggcagatctctcagcacttgtcggtcctaacttaatgtccttttaacagtaaaattaaaacacaaaccgttttctttgttgaagttaaacgaaccaatttattaaaccgttgacttattccattttatccttttttcgggtaaagaatcaacgagacctgatcaaaccacaacttgaactctttgttgataaggataaaagttaaagtactcaagttttctttcttacaacatcccaagaacttctccaagtgtcgttactgacatcatcaaggtatcaaaacctttcttcctaactatccatttgtctaattaaaaaggttaaaagctaatttaattaaagagttagtactgttttgaatttccccaagtgggaagtctttatttatggcttcacgatttcaaaatccagaaagacaagtagaaaagaaacgtccacgtcggataataaaattaaaattccaactttatttctcgttcacatttgacacttcatcacacgtataaatatcgtcgtgtgtccttagaaatttacacacgaaaagttagttaagcagcaacaaaaaaaaaacatg

SEQ ID NO: 29932 - DNA, 3003 bp, Unknown
  misc_feature (1)..( 3003): 2750-1469P.txt file - cDNA_ID_3024040; gDNA_ID_2214533; Annot_ID_134330
tattttggaattgtgttatatggtggatgtatttgaattaatatttaaaattttttaaaatattattaatatgttgttttaataggggttaaaacttcagttttttaacaattgtctcattgattcgtggtatagcgttacttaacaacaattataaactgtaaaatataaatattttataaaaataaaatttgcaagttttaatatatattacttttacaaaataaatcgtcccgcggtataccgtgggttaaaatctagtactaattttaaactttgattatatttaaataccaaatgtttaatcaatagtgaatcttatgatatttatgagagaaagaaaaaaccatatctgttttgtcaaaaactcttaattacaatcatccacgcaacacaattattgttatatatatatatatatatgtatccttaacccataaacaaattcttcaatacaaaacctgatattcatataatttctgtgctaaatcatggcaagaactgagttgtgtcacgataagccgtttgatccaagccattcattgaacatcctgataaagttgaaagcatcagacacaggtttgagtaatacattaacaatgcctaaagagtttgtagagaaaaacttatttccatggtttagtaaacatcgtcgtgtaaaattgtcacaacacgattcggtacaattgttggatttatacgaatacgattcgaagattacaacaactcttattatgaaaaaagagcaagatggaaatttcaagtttcacggatggagtaacattcttgataaaagaaagttcaagactggtgatattattggattttggtgggataaattttacgatagactcaattttatatcactatcgactgcttgatcgatgaaccggacttcacaacatcatttctcgaatatgaatctcgggtcttgtcatgtttgttcgagtctggttataaatatattcctttggctttgtaagattatgatatatataatttttaagtattaagaaataatcgagagaaacatgtgtaacttaagaaaatcataaaacaaagcataacttaggttttgtatccaatatcttcaggttttattggaatatatgttttatgcaacgggggtcaacaaacaagtttacacatagcataagagatccaaatcaagtaatcaaaggaccgtacaaatcacgaaataccgaactatcatcgttttttgaatccgtatttcttgcgttcatagaagagatcggttttcgcactgccaaggttaacaatcttggggcaaccatctctgtctttctcctgctgtgtacactctttgcagtaataagcatctgagattccaacgccaccgcatataacacaccgaccttggaatgacccgtagttgcattcatcacaaatacgtactagagtacacggacgcacataagaatcacaaatcacgcatttcccatcgcatttctcacacagtcgtccaatagcaattccgggttgtttccggcacatgatcaaatcagggtgatgcttcgccatggcttactggaacagtgtttgatctgcaaaccaaaacaaaagcaaaaagaggtcatttgtctatatactcattcacaaaggaaaaggtgagcaagagatagcttagtaaaagaaaactaataagctccttccaactaaatggagactaggaattaataaaactactgaaaaactaaactctaatcaacagttagagaatcagaaaagaaagtaaaacttcaaaaaagaagcttgtcactaatagtttctcagaggaatttcgtcgaacaccttacatgcatcagttccagccaaaattttctaatttccagttccagaggcctactctactaacccaacaaaatcgtggaagagaaactatcgataagaaatttgaaatttgatcaaactaccgaaagctccatcaataagcatagacattacaaaatacaaaccctaagatttcagagcaacgaaatcagtacacaaaataaacaaaccccagaaaaaggtgaaataaaactcacacaagtaaagggagatctaacttgagccaatagagaagaacgttgcgacgagaaatttccagagcgccaagatcgacgacgaagcaaaaagagcaataaaacgaatcgggtcggattctacacaaataacgaagcatccagattccagtttagtaaagtgggtccaatcagaatctttaaagcccaaagtaaaagcccattattattggaccagattagtttaagttgctccaaaccaaaccggcagtcaaatcaattaaaccatgtcctaatcaatagtacccaatttagacccggtccaaacgttaccgtttatgagtgtgcgcaactagcagctgccactgtcagtgccaaattggtaatttcattgacctagctttgactgagtatcaccacagtgacgtggctttttcacaattataaaaaaaatgatcatattctagacatggaggtaaagtaaagcaaagaatctgcatttttgtattttctctaaggaacaattacaaaatcttgataccttgtgagatcataaagaaggtcgttaactcgttatctattatatttatataccttgaattcttgatacgtttgttttacctttttttctattgataatacgtttgaagtttgttttactgttacacattgattttatatgtgtttcccaaaaccgtttaagtttcagagtccggagcagtaactcgtaattcactaatactggtattaaatgttgttatttatgggtaaagcataaatacttaaattcaattattataagaaaataaattaaaacccgaccccatatttttcgtccttttaaaagatggagtcctcgaaaacattacgtattagtaagttccatgcaaaggacaaacatataataacaacaacttctcttctttactcgtttctctctctctcttttcttttcttttcttcaagcgcttctttaatg

SEQ ID NO: 29933 - DNA, 3003 bp, Unknown
  misc_feature (1)..( 3003): 2750-1469P.txt file - cDNA_ID_3024040; gDNA_ID_2214533; Annot_ID_185008
aagattatgatatatataatttttaagtattaagaaataatcgagagaaacatgtgtaacttaagaaaatcataaaacaaagcataacttaggttttgtatccaatatcttcaggttttattggaatatatgttttatgcaacgggggtcaacaaacaagtttacacatagcataagagatccaaatcaagtaatcaaaggaccgtacaaatcacgaaataccgaactatcatcgttttttgaatccgtatttcttgcgttcatagaagagatcggttttcgcactgccaaggttaacaatcttggggcaaccatctctgtctttctcctgctgtgtacactctttgcagtaataagcatctgagattccaacgccaccgcatataacacaccgaccttggaatgacccgtagttgcattcatcacaaatacgtactagagtacacggacgcacataagaatcacaaatcacgcatttcccatcgcatttctcacacagtcgtccaatagcaattccgggttgtttccggcacatgatcaaatcagggtgatgcttcgccatggcttactggaacagtgtttgatctgcaaaccaaaacaaaagcaaaaagaggtcatttgtctatatactcattcacaaaggaaaaggtgagcaagagatagcttagtaaaagaaaactaataagctccttccaactaaatggagactaggaattaataaaactactgaaaaactaaactctaatcaacagttagagaatcagaaaagaaagtaaaacttcaaaaaagaagcttgtcactaatagtttctcagaggaatttcgtcgaacaccttacatgcatcagttccagccaaaattttctaatttccagttccagaggcctactctactaacccaacaaaatcgtggaagagaaactatcgataagaaatttgaaatttgatcaaactaccgaaagctccatcaataagcatagacattacaaaatacaaaccctaagatttcagagcaacgaaatcagtacacaaaataaacaaaccccagaaaaaggtgaaataaaactcacacaagtaaagggagatctaacttgagccaatagagaagaacgttgcgacgagaaatttccagagcgccaagatcgacgacgaagcaaaaagagcaataaaacgaatcgggtcggattctacacaaataacgaagcatccagattccagtttagtaaagtgggtccaatcagaatctttaaagcccaaagtaaaagcccattattattggaccagattagtttaagttgctccaaaccaaaccggcagtcaaatcaattaaaccatgtcctaatcaatagtacccaatttagacccggtccaaacgttaccgtttatgagtgtgcgcaactagcagctgccactgtcagtgccaaattggtaatttcattgacctagctttgactgagtatcaccacagtgacgtggctttttcacaattataaaaaaaatgatcatattctagacatggaggtaaagtaaagcaaagaatctgcatttttgtattttctctaaggaacaattacaaaatcttgataccttgtgagatcataaagaaggtcgttaactcgttatctattatatttatataccttgaattcttgatacgtttgttttacctttttttctattgataatacgtttgaagtttgttttactgttacacattgattttatatgtgtttcccaaaaccgtttaagtttcagagtccggagcagtaactcgtaattcactaatactggtattaaatgttgttatttatgggtaaagcataaatacttaaattcaattattataagaaaataaattaaaacccgaccccatatttttcgtccttttaaaagatggagtcctcgaaaacattacgtattagtaagttccatgcaaaggacaaacatataataacaacaacttctcttctttactcgtttctctctctctcttttcttttcttttcttcaagcgcttctttaatggcggctgttcaatgtctcactttcctcttcttgtttcttctccaaaacgcgacgtcagcttcacctctccctctcttccggcggccgatccaaagcaaccacagcaacttcgtgaagcatcctcgccgaagtcaggtggttttcccggtgaatcatagtagttgtgatctgttcgccggcgagtgggtgcgggatgagacttacccactttaccggtctaaagaatgcggccgaggaatcatagatccgggattcgactgccagacttacggcagacctgactccgactatctcaagttccggtggaaacctttcaactgcaatgtccctaggttatttaaactcactcacttgtcactagctctactttgttagattaatttggttaatgttaattttagttgtcttgtttttgaggaagaaatattcattttattgataccgaggttataatctgacatccaatagtaaaacttatgctttggcaaatgaatttttggtagggccactataccaaccaagattgtaaatttgattactttatgaaaaagacaaaaacaaattctagctggttataccaagaattgtcatatatatacgatagtatttggatcatacaatgatcccaaattatttgttagtatttaatattttatggttatagacattccttcactacatttttttcataattaggggtattacatacatacaactttataatatatttttctattagttaattatgagagattctccttttctaaatgtgtaataagtacaagtttaacagattcgtttttaacaaaaaacaaattgattttactgttaattaggtggagtttggtacggttaatataataagtacttattattttaaatatgtaatgtcgacgcaatgatttatttatggaacccctttctgattatactccatttgggaaagcagattcaatggagtgaagtttctacaagaaatg

SEQ ID NO: 29934 - DNA, 3003 bp, Unknown; identical to SEQ ID NO: 29932
  misc_feature (1)..( 3003): 2750-1469P.txt file - cDNA_ID_3024044; gDNA_ID_2214533; Annot_ID_185007

SEQ ID NO: 29935 - DNA, 3000 bp, Unknown; identical to SEQ ID NO: 12148
  misc_feature (1)..( 3000): 2750-1469P.txt file - cDNA_ID_3024052; gDNA_ID_2214533; Annot_ID_134328

SEQ ID NO: 29936 - DNA, 3000 bp, Unknown; identical to SEQ ID NO: 12144
  misc_feature (1)..( 3000): 2750-1469P.txt file - cDNA_ID_3024052; gDNA_ID_2214533; Annot_ID_185003

SEQ ID NO: 29937 - DNA, 3000 bp, Unknown; identical to SEQ ID NO: 12143
  misc_feature (1)..( 3000): 2750-1469P.txt file - cDNA_ID_3024056; gDNA_ID_2214533; Annot_ID_185000

SEQ ID NO: 29938 - DNA, 3000 bp, Unknown; identical to SEQ ID NO: 12153
  misc_feature (1)..( 3000): 2750-1469P.txt file - cDNA_ID_3024096; gDNA_ID_2214534; Annot_ID_185035

SEQ ID NO: 29939 - DNA, 3003 bp, Unknown; identical to SEQ ID NO: 25817
  misc_feature (1)..( 3003): 2750-1469P.txt file - cDNA_ID_3024110; gDNA_ID_2214534; Annot_ID_185030

SEQ ID NO: 29940 - DNA, 3003 bp, Unknown
  misc_feature (1)..( 3003): 2750-1469P.txt file - cDNA_ID_3024114; gDNA_ID_2214534; Annot_ID_185029
atgcacattccagtgacaccaacctgtcacaacaattataattcatctgcattttcctcaagaattttatgcgaactgaaagaactttgtttaagtttagcaccttttttgagccattggattttagccaattaacagaagcgcggatatctttgatagcacctggccaatcaaggccatccattagatgctgtgcctctgcagtatccaaaccaacctttcctcgatacaagctacaaaatataatattgtgagacgatactcaatgaaccataatttacaaaactgaatcttgcagttaaagaagcactcactcaggtataagggctttgaatccaggctcaagttgtgagattttaatagcatggttcttgatctcaaagtcaacaccccaccattcttgaatcaccacaatcccaggcgcatcatctttaccgaccacataggcatcaaatgtctaaccaacagaccacagtgtataagttttctttagagtaaaatcaagattatagaagaatcatacacaaaaaaatagctaaatcaaatgcatttttcacaatcctaataatcaagaaactccaatgttcaagagaaaccagtctatccatggagagagttacaagcaaagcataacatcgccgaaaactctgaccaaaacaatacctaaactgtttatcactatactgatcatttgtgaactgaaacctaaactcacaatcttccttcttaaatcaaccagttctataaccaaacctgataaggactatgattatacggagatcttcagaagtagctaagcaataataacatctcttactctcattcccagtttctctaccacagaacaacactacacaatcctgaagcagaaacgccattgaaatgataaatcaaatataatccatacatcatacacaacagattccgagatttgggggatatcaaaagaaatgatgattttcattcaacggaaaggataaccaaaatttttttttacttcaaaatcaggcactacggatacagtcgaagcttatgatacaccaaacacaaccataaaaatggcactaagtagaaaaaaaactcagggagagacaaaaaagagaagctcttacagtgtcatctctttggatctgaattttcctgaaagctgaatccgccattgatcgcactgataagcgagaaaacgaaggaatcgaggatctatagagcgaagaagtttttccgattgaagaagagaagaatctggatgaggatgacactagtgtacttaacattgtttttgtgtcttgtgaggaaagaaattcttcagagtcaaccccaaacgacacaaaaacgacgacgtatctgtgagtgtgaatctgggcccggtatatttttaaaaatatatgggccattaggcccaaataatcaagtccttttttgtatttgtatttgtatttgcgacgacgataatacgtaaatagtagtttggtaatatccaaaaagccagcatcgcctctgctacggcgttgtctcttttctcccaattattagcttatatcaatataagaaattattttttttgtggattttgtaaccatgacaggaccagcttgattttgtttttgtaagattcgtggtttctcgatttcatgaaaatgactcaatgatttcgtcctttctatagtattttgggttttaaagtcaactagttgacttcaaaacccaaacttaacgtccatatatatacacatacacagtactgtattatgtgtatatatatggacgttaagtttttgaaaataagagatatatagggcttacgaagccaatatctagataagtgatatcggaacaaaaatcaatcacaaaatatctaccaagagatgtcatatgtgatacgtattaactttatatacatatgattagttccatgaatttgaatttaaaaggtatagtgcatgtatcaaagggcatatatagccacatctcaattgggataaatgaaagagttcatcacgtttcttttcaattcccaaaatggcgatgcgaggaaataaaggcaagttattgatttcgctttctataataattttaaatttttgttgtataacaatgataaagaaacgttcttcaacaacaacaaaaaaatgttacgtacgtgactttaatttgcgtgacgactactcatcattcaccacaagagcaaacggaataaaaagacaaactttatcgttatcctaatttgaaccaaaccacaaaatagccaccacaaatagacaaagatatacatacagcgagacacatcatgcaaaaatgtatatatgtagcttagtggatcattaataatgtttagagaaacgatcgaatttaatgagacttattttcgttgaaaaagttttgatagggtgtaacttaatatatagtatcagtctagtgctaaacatctataagttcaaattccaatttctgtgtatattttggcctccattctacaaatctatatttatttaccacaatgtataatctagacatacaatacgttttacaaaaaaataatatgtagtacatacaccatttgtgaagtcatgtatctatttgacaaactagtccaatggaatttgactatgactaatttattattgtcctttctcttgtgtatctttttttttcttcctaactaaacactactacacattatgggttgattggtatccaataccgctgtagtatggagtatattgctttgataataatcaatcaaaggatgctactaaaaacgatattttaagttttatgatttttttttctttcgtaccgctactttatatcgtttttaaactatttttgtatctcttaccgttttttctacttgctaaaaaacttatacgattttgtgtggccaatcggtcctatattttatatatacaagcattcatagacgtgacgacgcattattttacttaaccctatataaacatatccaaaaaccgcaagaaagctcacaagaaatctcctcccatg

SEQ ID NO: 29941 - DNA, 3000 bp, Unknown; identical to SEQ ID NO: 12151
  misc_feature (1)..( 3000): 2750-1469P.txt file - cDNA_ID_3024118; gDNA_ID_2214534; Annot_ID_185026

SEQ ID NO: 29942 - DNA, 3003 bp, Unknown
  misc_feature (1)..( 3003): 2750-1469P.txt file - cDNA_ID_3024137; gDNA_ID_2214535; Annot_ID_185067
caagactttcgaagtagcttggttctgtttgttcaacgttaattgcaccaattgttccactgctatcactgaaacttacctttaaccttaatgtatacaaagttgacacatccatcaaacttgactgtgataattgggaatctttcagtgtattgtgtactgcttggattccgattatagcttttaggtaaaagaaaatttcagtatgcaatgagtcattcatacaccatgttcacataaatgaaaggactggtaacaaaacttaacttctgtttttcttgacacacacaagtacaatccttgataaccttaaaacaacattattgtaccaaaacacagtagaaagtaaaagaaattaaaaagaaacttgatagaacaagcaacatcatatggttcttcatcatgtaagataggcatcgcaatgcaagaagtcccatatagttccaagagcatctcgtagcatctccaaaacacaacccctctcagtgttctgctcctgcagaccacaagtattatcaccataagcctcgcacttccattagagtttctaaaatagtacaagagcacaataatttacctgtattttagtgtcgatgtctttaagcgtcaaactcacctccctcttggtttcccctgttccagtcgtctcattgaatctatcagtctctcttaccctaagccttagagttttatttttgtagatagtagctctaacgtgacaaacttcaaattctttgtatccatcttcagataaagctttaccaaacggccaccttaaaccgccttttacatttggatcaacagttgctgattccaatagcgctttaatgtcacctatctctttatcctgccgatcaaagaaagatcacacaacctaagtctaagaagagcatattatttatccatatattgtaaaatatatataccaaacttgaacttacactgagatacgttatttccctcttagcggtgagcgttagtctcatgtcgagattcttatcaatgcatgacacatcaacaaccaaatgccttacaggattaaggtcgacctatataaaagcaaaactcaagattcaaagttagatattaaaggaagaccaagtaaaaatgtgacatctatcaaattcttgtttgtttttcttgctagtccgagaacaataaagaagagattttactattggttgtagtcactacacacataaaactcgagacttgccttgtacatactgagccgtccatcttccttacgggtacatttacagttgatggttgcattaggacgagaataatgcgatacctaaaaatagaagccaaacccaaattagcacattcaaatgacattcgaagtatagatctaaatctaagaaaatgaaacgagtaccttcacagtgtatgtttccttctccttatcaatagagaatccatggcttggtacaacattagattttatgtgttgtaagtaagacattgggagatcagtagagaacatcttattcaagttttttagtgaacattcagccacaggaccagcttgactcctggtttaaagttgtatatgttagaaaaaatataaacccattcctgaaaacagcaaaatgtgagatcagacggtgaatcgcttacccatagaagaaaattttaccaaaccgagcaaccagtctcgatacatgatgatgctccttcatttcagtcttaactcgctcatatgccaacacaagatcctccataaccttctcagctactaatagccactgagttctctcatccttcctctctccaatattcatattcactgaatataaacatataaaaaaccatactcaacatagatacaatgcatcttcttttggcaaaaacgataatagcacaaacaaaatagttaatagtattgtttatttcagcatctagatgatattcattttgtcaaacacatagccaaagtctactaatagtttcttaccattttggacattgttgttcatcagtattgaaggcttttctccttttctacactcgacagaatctgaggacaagggcacaaacttaacatacgaaggaacatcgtcctcaattccatttgaaccaacaagaaaccatttggaaatggaatctcctgaatagataatcttgttgcgtttaacactgctagtgctactcttaaagtcaaggttcttcttgaattttgtaacaagagaatctggaacaggggtaggctttgtcggatccttcgaatgcctcttatgtggtggaatataagacatgtctaaacctgaaactcacaacaacatcaaccaaaaacgatttcaagataaaacaaaaaaatctcaaacttggagctcaaataagaattgctttacaacgagcgaagaagaatataaagacagaaactttaaggtgagaagagagaagtcgaatcatacctgtaggctgtagtcgaaactcaacgtcttttaatattcctgcagagaagtaacagtgacactcaaatagactcttcgctccctttttaatctttcaattaactctcatccgtttctcaaaaatgactttaattagattgtgtttggtttcgatagggatcacaattggacaaacctcaagcctgaaactatcaggttcccgaggggtttggtcttaaatgcaggttttattgcaacaaggttttggttttgtaagaatttttcactaaaagtaacaattttttaagtatttctggctatcgaaaaatagaaaaagaaatgttttcttaaaaagtcttttagcgttgaggttctcagactctctctctctctctttgcccctacctatatccgccgtcttgaatccacagaaagtccgttttagtttccagctaagtgatgtcgtcacatatctaatggtggtcggtcactacttaaatgaagacagagaagcttttctagtcttcttctttctaaagttcttacctttagaatttgaacaaaagtatcagcgagctgatcagacagagaagctcaaacaatg

SEQ ID NO: 29943 - DNA, 3 bp, Unknown
  misc_feature (1)..( 3): 2750-1469P.txt file - cDNA_ID_3024161; gDNA_ID_2214535; Annot_ID_185048
gcc

SEQ ID NO: 29944 - DNA, 3003 bp, Unknown; identical to SEQ ID NO: 26225
  misc_feature (1)..( 3003): 2750-1469P.txt file - cDNA_ID_3024189; gDNA_ID_2214536; Annot_ID_185108

SEQ ID NO: 29945 - DNA, 3003 bp, Unknown; identical to SEQ ID NO: 26226
  misc_feature (1)..( 3003): 2750-1469P.txt file - cDNA_ID_3024192; gDNA_ID_2214536; Annot_ID_185107

SEQ ID NO: 29946 - DNA, 3003 bp, Unknown; identical to SEQ ID NO: 21021
  misc_feature (1)..( 3003): 2750-1469P.txt file - cDNA_ID_3024200; gDNA_ID_2214536; Annot_ID_185098

SEQ ID NO: 29947 - DNA, 3000 bp, Unknown; identical to SEQ ID NO: 12196
  misc_feature (1)..( 3000): 2750-1469P.txt file - cDNA_ID_3024204; gDNA_ID_2214536; Annot_ID_185096

SEQ ID NO: 29948 - DNA, 3000 bp, Unknown; identical to SEQ ID NO: 25825
  misc_feature (1)..( 3000): 2750-1469P.txt file - cDNA_ID_3024208; gDNA_ID_2214536; Annot_ID_185094

SEQ ID NO: 29949 - DNA, 3003 bp, Unknown; identical to SEQ ID NO: 21284
  misc_feature (1)..( 3003): 2750-1469P.txt file - cDNA_ID_3024213; gDNA_ID_2214536; Annot_ID_185089

SEQ ID NO: 29950 - DNA, 3003 bp, Unknown; identical to SEQ ID NO: 26227
  misc_feature (1)..( 3003): 2750-1469P.txt file - cDNA_ID_3024222; gDNA_ID_2214536; Annot_ID_185084

SEQ ID NO: 29951 - DNA, 3000 bp, Unknown; identical to SEQ ID NO: 12186
  misc_feature (1)..( 3000): 2750-1469P.txt file - cDNA_ID_3024225; gDNA_ID_2214536; Annot_ID_185080

SEQ ID NO: 29952 - DNA, 3000 bp, Unknown
  misc_feature (1)..( 3000): 2750-1469P.txt file - cDNA_ID_3024231; gDNA_ID_2214536; Annot_ID_185077
tatatatatttatattataatgattgtccaggtcattttctgttgacgaatctgcttctggacaaaatgaaaagtaccgcaagagaaagtggagtccaaggaaggattgtgaatctgtcatctattgctcatacttatacttactctgaaggtatcaagttccaaggcatcaatgaccctgctgggtaagtttgttattcaattttatgctaatgaaacgagactaaatatttttaactgatgtaaacactaattctctatcctatgcattatctagatattcggagagaagggcttatggacagtccaaactctcaaacttgttgcactccaatgcactctctcgtagactacaggtaatatattatttacacattgatatactttaattaaatcaaagtttgatgccataaaatgatgaatatgattttgggatgtaggaagaaggtgtgaacatcactataaattcggtgcaccctggtcttgtcaccactaatctctttcgctactccggttttagcatgagtacgtataccaattctccaatggtcattcaaacacttaaattttaatattttcttatcttaaaatcgacatttacttgcatattcagaggtcttcagggctatgactttcctcttttggaaaaatatacctcaggtgaatttaaaacccttttcaaataaatgttcttatgagattttagtttttattttacaaatataattcttttgggggcattttcagggagcagcaacaacatgctacgttgcacttcatccagatctcgaaggcgtcaccggaaagtatttcggcgactgtaacatcgttgctccgagcaaatttgctaccaacaattctctcgccgataaactttgggatttcagtgtctttctcatcgattctatctctaaataatctatcatcatcaagacaaattcttagacattcaaaatttatttatccttcttgatattgttacattaatgccatatctttttcaccaccacatatttctttatggaataccataatttagaaatcattatccatattttttcttgaataaaattataaaacacaatttgtttgtgtaagaaaataacttttttcatctagtaatctatttatatctcccaaatgaaataacaaaggttatatcataaccagttcatgggcctaaattaatgggcttcgtcggcctcccaaaggcccatagtccttacgacgacggcggaaagagccacaacaattgctgcaaaaaccggcggcacaacgaggtccatcttcgacctccggaaaagattcgccggtaaacacaagacctccgagggaagatccagcggaaccaatatggctgcataagaaccgcaccgccgcgagaacacctcagaagaagacgggaaaatcgccgacacgaaagcgaattccggtgcaagcgagatgatagccaccgttaacgtcagaaacaacgtccacgttgcgccgtagacgaagtgtggaatccgccatgcgaatctgtgagtcagagaggagaacatatggcgaatcattggttttaagttcttaaaagtgttcttcgttctctttatatatttatagttccatcgatcgtaaagagttccgccataggaattggagtagcttcgatgaaaaagagaagtagaaagagaagataacctaatctcttacctgctcttggtgacgaacgaataaggaaaagtgaaaaatacaaaaattatgttatcaatcctaaaattccaaaatataccaagttactagtaaaatttacaaaattatcttaaatgaatttacaaaccttacttaaaagttaaattaaaccgttttagttattaaaggcttgtataatttgtgttttgggttgtgatatatattgtaggatattttattcaagttaaaaacactaaaaaacatctctaacacaaaaggtcccacatatacatgtggatattcacttaaacagaaactgaaatgatttgttctcttctcgtactttcttccaagttgtcatcactcaccagcaactgccacgattttcttcccctttttctttcgatttacataatcactccaaaggttttaatttattcttaaacagtctccatacttttaattatctcatattttcccctcggttaactacaatatccaattttactctcataatttcgtgtaaccgacttaaactgatatttaatatcataaaattatacatagaaattatcatcgcaaccaaaattaatacttactcgaatcaacatttttttttctaaaagcagattgaaatttaagagataaagtaatccggtcaaaaagttacatttaaaaacaagggccagtttgtattttctcacgattcggatattattttccttctttttatctcctaattactattttttccaaaaatataaaaaaatatctgttttttttttctgttttcttttttctttcttcatctctctctattctttgctttgaaaagtaatctggaccgcgaacaaagctttttcgttttctggttcgttgccgccttgcacgttccttcttcttccttctctcccccccatcttatctctttccccccctttaccctaaccctaattttcttcgccgtcctctcttttctctctatctaatttcgttcccatattcgaaatctcttaccttttatctccagatcttttagatccgtaattccctactattgattatacccaaacttttactcttatcttcctcgtttgattcttatgcttccttttatgaattgatttcttcataaagtcatcatctttggattgaattcgactcattaatcaatccgttaaccaataaccaccttgacagtttcttctccgaggattccagattacaattctagtggagctgtaattggattcagatctaactcaagttagtgttactgttgtgtctattggatgcaatcgtgttgtgatattgaatatatttctgatg

SEQ ID NO: 29953 - DNA, 3003 bp, Unknown
  misc_feature (1)..( 3003): 2750-1469P.txt file - cDNA_ID_3024248; gDNA_ID_2214537; Annot_ID_185142
gtggtgactttctaccctttgaggtcttgaagacgaggtttgtgatcacctctgtggcacatagagccactccgcgatagtttccttccaccgctatgatatgttcgtccggatattgaagtacaaactgtttatgaattaaatatcatttcttcaatcaagaaattaaaatttctaaccaaaaaaatcaagaaactaaaattcacgaaaagaacttataattgatcggagcttgtagtataatagtttgttatagtgttgtagtgtgagttttagatatttgatgtagaaaatttggaatgtgatgagagggtaaatgaagtgaagaacctctttgggttgttgaatgattttcccatattcagttgttacgacttggccgtcttccttcacatactcgaatttgacgtaagtgatacgattgatatcttgtcctacatacacttttcttacaccctcatatacatcatcgtcccattcacgccctccttcaccaccgtagcctgtcaacttccggtagattttcgccattttgtattttttcaaatactgtaaaatgaattttttaactaaattatccaaatccaaataaagtgtatattcaagctttataatgtttactaagccgggatcccggatctgtgattggtgatacactagcctattgaattgcatagcaagacatagagagcaatgatcaactaatgagtacctatttacgaaactaaagttgtaatttgtataaacaaatcagaacttgagagagagagaagagagaacctgtaaattcttgatcttattcagaatgaaattaaggaactatcaactatgtctatttattgatacaatttggaacacgtttttgttgattccaataatttagttatacttgtaagttgtaactaaatcatgattgacctttttctgttccctttacttttccttcaaaaagaatatgagaaggaaaacattttacaaggccaaaccaatccccataatttgtaatttaagtcatattagaagagaaatagccaaactaacccaaaatatattagagatctcaagagcatcctggctgcatgttatcattctggacgatatgtcacgagacgagaggttctaacaaataaagcaatagatgattttgataagagtccaataatactagcatattacaagttgtcagatggagacatccatgattgtaatgaacagaggaacaaaacaattttgtttcacaaagaaattttgttataatatttttcatatactgtttacatcgtcgtcccattcacgtcctccttcatcaccgcaaagtgccaacttccgctagatcctcatccattttgaatcaccaaattaatccttaaaaatgaaaaaaaaacaaactaaactatttgttagtccaagtatgaatgcatagctttataatcatttcctaagctggatatgtgattggtaataaactaatactaccatgacaacattgtaccctattcatatacatcgcaataaaataccaaaattttccactaatcgcagatagaggaatcaactaatgcatggtagggtaaatatttatagtgtgatgttgatagctctattataggtgtactatataaatcaatgacgatataagtatactgtatagtattaaacaagccccacacaacaaactgaaattgcatccacatattcatttctcacgtttatttcatctatatatcctaccctacttgctcataaactttcctctcttgtcttaaacttttaacgttacaaagtcacagccacaatattctatcctcaccgatataataatcaccgcaacagtataatcttaccttgatatctattatatggattaaaacccgatttcttactaaacatttgacactttcgcgtagaacataatctgtacatacgaatttcgaattcatatatatatatatatatatatatatatatgttggataatgattgttttctcgaatattgtgtcgatttatagtgtagtcatattttagatagctactccgttcatcaccaatagcttgtttctatggttaatttctttcacttattagatttatctcaaccaatcactcaattagtttctagagattgttgtgattgctatactacatgttaagcactttttatttttgccggatttcttggccaaaagggttggcgatagaagcaactacattaaattcatgacctaagctaaattacatgtaacgatatacaatacaagatttgtctaaactaaacattgattcaaccaaaacttatatagactatatatttaacccaaatacttatcatataaatgttttcttttttgacgtcaacacaaccgtaaacattcgaaatcttatatatttaattatttactatgcttgttatttcatttgtcgacgttgttttttttttttgcattcttcagatccactaagaaaaggcaagtccgaaagataatgggcccaattagtggctatataaaaacccgacccggaaagactaaacctgatccgcaaccgaaccgacccgacgacgctagtataccgtaaaaatttgacaatcttcgtctccggcacaacaaaattgttcttcttcggcaagattcctcgattttctccgtgttctgtaatttccgatagattttgacaactctctttgattgtttccctttagctttttatttttatctgccttttttttttttgttgttgttccggttctattcgtttccttttgttaccttgtttttggttttgatctcaaatcctgctctgctctactatcttcaattcgattcttcatccgaacgaagaagacacaaattggagcttcactggtacatattcttgacgctttatctctgatttgctatttagggcttttcaatgaatgaatttagtttttctgctatgttcattgggaagtaagttcaatcgtatgtgtgatgatttttcaggacgttgatgataaagcatg

SEQ ID NO: 29954 - DNA, 3000 bp, Unknown; identical to SEQ ID NO: 12216
  misc_feature (1)..( 3000): 2750-1469P.txt file - cDNA_ID_3024252; gDNA_ID_2214537; Annot_ID_185138

SEQ ID NO: 29955 - DNA, 3000 bp, Unknown; identical to SEQ ID NO: 12220
  misc_feature (1)..( 3000): 2750-1469P.txt file - cDNA_ID_3024260; gDNA_ID_2214537; Annot_ID_185134

SEQ ID NO: 29956 - DNA, 3000 bp, Unknown; identical to SEQ ID NO: 12212
  misc_feature (1)..( 3000): 2750-1469P.txt file - cDNA_ID_3024264; gDNA_ID_2214537; Annot_ID_185133

SEQ ID NO: 29957 - DNA, 3000 bp, Unknown; identical to SEQ ID NO: 12208
  misc_feature (1)..( 3000): 2750-1469P.txt file - cDNA_ID_3024272; gDNA_ID_2214537; Annot_ID_185128

SEQ ID NO: 29958 - DNA, 3003 bp, Unknown; identical to SEQ ID NO: 26231
  misc_feature (1)..( 3003): 2750-1469P.txt file - cDNA_ID_3024276; gDNA_ID_2214537; Annot_ID_185127

SEQ ID NO: 29959 - DNA, 3000 bp, Unknown
  misc_feature (1)..( 3000): 2750-1469P.txt file - cDNA_ID_3024281; gDNA_ID_2214537; Annot_ID_185125
acaaaaggttcacggtctggtctggtctgcaattttgtatgaaacaatgacttctacagtctgcaatctgcggcatgtttagcctacaaaacctacgattcttctaactcgtcccgtgacgaccggacacaacccacctatgtgtgaaattaaatcaaatgttcattatattatttcctaataatcgagaattttatttgtcttattgatatatatatattaaatcaaaaatatgtaagaacaacctgtaactcaattacatatcaaaaaaaaaaaagacaagtggtttgtataaatgtattataaataattttatgcatgtatcatgtatgaatatgagttggagtaaaagacagagaagacagtatctacttgacccacttaacacaagccgatgttctctcccttccaaacattgttctctctttaagcttgccctaaatcttgtgtgatcctgtgtgtgattttcttatattattatctttaaacacttgattttgtttaattcttaattcaatgctcacatgctattacgtagtttctcgttggcgtttaatgtacagatcgtaaccttaattaagcacataatcggagacttgacgttaaataagtttttaattcgactatcaacaatatatatgaccacgtttggtgcgttcgtttcacggtaaattcggaacgcaccaacattattcacaaactcgtgtttgatatctgtactttatacatacactgatgactgaacaaaccattttttcaatgaaagtatgggtaaacgcacttaggcgagcaatttgagaaatgttgactactatcataatgtggttattggaaatttatgaatatgttgagtagtattcaggttttatattgcgcactagtaatgttttggtttctcttatcagtaatttatttttaatgcataaagtgttaaaaatgaacaatcaaattacatttgacccaaaaaaaaaaacaatcaatttattaatttaccgtgatctattagctagtggttaagttgaagataagaattgaagaataagaattcgagtctttccatcatgattttttttttttacaatatatgctttagaaagttgagctcatcctctcttaacaaaaaaataaaaaataaaatcaagagggtaaaaacagaaaggagtctacctaattagtcacctttgaatttatgatgattaatatttggcttaatttaataatattaattttacttctctcctttcactattggttacaaaaaaataatgatagttttccaaaacatcaaacaaataacaaaactcaaaacatcaaataacttggaacagagaaaataccagtgataactactgtttcgactaaatattgtcatccaacttgaatcatttaattttaacatcatatgtaaagtagtttaggcgaatcacttactccatgtataacttcatgtaatttaggcaaatcatataacatcaaagatttgatttagtgtttggtcccttggaactaccttataaacaattgaatccaatcctacaaaatcgaaacaacatgttttgaaacccgacccggacgatgaaccggactacattctgggtcaccgggtcatcgggtcaaccgggttggaccacggattaattagttaaaatttatttaataaatttaatattaatagaaattttagagtattttatataaaaaaaatttagtatttataaatataaaacaaaaataatcatatcatatttaatcaaatataaaattatattatgtttaataaaatataaaattatttatacccaaatatatagaaaaaatcaaacaataataataaagtggttaaaaatttgaaatccaactaaatgtctaacaccgtaacaaatatattaagagatcatcaatgacagaaataaattaataaaacatcgtgaattcaaacaactaatctcggttgtctctctcaccattcgattcaattttaaggcggtattgtaaagtcttcaccaaaatctaaaatatcaaatgaatttaagaactgaaaaaacttttaaaaataattgaataaagtctaaaatcccatattttattgtaaaatcaagagaactttttaaaacccacacccggccggttcaaccggttcaccgggtcacgggttaattgcgagtttttgtgggttttttcgattttgaacttgttgggttttagcactaaacccaaaccggaaaagtgttcgggtcacaggttaaccggtcgggcgtaaaaacactggttatagctaatattatcgaatgttgacaacaagtaaatgctatgacgaatattttaattaacggcactgtttaagctaatatcacgtggagaaaggcatgtgctagctattcgaacatatgattaaatgcaaagtcaactattaaatccttttgcccgtactctaatttgcacgacaccagccttttttcctttcctaataaattgccttgctgtgaaaaacatttgccttaatttgcttatatagtaatttataactatctagcacactttaaaaacactgaattgtttttatcatttacacaaaattagtatgccacattcgataatcacgtatgatttggactttagagtataattttttttgtaatgcgtcgccatttccaataacataacagagctctaatcctcacagtcaaaattaaagtccgtacagaatttcatttatttcatacaaaaactatataataaaaatgatttaatattttttttcttggtttggtaaattccatctccctgaccaatatgtaaacttggactgtctctctccaatgaaccttcgcgcagacataaacagctcacttccaattattattacaatttttattcttttacaaaaaacaaaacaagaactgcattcattaacatgtctactcaatcacctctcagatcgattcttcttcttcttcaatcattctccccaaaacattcatcagctcaaacaccaaaatg

SEQ ID NO: 29960 - DNA, 3003 bp, Unknown
  misc_feature (1)..( 3003): 2750-1469P.txt file - cDNA_ID_3024303; gDNA_ID_2214538; Annot_ID_185170
atagatttagaaaaatatttgagttggtgtgatttcctgtgtttctctatgataatattgagcacttcatcagtgttgttcttactttctggccatagaaacatgataaagactatttgcatgtggagaccgggtgcttttttatgaagatttgggtgttttgttttggacctaacgttttaggcaattttgtatggtttgattgttcggctgtagttgtacatgattttctggttcagttagcttcttcaagtcagtagcaacccgtgtttgtaatgtagcagatgaaagcctagcaatcaaaattacacctagacagataaatcttggggaagtaactaaaattagagtatttaatgattgatgattcatgttctattgactcttttctatcaaatttcggatgatttttagctgttttggtgtgtaatacttccctctgtgatgtaatatactggaggtagctatctagattattttggttcaccagggtttgagctaatagccatcccgattgtattccattcctctttgtccttatgttttacttgaaaaacattttgtatagcctggttttactttactttgaagtgttgtttcgtgcttggaagagtgccgcaatatagttctcacttctcatatgatcattaaatgcagatatggcctcctatgatggtaaaagatgcaggatctcggcttcatgctctgttaagggaagtaattacgcaggttagtttcatctgttagttcaattgtttgtagattatccaaatttctttttgaagttacaatcttaaaagtattacattttcaattgttacccccaccttagacatctctcagtgagagcatagaaaatttgcagagatttggcagtatccgattgtttgtattgtcacacagcctgaaaggatcactggtttagttggattttaattctctgttctctatatggcagactggtcttgagaagaatttacttgggaaccatccagtttctcgatccaccgaatctcgtagcccaccaccggcatttgcttcggatgcattaattaatatatcatcatcttctcatacacaagaagggaataaccttcctgatggttattcagtagctggaaatggagaatattccaaatctgcggtttcagagatagttgagatagatgttcctgcttctgctgggagttacatgaaaagctcaagccctggagtaagatattctcttaaaaacttggtgttttcacaaaaactacgtacagtttctgttttcctttatgagttgtcacagttttatctatttgttgctgtcgtatatagcttgctgctgctgctgcacggaaaggagtacccgctgtagacaggcagaactccgagactctatattatgcagacgatgaagacggcaatcgtaaaaagtactcaagaagaggtgggagaaaaaccttatcgttcttacctctcttgtctgttttttgctttactacaagacttacgctagagttgtgcttctcctttcctcttattgtttttgttttctgagatgcatgtgtctgccttccattagacaaactccacttttgtatgaatctatagcattgtcgcgatgactttgactgattctcattttttttttcatgtaaggtcctcttcgtcacaagtttctacgagctttactacctttctggtctagtgcattaccaactctacccgtgacagcaccacctcgtaaggatgcagcaaaggcagatgatggttctgaaggtcgtgtaaggcatcaacgatcatcaaaaatggatataaggaagatactaattttcatagctctcatgtaagaccttgtttacagtgtaactctttcttctgctgctcgttatatgtcaaatgtttggtgcagaatcaatcagtattatccatggcctaaatctatgtgaccaatgtgcagagcgtgtatggcaacaatggggattttatactacagactcgcactacaggcaattggtcaagaactacccgatgaggagcagcgatgaggtaatatcgtatcagacaggggaataaagctgccacaacatatatcatacattcctgctttatccaaatcaatttgccctggtggatacccttttggacgactagaaaatgttatttacgagctgattttgagaattgtgggctgcggttgatttgttagagcgttacacatcggttctttgtgtcggtttccttgttttgtgactggtctaaagttctttgtctctctgcttctggttcagtcgacatgttttagttgtagctattgtttttggtagacgaaaacgcattttatggatgctttgatgttcaatgttttgtgggctgttgagtagtgtctctcttaatttgaagtcaaaccagaattagaatctgcgtctctgcaaccttatttttatatactaaactcccattttcctctggaaatcgactaccggtagcgtcggaaagtccttgtaaagaaacagagttttttgttattttagatacacacgtgacggtcttaatgatgcaaggattaagatttgcgtcaaagaaatcgaaggcgatacacacgtgacggtctcatttacccagaatgcagcaaagatccgtgcttgcatcatctacttaacatttttgaagtacattttaaggaatccaatcgggtcgggtttttttaaaagtttttgacccggaaattagtccttcggattctaataatttgatactttccaaaacaaatctctttgataaatcgcaaatcttgagttcaaactttctttaattttcgtcaatcgttattaatatatcttttggcaagatttccctacaaaaaaggaaccacattaacaattgcgtattgattttgtttaaatttgtaaactaacaacatgcatatattctcaagatattttgttcagataccaaaatatcttgaacattctaacgtaaatgtgttaacaaaaatacttttatggttatataatg

SEQ ID NO: 29961 - DNA, 3000 bp, Unknown; identical to SEQ ID NO: 12237
  misc_feature (1)..( 3000): 2750-1469P.txt file - cDNA_ID_3024323; gDNA_ID_2214538; Annot_ID_185160

SEQ ID NO: 29962 - DNA, 3003 bp, Unknown; identical to SEQ ID NO: 26234
  misc_feature (1)..( 3003): 2750-1469P.txt file - cDNA_ID_3024331; gDNA_ID_2214538; Annot_ID_185157

SEQ ID NO: 29963 - DNA, 3003 bp, Unknown; identical to SEQ ID NO: 25840
  misc_feature (1)..( 3003): 2750-1469P.txt file - cDNA_ID_3024339; gDNA_ID_2214538; Annot_ID_185153

SEQ ID NO: 29964 - DNA, 3000 bp, Unknown; identical to SEQ ID NO: 12234
  misc_feature (1)..( 3000): 2750-1469P.txt file - cDNA_ID_3024343; gDNA_ID_2214538; Annot_ID_185151

SEQ ID NO: 29965 - DNA, 2046 bp, Unknown; identical to SEQ ID NO: 12244
  misc_feature (1)..( 2046): 2750-1469P.txt file - cDNA_ID_3024350; gDNA_ID_2214539; Annot_ID_185177

SEQ ID NO: 29966 - DNA, 3000 bp, Unknown; identical to SEQ ID NO: 12267
  misc_feature (1)..( 3000): 2750-1469P.txt file - cDNA_ID_3024365; gDNA_ID_2214539; Annot_ID_134451

SEQ ID NO: 29967 - DNA, 2571 bp, Unknown; identical to SEQ ID NO: 12259
  misc_feature (1)..( 2571): 2750-1469P.txt file - cDNA_ID_3024365; gDNA_ID_2214539; Annot_ID_185198

SEQ ID NO: 29968 - DNA, 3000 bp, Unknown; identical to SEQ ID NO: 12250
  misc_feature (1)..( 3000): 2750-1469P.txt file - cDNA_ID_3024373; gDNA_ID_2214539; Annot_ID_185194

SEQ ID NO: 29969 - DNA, 3000 bp, Unknown; identical to SEQ ID NO: 12251
  misc_feature (1)..( 3000): 2750-1469P.txt file - cDNA_ID_3024376; gDNA_ID_2214539; Annot_ID_185193

SEQ ID NO: 29970 - DNA, 3003 bp, Unknown
  misc_feature (1)..( 3003): 2750-1469P.txt file - cDNA_ID_3024380; gDNA_ID_2214539; Annot_ID_185191
tctctcaagctaaattatttcaacattaaccaaaaaacaacattcatcaagaaattatgcaataaacaaattcataagaaaaccaaatagaaaatagttggatacttggatgattagaaaatcaaaattgaactatacgtatcaaaacgtttgtttatttgtcaatcctcttattaatgagcttagactcaaattccagaccaacgacgagtacataaagtaagtaattgatggcaaagatttctgaacaggcctactctctatacgataaacatgacggcccaatcatcgccaaggcctaaacctctcaaaccttagaatgaacgaaaataaatcaaattttttatttaatatatgagaacaaaagggtattcaacaaaattgcaagaatttgggtccgttacaaaactatattggttcatgtaactgtagtactgtattggtcacccgttaacaatattatcccccaaatttcaacagatcagtgagatatcaatatgagaaatcagaagaagaaaaaaaaacacacaaccataattaagattaacgaaatggagaaatatatataccttggctgaagacgtttagaggaaaatgaaaacgatggagtttggtatcaaacagtgaagattgaaattttgattctgaatgcacgtttatgtgatttctatggctttttataagctactactcttagaatatgtctaatctcatttgaccaaaatatccctctcttttgtattcaacgtttttcacttttcttagtaaagaaaacatcattgtctttcttaaaaaaattagatcattttccttagtgctgcaagtcaaatttaacaaggaaatataattcaataacattcaaaaagtaaggaaatcacaattttcttgtgacttaactttttaaagtttaaagtaaaaaatctaataataatatttatcaagaataaaaaatctaaaaataataagaaaacatttaacataaactagacatatactttagatctaaagaaaatatacaaatatcacttttgattacatttacatgtattaaggaaatagaaccattaattttgctcttaactattatttttaaatattcacatatagattttgtttttccttaattcagataatacagcgcggacaacagtcaaaagtattagtaaataacttactaatgacacataacttttgtttaacttaaatttttaaaatatgatgatatcactagtcaaaattgagataatttactactaaatacgcaaaagaaattacttaatttatagggatttagtacctagtaagtcattactagtcaaaataaagataataaattactgaaaatctttgttctaaaacatggccatggagaccgaggtctctagacgtcggaaagcatgagatggtttgaagccgccgcgatgtaacataacttattattttttgtttgttacatgttagaaactcacttttctatatggatcaacaatatttgagtgcaaaaaatcaaagaatatgaaaataaatattacaaaaaattcgtagcgaccataaattaggtttggaggattagtattcataagaagaagatggatactaaatgaccaatataccattcttcgaagataaattgaaaaaatttcaaactgttgattgttgaatttgagattcgaacctgtcacctctgacatgatatattaaacaaaccactacagcaaacaaaagtatcttgaatctacagtaaaacctctataaattaatacacgataaattaataacctctacaaattaataaattcttccggtcccgagttgggatcagtgtaaaaattgatacaaatcgataaattaataagataatattttttttgaaaatcctatgtaaatatatggtcccatcaatattataaattaataattgtataaattatgaatatatatatatatatatatatttatatttatgaatatatcatgtaaaacttagtaaaatatgactttagtattgtttttctttaatttatattaattctttgtaaaatttaattctaataattttactacgtataaaaaagttttttttcttaaatctaataatggttttctacttgtaattgatttttagaaaaattattgattgtatagagaaactaccttttagatcaaatttttgtaaaaaattacaaaatttgtaaaatatctccataaattaataattattaatttatcgataaattaatattttctctaaattaataaattttcttggtctcgacattattaatttatagaggttttactgtatatattattatatttctaacctaatcccagattgatgtttagcggtatttaaaatcaggctaaaaacacatattttttactagaatataaaatagataatattgtgctgatgctaatcaaaattaaaaggtaacaaattattaaagacatatatttaacttaatttaaatgtacatctgcggtgctagcactagtttatataataagaacaaaaaacctaatgatttaatttgaaaaataaatttaagaatatgaccttcgagttctaagaaaattagcttgttaatattttttttattagaaatgaaaatttatcttagaataaaaatctcctcaatatctattttcaacctctttcaaagatttgaaaatattttttttttaatattagtaaataaaactaattaaataaaattagaaatcaaattgattttacttaaaaacactttaaagtttaaacctctaatctagcttttatttttgtaccgccattaaaaaataacgaacccaaaccgaactcaaacccagacccaaacccatgcccatacacaaatcacgaatgcctaggcttacttgtgaccgaaaccgaattgaatcatatatagtttcaggtcacctgttgcacaatctctgctcagccctaaaagcttactcctttcaactttctggaggccttctcgtagcctagcgtcatagatg

SEQ ID NO: 29971 - DNA, 3000 bp, Unknown; identical to SEQ ID NO: 12253
  misc_feature (1)..( 3000): 2750-1469P.txt file - cDNA_ID_3024388; gDNA_ID_2214539; Annot_ID_185188

SEQ ID NO: 29972 - DNA, 3000 bp, Unknown; identical to SEQ ID NO: 12246
  misc_feature (1)..( 3000): 2750-1469P.txt file - cDNA_ID_3024398; gDNA_ID_2214539; Annot_ID_185180

SEQ ID NO: 29973 - DNA, 3003 bp, Unknown
  misc_feature (1)..( 3003): 2750-1469P.txt file - cDNA_ID_3024414; gDNA_ID_2214540; Annot_ID_185221
tcttggctcatatcgattcctgaagaacatttgttggaggattcttcgtttttcacggtgagatttggggagattgaagagaaggagaagaaagaccagacgaggattagtgacatgaaagctccgccaaggaagagaacgacgtcggagatacatacaaccggtctggttcttgttccggcgtattttgccattggagatgattggtaatgtgatgatgatgtctcaggcgagaccattaacagaatcttagagatgattacaaaaaattcaaaattttgggaactttgttgtataaaggcaataacttatttttttgtttttctatatgtaacattaatgtcccattaatcactcgctcgatatattactttatttgtatcagatttttatttgacgtaattgtgtttgtgaaaagtaaatgttgtcaaaaaattgaaattgaagtgtactcacattaatagttttcgtgtttcgattggtaggtttataactgctagagataaggtttttatatgtcagaattgtcatgtgatagtgcttttgttctggtagagaaacttgaacaacgtgagtgtgacgaaccggaccggtttgtttcaccgacactgattgtaaaataagattggtgttggtttctacgtgtcggtaagccggtgttccggttaagcaagggcacgtgagtttgctgcgataattttagggtgcagaagattactatctcacccgcaatttcagcttttaatgttgaaaattgcactgctttaagtttattttattttattttatttgagttgggtgttttataattgaaaataactactatattggaccgatatactaaagaaaaactctaaaagctagcttaagaaattttatattgatgacagtcacgaagagcgcatctttatgcccatcacaattaatgaggaggcacaatatacgaagccattatacaaaaatatttaatattcaatttcggtaaagattaaaacttagtatatgattaaagctactcaaaccgacaaacatttacatagtccaagcctttaacgtggatcaggattagatcttaagaagagtcagattgaatctatgtcatgaatatgtatatagtacgtagttatatccctaatgcatagtcataggcatttgatatcataaaagtataacacagatcgtatagaattataaacactaactaataactttaacgtcacgatcctactttttttatatttcctagaaaaggatgataattagccatgttcatcaacgctagtaaataccgacaatagataggttgacaaaatcgtgaagaatatgacgcaagtatagttttcggaaacactaacataaaaaaactgtcgcccaaaagtaccagtaatagtaccaattcacttgccttagttaccattatcaaaaaaccgtggtattgtcatctgtgattatgcaattggataatgttgatattctacaagagttagcgagtctagcaagttctcatattggagacgggtttttgtttccgtttgcatgcaacctagatttttttaatagtaaaatgtggtatttatatttatatttaaaaaaatattattttgtctaaagaaaatcaaatatggagctatatatgatatctgattcggaaaacttttttttttttgtatgaaagttacgtttataccgttttcatacagaattttaggaaaaatgatagaagaaaaagactgaaaactataagaaaggaaacaaagcaaagaaaaacggaaaatgctttaccaaaacatgtcattattgtttctaagagagagaatcttttaaaagaaacgactataaagagattccattacgcacacctgacaccaccaactccaaggcaggcaccaaccattgagaaaataacaaattgtaacttttgcctttcttaactcatttggtttagcatttggaaggaagtgataatcgcgaggtttgagatatttatatccaaaagacgcgatatagtctcttcttgggttttgtatttgttccttagttctttgcttcgacatccgatattcatatagcacaatcaaatcaaacaggcttagattttctagcaaaagtaacgttaacctttggttaaaggttgtcttcggttattgaataaaccaactgagatctcggttaacttgaactgaactgggattggtggcattagagtttttagatggattttggatagtatatgggctcgactctagaagctgggccaagttggttataacttgcaacataattgggaagaatatcagttggactacacttcactattagtgatgagtagaaaaatattggtttagtacagtttttacgttggttagatcaagagttaattgttggtgtagattagagatcaaggtcattagaaattgaacatggatccctaatctttataacaaaatataattaagagatcaattttcaagctctagttacttttttctatttttcttatctttatcaaatgaaaccatatagtagattgtttttgtttggaatgcgttttcaatattagtccaattatattttttagtccaattaaccaacaaaatgtctgtaatattagaccccaaaaaaaggggaaatacatttttattaaatacaaaagttttttaaattattaaactacatgaatttagatatttgtaacttataagtattccataattatccgatggtagaaaaatcatatgagattctattttcatctaatcatctggctttcaaatagacacccattatcacaataaccatccaaattgaatctcttatcgctctattatctcattacacattttcttataattttctcatattctctttttttgtctaattataattatttgtttcattgatttatcacaagagtcttcgaacaagagaaagaaaaagaatcccattttttaatactaaagtcaatcacctatcatttgattttgatcttgtacaaaataaatg

SEQ ID NO: 29974 - DNA, 3000 bp, Unknown; identical to SEQ ID NO: 12273
  misc_feature (1)..( 3000): 2750-1469P.txt file - cDNA_ID_3024418; gDNA_ID_2214540; Annot_ID_185219

SEQ ID NO: 29975 - DNA, 3003 bp, Unknown
  misc_feature (1)..( 3003): 2750-1469P.txt file - cDNA_ID_3024425; gDNA_ID_2214540; Annot_ID_185217
taataaaataagtagaataaaatgaaagtagtgcttggtacattattatgatttttatttattgaatgtttttgagaaaattcatttaagagtgagattaatggagaatttaacacaacaaaagacttttgattttttctcaattagttttgctagttgaaccaatccaacaagttaactcacaaaccaatcaataatttcttattttattttatttttatgaagtttggtgcattaatttatagaagcaacgagacatgcatggctatgtcctagcgaacatagagtagtagtttatacaagtataccaaagctaaaccagtctcgtgaactatatatatacgtcaacaccgaaactttggaaatgtataatacttgtatagttagtctctgtgtctgatattaaattgtacataaatttctttatgattacagtttttttttcccccgatttatttgacacggtttgggttatatatatgattagtcacacaccgacttgtaatatactctccaatacacgcttttaaatttggtgcgttccaaacggatgataagaacaccatgtcacactaatcgggtagggacgtccactaaccatattgacagttgtatcaactacaactacaccatatataacggtagatccattgcattcgtgtggaatctatagtgtttatatttgcatatatcatgtcaaatgatattttgctaatgtaggtaggtgacgccatagaacttttgaatatattaatatggaatcaatgcttttaagaagtggatggtgattatcatttatcactctatcatcccacgtttcatacacgctgcgacttatattttgatttacttttcttatgggtttggtccaattccaccgctaaacactatgcacaagtgcaaacaaatatttaattaaattcaacttccgatttaatcggtcattcaaatgagactaatgagtccaccaaactccacaattagatacccataaataaaatagaaaattcgaggttatcaacgtgcgataagatccactttttgggttatataataactaaataaatgaacaaaacaaaaatagatttgactaaaatttggctataaataaatttgagtttcaaagaagccaaacccgtcaacacatcttctttaagcatctctctcccttcaaagaaaatatcacaaaaatggcaaacgtctccgctttgctcaccatagctcttctcctttgctccacgctaatgtgcactgcccgccccgaaccggccatctccatctctatcacgactgctgccgatccatgtaacatggttagtctgattcacatgccatgcatgaatcaatttccatatataaacacaaaataaccaatatcagagcttctaaatttttaaaaatatttaacacatcgaataggtttaataaattttttgtaatgtatgatgattactttggcaggagaagaagatagaaggaaaattagatgacatgcatatggtagacgaaaactgtggtgcagacgacgaagattgcttaatgaggaggactttggtcgctcatactgattacatctatacccagaagaagaagcatccttgattttcacttactcatttctaacaaacttttgctcaagattatgtaatttatgtcatccttaattagtatttgtcacatacaagatcaagatagttatgattgtgattatttatatgtattttggatgatatattgtagaactagaagtttgacaataaaaagtttatagtgtcgttgtatgtttaagaagtttgacaataaaaactttatagtgttgttgcatatatgtgttgaaaactcattaaaaacacacacacacatgaagtacgcgtatatttataaataaactataaaattgagagtggattcatggaatcttttttattgaaaatacatgttggcttgtttgattagttgagagactgctaaacatttatttcatataactagcaaagatcgatatatcgtcgtgtacacaaaagtactactgtatatgtttgatcgaatctgaagaaccaaatttatattttcagactgattgtgtatatggtctcgtaatatacaatcatatgataattagccatcactaatgtagtcatgtctttatgctgaaagagtgtagagactctgccgtcataatgcagctgttaactacgagagcgaagctaaatatttttgaaaagctcccacttcaatcgaacggagggaaaaacctcttgcgcatggaatagagtagtcaacaatcatttgtaattgtaatagaaaaaactagtttaattagaaattgagcatcaaatttaaacagctctgtaaaattttctaattgtaataagaaatttttgttatatctgtcttaaaatatacaccaaaggtagacacaatatctcctacaagtgcacattcaacttctagatatagacaaagttccaaacttataataagtttttttgcaaagttattggttataattaagtttaattggtttatcaatgggtaaagtatacagtaaactgattaaacctagctatgtgggttatagatctcgaactatttactcgaagtacattaagttatagaactttcatttcggagaaaataaggataaaacttttattttatagacatatgaactagagttaaaatatatgagctctatctactgatactttttatgagaaaatagaccttttttctaaaattatctttgatgaaaattttgtttggtactccaacatgtgtacaaaagttgcgctagatcaaaacatatgtaagtaacacaacttatgacattcttgattgcaaaattagttaaaatctagttgtttttatattattgttgacacaaaaaaaaatgtcagcatatgaaagcctccgtctgaagcagaaggaacgactctggtctaaaactctaaaaaccctatcttcttcgttctaaacccaaaacacacacaaaacaaaatg

SEQ ID NO: 29976 - DNA, 3003 bp, Unknown; identical to SEQ ID NO: 26245
  misc_feature (1)..( 3003): 2750-1469P.txt file - cDNA_ID_3024468; gDNA_ID_2214541; Annot_ID_185248

SEQ ID NO: 29977 - DNA, 3000 bp, Unknown; identical to SEQ ID NO: 12283
  misc_feature (1)..( 3000): 2750-1469P.txt file - cDNA_ID_3024477; gDNA_ID_2214541; Annot_ID_185245

SEQ ID NO: 29978 - DNA, 3003 bp, Unknown
  misc_feature (1)..( 3003): 2750-1469P.txt file - cDNA_ID_3024481; gDNA_ID_2214541; Annot_ID_185244
tttataattcccatcagcttttttctcgccatctccattaacaacattttcttcactagcctttttcccttcctctacatcctcatcatcatcatcattatcttcgtcatcatcatcatcttcttcctcatcactaatatcactatcagagtcagaatcaccagctacttcgctgacaacaccaacactaccggtctttttgtttttgacaatatcttgtcgataaatattaggatgctctgaatcacatatagagagacttgccattgaatcatcaactgacgagtcaacccctacatttgttgatgtaccagggtcatcttgctcatgctccatctagaaaaaaaaatgccaaagcaaaagttttgatgagagagtagtgcaaaaataatgaaaataacctacaagagagtaaggatctaaaactatgatgcaacaacaacaacaacaacatcctccaagctaacacagattaataaagaaacaattctcaaagcgaagacattccatgccaatagaacattacattccgattaattcatcatcgaaggaaaaaactaacaagatcatcaaaaactattacagagattctacgcgaatatataatgacattgagctggcaacgaacagatttgtgagtaccgaattggaaccttggagaagaagtggtgatcggaggaagatttcaatcgattacgttttttgatcgtctatgaattgctttttctttatcagaagaagaagaagaatcgaggagaaagattgaacaaggcaagaggaaggaggaggagctcagcggcgtcaagggtatagtcgtcattattgtctctaattgtttctttttttttatgacatcccaccaggccactcaccgaatctcagccgttggatctgcttaccaagtcgccggattcaggttctttttttttttttgtatctatctgattattataaaaaccaaaattgcataaggtaataagaattatattcgttaaaatattttgtaatcaatttcgaataattgaaaacattgattgatagcactcttctgttcaactacgaatgtgacaaagatagttaactttctcttgatttctaggctaaataattaaaaaatgttactacattcttatgaaatctaacagatattgagtcttatcaatcacgcacaatatcgagaattaaaaatacaagaagctggttaaaagcataaacatataacaattggcatctgcggttgaaaaatgtgggcctgtgttccaaacgtggcccaaaataaaataatcccagcccaaactaatatggacgtggcaatttcgcgtttaattacctgacgctgttagcaattttggggtagtgatttttgtggtaaacatattttattaccaaattaactccaaaatttgattttaaaaataaataaaaaactgtagcctcgttttatttttcttaaagatcaaatccaaatccaaacaagattttcagaaataaaccaacaagaaacactgattcttttaaaaaaaaaaagaatctctatagaggagtattttggagtaatctcatctcataaaaactagtgacttgatcagcaacaggcaacagcccacataatggcttgtcctggtggaatcctcattagcattggaaacaatcctctccataaggccaataatccttcctctgcataaatccttctaatggcatcacccatccctttatatctcaccccactttcacagtctcaggttggtttgagccatcaacctcgttttgaccacatcaaatggttcgagcaaaatgtatggctcaactttgaatttgataatatattaaattaaacaaaaaattcaaatcagaattttaaattgaataatttatatataccataaatctatatatacatttttgcagccattttgtgaaataaatcatgtagttggacttatttacaatggctgccactggattttgatgtttgtttttgataattagaaagaaaatcttcgaattaaatatttgacatttaacaatctttccaaaatctctccacattaactacacgattattttctaaaataaaacttccaacatttaatatcatttaattactacaaaattatcatttttgatattgcttttctccatgactataacaattgagttataataatcaaagcagaaatataatttgatagcatttaattactacaaaattacaaaatatttagacaataattcataaacatatcataaataagatcaacattaataaaataaatggttttgttttacgggacgggttgacggaacgagtttaataggacgttacttaataataattgtaaactataaaataaaaatattttatagttagatacaatttgtaaacttttatatactaacattaaaaaataaattgtttccgcggtataccgcgggttaaaatctagtatatttacattatttacaatattattaatataattaattaattaattaattaaatatattgggttatcgaaaaccgaaccgaacctacctatttgggttgagaaaaaatacaaccgaatggtttggtttggttcggttcggctctcttttctccaaacgctttttctttctctctcacttgaaaaatctcccggagacctctctccttctctcgcagccgacgatcccatccaaaaaccaaaactcgctctccggtgatcgtctttcggtcagattcttataagcgtgcttgattttcaaatcaagtttgtttctttatctccagagtttatcatctcttatgtgactgtgttgtatagcttcttctctataactcctttgtgctccttctctgggaaatttctctatttagagtgctttaggattcgatttcgtgtggatctgctttcaattcgtttattcgttgcgttccactgaattgagtttgtatagagtattaattctacttgaatgcttaatgtttgaattgatctctgttgcttgcagaaaatg

SEQ ID NO: 29979 - DNA, 3000 bp, Unknown; identical to SEQ ID NO: 12288
  misc_feature (1)..( 3000): 2750-1469P.txt file - cDNA_ID_3024485; gDNA_ID_2214541; Annot_ID_134476

SEQ ID NO: 29980 - DNA, 3000 bp, Unknown; identical to SEQ ID NO: 12284
  misc_feature (1)..( 3000): 2750-1469P.txt file - cDNA_ID_3024485; gDNA_ID_2214541; Annot_ID_185242

SEQ ID NO: 29981 - DNA, 3000 bp, Unknown; identical to SEQ ID NO: 12287
  misc_feature (1)..( 3000): 2750-1469P.txt file - cDNA_ID_3024497; gDNA_ID_2214541; Annot_ID_185239

SEQ ID NO: 29982 - DNA, 3000 bp, Unknown; identical to SEQ ID NO: 21341
  misc_feature (1)..( 3000): 2750-1469P.txt file - cDNA_ID_3024505; gDNA_ID_2214541; Annot_ID_185235

SEQ ID NO: 29983 - DNA, 3003 bp, Unknown
  misc_feature (1)..( 3003): 2750-1469P.txt file - cDNA_ID_3024521; gDNA_ID_2214542; Annot_ID_185276
atgcatgttagctttccataagttcggtttaccttagtttatgtctccgttctactgcagacgcaacaaggagctgatcgaagtactcagcaagccaagtaacattgcaaaagaaatcgagtttccaaccagatactctcagtcactgtatagtcagtttgttgcttgcctgtggaaacaaaacctatcatattggcgaaacccacaatacactgcagttcgattcttctacaccgtggttatctcgctgatgcttggaacaatatgttggaaatttggctccaaaaggtatgagtaaagtggcacattgctatcaccaaagagtgatgattcctttaaccaatgatacatttcttcatatatagggacactcaacaacagttatttaatgcaatgggatcgatgtacgctgcggttctcttcattggaatcaccaatgcaaccgctgcacagcccgttgtttccatagaaagatttgtttcataccgcgagagagcagcgggaatgtactcggcacttccctttgcatttgcacaggtcacagatatgtttattatctttctatctttctcatccccgcttttgagtttaaaaacctaaaaattgtatgagtttgcaggtgtttatagaatttccatacgtgttagcacaatccacaatatacagcaccatattctatgcaatggccgcgttcgaatggtccgcggtgaagttcttgtggtacttattcttcatgtacttttcgataatgtacttcaccttctacgggatgatgacgacagcaatcaccccaaaccacaatgtcgcctcgattatagcagcacctttctacatgctctggaatcttttcagtggcttcatgatcccatacaaggtacattactaagcttatcttttatttctttagaaatactaatgttttgaatgatttgactacagaggattcctctgtggtggagatggtactactgggcaaacccggtggcttggacactgtacggtctattggtgtctcagtacggtgatgatgaaagatcggtgaagctatcggacggtatccatcaggtgatggtgaaacaactgcttgaggatgtgatgggatataaacatgacttcttaggtgtctcagctattatggttgtcgccttttgcgtcttcttctcccttgtgtttgcattcgccattaaagctttcaatttccagagaagatgatggattgattaccacttaccaactctcatattcatatatacacgtatacaacaatcatctattgtttatttgtatattggggcttttatacccaagaaggcaggggactgcctattcttcctctgtcattacatgtatgggatcaataaaagcttgtgttgtgttttatgttccttgtcattttttctgagaaatgtgtattggtcatctataacaatcactgatcatgaaccagtactgtaatagagatatatctctagtttactggttgtacacatctttgctagtatatatttggccaagtgcatatacgcttattcactcactagaaagatttccccatgtgtaacttatggtaatttttcatgtaaatagagtttcaagagctatatgtcgtctccttccaatcactaaagttagtgacaaacttagtaagtaggtttagtttcttatgaagtcaatttgtccaagcttgaatattagatctttgcgcattccgattaaccttcattttttatgtttttcgggtcgagataggcgtaaccatcaaaggttcattctggtttgaggtactcccataaacatttcgatgaaactccaatcctgcctccggttggagtctagtccacttgaccaccttcgcttcctagagatctccaaccctctatagaaggattacttacgcttcttgaaccaccattccaagcaacaacaaaccaatggaagcaacgacgcaactcactctaccaagatcatttccaacatcggcttgtacatagtatagcaccaaaacaaacacattagtcttactacttccaccaaaagtagagagaaatagagccacaaaaaaagagttaatctagtaaaatacaacagaaaatctagtaaatacgacataatctagtcgatctttcgtaaaatagcatagaaaatcaattaaaatcttataataaatgtgattagtacggacaacttcctaggatagtgatgattattctgtactaatacaaatttcatagttattaataaaagaagagttgaaaaaaaaaaaaaaaaacgaaagaagtcagtgacattcgttacatctccattggcttacatattcacacagacaaaaaaaaaaaaactccttccattttacctttttcctctcccaacaaaaaccctaaaagatcatctctctctgcagattcagtttctcgccatcgacgacgacgacaacaaaatcacatatcttctctatcgatctccaatcatcatcttcttcctaactacaggtccagcttcttctcttcgatttccctacgctttcgtctctctctcaattcgtgatttgtattcgtttaaatcgtcctcgtgatttcgtgaaatttcgccgaattctggaatcttctccgatatttcttcaatttgcttccatctgtagaagaatcagaagctttggtctatgtcggtcaatttaagaatctgttcccaatttttcttcataattcactttcatcgttttacgaattggaacctttcgaatgtttcatcgttttgttagtcactggaattggcttagcaaaaaagctgagtctctatagaagactgaatttgcttatttttctggaaaaaagtatcaattcaccattttatttacctaattcatagttttggtagctaagatatgtgttgtgttgtagttttaaaggttctaaagaagtctcatgttagcttttggagtatcaaattaactatttgctcgtttcttggtattttttaggtgtattgatgttctttgcagagatg

SEQ ID NO: 29984 - DNA, 3000 bp, Unknown; identical to SEQ ID NO: 12294
  misc_feature (1)..( 3000): 2750-1469P.txt file - cDNA_ID_3024525; gDNA_ID_2214542; Annot_ID_185274

SEQ ID NO: 29985 - DNA, 3000 bp, Unknown; identical to SEQ ID NO: 12309
  misc_feature (1)..( 3000): 2750-1469P.txt file - cDNA_ID_3024529; gDNA_ID_2214542; Annot_ID_185273

SEQ ID NO: 29986 - DNA, 3000 bp, Unknown; identical to SEQ ID NO: 12297
  misc_feature (1)..( 3000): 2750-1469P.txt file - cDNA_ID_3024541; gDNA_ID_2214542; Annot_ID_185268

SEQ ID NO: 29987 - DNA, 3000 bp, Unknown; identical to SEQ ID NO: 12298
  misc_feature (1)..( 3000): 2750-1469P.txt file - cDNA_ID_3024545; gDNA_ID_2214542; Annot_ID_185267

SEQ ID NO: 29988 - DNA, 3000 bp, Unknown; identical to SEQ ID NO: 12299
  misc_feature (1)..( 3000): 2750-1469P.txt file - cDNA_ID_3024551; gDNA_ID_2214542; Annot_ID_185263

SEQ ID NO: 29989 - DNA, 3003 bp, Unknown; identical to SEQ ID NO: 17203
  misc_feature (1)..( 3003): 2750-1469P.txt file - cDNA_ID_3024608; gDNA_ID_2214543; Annot_ID_185308

SEQ ID NO: 29990 - DNA, 3003 bp, Unknown
  misc_feature (1)..( 3003): 2750-1469P.txt file - cDNA_ID_3024612; gDNA_ID_2214543; Annot_ID_185307
gagaaatcttgcgtagagttcttctgaagatggctgaagaagctgccttctttggcgatatcgtcccacctaagctgaaaataccattcatcataaggttgattagttgctccgtcgttatgactacttgccatcgattcagaagtctaataattatgtttgcggtatgcaggaccccgaacatgtctgctatgcacagtgatacttccccggatttgaaggttgtaggaagcaagttaaaagacatattggaggttagactctctcctatacacaatgatttcacactttaatctataaatctcaaaagagtttctttggtggaactctcaggtccagactagttctctgaagatgaggaaagttgtgatcagcctatgtaacatcattgcaagccgaggagctcgtttatctgctgcggggatctatggaatcctcaagaaaataggaagagacgcaacaaaagatggagaagctcagaaatctgtgatagcgatggacggtgggctattcgagcattacactcagttcagtgagtcgatgaagagttcattgaaagagttgcttggagatgaagtttcagagagtgttgaagtgatactgtcgaatgatggttcaggtgttggagctgcattacttgctgcttctcactctcagtatctcgaacttgaagatgactctgaaacaagttaattttaaaagccttttttttgtgtttaaccttcttctttgttttgccgttagggtttaaacaaataaaaaaaagtaagaaggtaaaaatgcccttttgggaaattttatttttgacaattttcaggaacaataaaacctggattcttcatcaaagctctgggaaattcaaacgaccagccaatgttgtagaactatacatatatattcgagttctttctatgaacgttcattttttcccaaaactagtaatcagaaattctatcaagtcttttctttcgtattcttaacttgaaacacaaatcaagcatttgaaacaatgtcttctctatatttccgagcaaaagaaatacttggtataaaaacgatattttttttctcgaatttaatttaatattatatttttaaaatattaattaaaaccatttagactaaaaataatgaattaatataatacatttgttttaagattttcgaatttactagcaaagaaactccgaaatttaggatttgaatagatgtaacatatggtacgaacaactagaacattttatttttgaacagacaacaatcaatttactgcatatcaaatttatttttatgtaaatctgatatgtaattagtctgctaccaattttgttttttcccatggttatcattacaaattacaatttataaacagtaaacaaaagggtctattcagtaaaacggttttgtccacctcatccattaacacttctttcttatcttctccacttctctcctttagaatttactcgaaaggttggaccaagaacaaaaacaagactaatttcaagtgtttatttctttggtttcaattttaatgtaatggtttaattttggttctttcctcttttaacagttttgaatatattaagttgtagttcaacgaaaagatcaaatacaaaatctcagatctctcattaaagatttaattttgtacataatcttcttttttttttttttctaaaatttttgtacataatcattccaacatttttgttcttcttaaaagaaacaaaatcgaaatgcttcaatattacacaaacaaaaatgttgggatgattacagactacggaccataatttcttgtttttgctcttggtccaagaggctagctcaagccttgaagaggtaacttgtattttccttgtgttagttccaagatcatgaatatctcattcccatcttagctataaattactaaaaatttttttccgtcaactatataaactactaattacaatttttaaatctggtatgtaatttgtccgcgacaaaattttgtttttcacatgtgcatatcggcctaatgttttcacgttcgacccgaattgcccggttcaactgattaacctgtgattcgaatacttttctagtttgggtttaatgttaaaatctgacaagttcaaaatttaaaaaacccacaaaaagtcaccattaacccgtgaccggtgaaccaattgaaccggccagatgtgggttttaaaaagcttccttgactttagaataaaatataagatttaaacatttattcaatcattgaaaaagttttttcacttcttaaactcatttgatgttgtagattttggtgaagacttcacaatgccgctttaaacaatgaatcgaatggtgagagagacaaccaagattagttgtttaaattcacgatcttttcttagtttatttccgtgattggtgatctcttactatatttgttatcgtgttagatatttagttgaatataaaaaaatgtaatcattttattataattatttgattttatatatttatatatttttagtgtaaatgattttatattttattaaatgtgatgtaattaatttgttattatatttataatttttttaaaatttttattaatattaattaattgatccgtggtccaatccggatgactgggtgacccaaagatagtccggtcactatctgggtcaggtttaaaaacatcggtggtagcattggtaattcaagtctatttgaggtgatttcgtgaaagagattatttttctcgcaacgacaccgttttctagtcatttctgttgtacttctattctttcttatcttctccttcctctggtctttcccttaaaccctagaaatctctggtagtcaattggtctatgaatgggagaatcttcaaccaccgttatccaattgcgcttcgtttgaaaaattcacctatccccaccggatttttttttattttttctcttctgtttactccgaatcatgtactgtaacttaacaagaagccaaggctttccaatg

SEQ ID NO: 29991 - DNA, 3000 bp, Unknown
  misc_feature (1)..( 3000): 2750-1469P.txt file - cDNA_ID_3024633; gDNA_ID_2214543; Annot_ID_185298
gattgcacttttagagttgattcaaatcacttgaaaacgaaagaagatcctcatctatcttgtgtcaaaatatgaggatgattgtacagtaggaagtctttcatctaaaaccaaacttttgacgcttttatgtaatcttacatctccaaatacatgtttgcattctaaaacggtttgttttcctcaaaccaacctaaaacctgtagagactcgaaatagacttgaaagctttaaaactacactttgacaaataaaagactccaaaacaaaacaaaaaatagttataaaccaataaaaattatgatcaattctcccgaacttgaatttttgcttgtcttcaagcaagaacgaacaaaattcagagatcaaaagaaaaggtttgaaggtggaaacttacatattcttggaaacttctactttgtactcttcatcaactcgattccataacctactttatgtacttgaccatgagtttaatcaacatcccttactctgtataatatcccaagatccaaaggaattttcaatattccatagttgtcttcctatatagatttagtgaaaagtgtgtgctctcggcgaaggaatatcgatcacgaaccaaacaatacacgcatttatctaggctttttaacaacgaacgtgattttaccgtaataaatcctaagagaagaaaaccaaaattcagaaaaggaaagaaaaataaaaatagaaaattatgtgggttgcctaccatgagcgtttgtttaaggtctgtattttgaccatttaacacaaaatattaagtaaaatcaacttcatccccattaatctcataaaacacaatatctttattgatataatgaaacttaggatttttaatctcatgaacaatcttgttattatgaaatacaacctctagataagattctttcaagagatctagatatataattgagtccctatataatttaaatatttaaggtcgagattataaacatttaaatataataatatttaatatcaaaacatatttttaataatgtttaataattttttgtgttcttaaattatctagatattgaaatttaggctgtgaatggtgaccaaaaccgtatcgcaacagtgttgtaacagtatcaaaatctctacatatacatatatatttatgtatttttgttattatttgaaccgcatcgcacttctcccgcaccgcaaaacgcagtcaccatttaaagccttatatactataactgaatcatacattttaaggcttgagatgcatgtacttttgattggcttggtggaacgtggttggccgaagtcgtaactcgtaagcactaagcagtgcggtgtttgtcttcaatatatgtaggataagaggtcacgagctcgttgaattttaaaaggtcaagagctactattaatatctttattgacgtcagccagacaaagtcacaatgttttatgattttttgtttctattttggtacaaactattcatgtttttgttttggtccaataattatttttgatatcaaaatatcagaaaaagattaaatcaaacgactactctatgatctatatcaaagggctaaaaagatcacgcgttgcagatgaagacaaagtgctattgacggtggagtatacccgccgcaatttcttatgtattttttttatttttttgtcgtttccttaagtatgtaacacttcaccaaatctattaatttggaatataatatttacaaaaattgttagttcatgatatattctttttttctgactaaatattttaagtataacgtagtaaaatgttaagagtcaacatatcttttgaaaatctatatatatggattaggataatttttctcactaaaatcacataaacgttataaaaacgacaattaatccaaaggaaaattaatactaacattgtagaaagccacaaaaaagaaattgaaatgtgagtagatgctgagtcagaggtttggtcaatacacaacagctaattgagataatattatacacgtcacgatgacttgttttttctcctcccaacttgttaatttctttattcttaaaattaaaccatcgcaaaaacagaagaacacagctgtttttctcgactcccaatttctattttgctgctaaggacatttcatttcattatttcccaattcaggactccttagattttcctaaatttgttttcctaacttgctctctctcattctaacattttctcatttttttagattatcttgtactttttagtagattattttatcaggttttacaaacatacattgacattctaaaaagggcttctaaaaattcagtgtggaatgctgatatactaaaaaaaggtcatgcaaaattatctacgatttatctaaaattagataatttgccatatataactattaactaataatcgatcctttgattttttgtttagataaaacgaaacagctatatcttttttttttgttatcggattttaatcgaataaaagctgaaaaataacagttatatcttcttcttttttaactaatgaaacagttatatcttaaacaaacaacagaaacagtaaaatattaatgcaaatccgcgtcaagagataaattttaacaaactaataacaattgagataagattagcgcaaaagaaactctaattttagagcgtgtaaacacaaacacgtcttgaaagtaaacgtgaattacacgcttctaaaacgagcgtgagttttggttataacgaagatacggtgaagtgtgacacctttctacgttaatttcagtttgaggacacaactcaagttatgtttgatatctaaggacttgcactgtctccaaatctgcaggaaggactttttgattggatcaatataaataccatctccattctcgtctccttccaacaacatctttcacacaacaattcacacaatttctcgtttttttttgtttatcatcaaaagttttaatctaaattacgtatcaaattccgagcaagatg

SEQ ID NO: 29992 - DNA, 3003 bp, Unknown; identical to SEQ ID NO: 25863
  misc_feature (1)..( 3003): 2750-1469P.txt file - cDNA_ID_3024644; gDNA_ID_2214543; Annot_ID_185286

SEQ ID NO: 29993 - DNA, 3003 bp, Unknown
  misc_feature (1)..( 3003): 2750-1469P.txt file - cDNA_ID_3024675; gDNA_ID_2214544; Annot_ID_185354
gtcccgtaaaaaaaaaccgcagtacaccgctaatttaaatatataatgaaaataaatgttttacgggcttgcaattgtattttagtttgtcaaacaatattttgttttaaatagttgtcgaaatctagttcaaattttggagaaataagtttagtgaattgataagaaatgtatttaggtgtgttttgcttattttaagggattgcaattgtattttggtctgtcaaatattttttgttttaaatagttaccgaaatctagttcaaattttggagaaatttgcatgatatatgagattgaaatatatttggaatgttttttatttgttaattaatttattgcaaaaaaaaaatcaataattaaaagccaatagcagccattgtaaataagttccaactccaggatttatttcacaaaatggaagcaaaaatgtatatatagattttgaacgggtcagcttcatcgttgctgatttttttatgggccgatcactattttagtggaccgtctttgcattgggctgattatctcttaatgggctgtcttcgtcttgaaacgagtcaaaaggaagggtgttaattccatctccaacatttcattcatctatcttacacacacacaaaaaaaaaactgtgatttgttcaattttttatattttaataggataaagatctatttaggagtttggaggttagttcctattgcatacttcatcttcggtaaaactaaaccgcctagaggtatcgatctctggcttgaagagagagttctcgaggaacattaatagtgtgtagaatggtttatgtaaactgagaatcaattgtgactacccttggttaaaccggaaccttcttctataaaaagaggttttcattgtaacaaacacttaaaagaataacagaataaacacaatcttaaatcatcgtttgtatcataaacgtcattaatctcaactaggtcgtctctataaatttgcatctatctgtcctatcgtatttcatatctcaaattagttttttcttggatttataattattttcaatatttaactataaatctatattattggattattattattattattagattttgtttgttattgttcaagaacatgatgatctgagcacgagtttagatatagaagctcttagaaaaaaataagctgagctgagctaacttatgaaatatccgaactcattatgagctgactaatatattgaagctaactcacagaaaaagctatcaagaaattttaatatgaaaaaactaaaaaaataaatgaaagtaatatttttttctgaacacaaaaatgaaagtatttactatatatatactcttgaccaaaaagagaaatgatatttttactcacgacattacgtcgattagagaaagtgtggcgtaaatcacgtgagatcaaaataggaaactcagcaagaaacctattattcacttatattgatatgacctgcagtgaggttacttatttgatttaaaaaaaaaactgatttatttggtgtgcataatgttttttgttgttcactgcgggccggtcgatgttttttaactaagaaaattaaattttaagttcttgctaaaacaattttgaattttatattttatttattttgttacagtatttaatattatataaatgtattttgagtggtaattttaggattttacatgcgctataccattccaaattaatatcgacccaaacttatctcacagtataaccccattatgtgaaattaaatatcactttattatttttcattccaattatacttttatttaaaacacatattcatgagtcacccatagtatgtttgcttatattgtgaccataatattcctttcgttgtgatccatgttgccaaaacagacatcaattaatgaaattgtgtgtatttcgtccatgtttactcaaaaaaggtcaatatctttaatgtgatcagcaatgtgacttacgaattccccgaattccaccaaaacacctgattgcatcacttttttaatgtttctgaagcttacaaatatcatgggcaaaactccagcaaagccataaatggttggagaagaaaatctagttacatctaagggatggtccgataggtacacaaatgcctctatcatagaacttatttcatctctttcactacttttaaataaacatctaagaacaccttctacgtcgaaaacctacaatgtggcttaaattattgtacgtaggcaatatatcttctgaatttgcattctccgaccaatctatcatctgctggaaatgaataacaagctccactgaaatctcattgaaattagaaaatactctatccactttcatcattgagctgccgcaaccttgactaaaagcaaagaaatcgttttccaaatctcgagcttaccatatattcgatacattcatgagataaagcttcattgaagccaacatccttcaagcctaatcaataaaggccacacaagttgtagttttgtcctccattgataaaacaaattttatgataataggaataaggtacaaaaatatattttttgatgcaatacatgttgccaaaacgtatatcaaccaacgaaatcttatgtactttgtccattaatcagtatgattcacaacttccttaaattccaccaaaatttcggactttggcctattcaaacccattaatgactgtttaaaagctttggcctaaagattaatgttaagatgttgtcatctttggtttccattgatttaatcatttctttctttattatgcacacttggccaagtgttatcattttgagcaaaaccaactataccggttttctcctaaccggaataaaccgaagtaaaccggatatcacatcatccgttcactctctttagctcttaaggcgaaaaaagcttatcttcttcatcatctctttcctcaatcggagtgagcgcaaaaaatcaaaaattcgccgagagcacaaaccctaatggcttctctctcaatg

SEQ ID NO: 29994 - DNA, 3000 bp, Unknown; identical to SEQ ID NO: 12339
  misc_feature (1)..( 3000): 2750-1469P.txt file - cDNA_ID_3024701; gDNA_ID_2214544; Annot_ID_185342

SEQ ID NO: 29995 - DNA, 3003 bp, Unknown; identical to SEQ ID NO: 26256
  misc_feature (1)..( 3003): 2750-1469P.txt file - cDNA_ID_3024705; gDNA_ID_2214544; Annot_ID_185341

SEQ ID NO: 29996 - DNA, 3000 bp, Unknown; identical to SEQ ID NO: 12352
  misc_feature (1)..( 3000): 2750-1469P.txt file - cDNA_ID_3024711; gDNA_ID_2214544; Annot_ID_185339

SEQ ID NO: 29997 - DNA, 3003 bp, Unknown; identical to SEQ ID NO: 25870
  misc_feature (1)..( 3003): 2750-1469P.txt file - cDNA_ID_3024719; gDNA_ID_2214544; Annot_ID_185334

SEQ ID NO: 29998 - DNA, 3003 bp, Unknown; identical to SEQ ID NO: 26258
  misc_feature (1)..( 3003): 2750-1469P.txt file - cDNA_ID_3024722; gDNA_ID_2214544; Annot_ID_185332

SEQ ID NO: 29999 - DNA, 3003 bp, Unknown; identical to SEQ ID NO: 25875
  misc_feature (1)..( 3003): 2750-1469P.txt file - cDNA_ID_3024730; gDNA_ID_2214544; Annot_ID_185330

SEQ ID NO: 30000 - DNA, 3000 bp, Unknown; identical to SEQ ID NO: 12343
  misc_feature (1)..( 3000): 2750-1469P.txt file - cDNA_ID_3024738; gDNA_ID_2214544; Annot_ID_185328

SEQ ID NO: 30001 - DNA, 3003 bp, Unknown; identical to SEQ ID NO: 25877
  misc_feature (1)..( 3003): 2750-1469P.txt file - cDNA_ID_3024743; gDNA_ID_2214544; Annot_ID_185326

SEQ ID NO: 30002 - DNA, 3003 bp, Unknown
  misc_feature (1)..( 3003): 2750-1469P.txt file - cDNA_ID_3024747; gDNA_ID_2214544; Annot_ID_185325
cttgaagacttggttcatttaggagaatgactttttaacttccacgcgcttttacgcgagtggtggatatttttggataatgacttgtacttatttaattatactttttatttagtttttttctcttgtgtatattttcttctatatttgatcttatcttatcatgattattaaataaatattcattatctatagattgaatataacttgcaatgaaataatttcataaaaaaaagtaagactgactaattttctcataatatatagtttatgaccataactggtttttagactaagttaagtaattatgagtttgcagctaattatataaaatttaatttcagtataactaaataattaataagaaaaaaaattatagcaatgtcttaacaaataaaagaagttttgtttaccacatttttattttgaaatttcttaacttttgtaatttttataaatcattaaaaaaacttttattttctttcctcagttgtgaccttctaaaaaattaaagacagattctgtttatggttataaacttacgatatataattttatttgtaaattgtaatacacaacaaacaatcttatttgcaatatgctgaaattatgattatttttttgtatctacagtttttttagttaaacaattgtttgaaaagcataccttagcctaatataaaaccattaaacctttgaaagatcaaatggctttcactttcatatgaatatcttatttctactatgtcaaataattgagtatttctttttccttttgtttttacttgcgtgagcaaaatgtaaaggcttccaaagtccaatttgtttttgtttactcgtaatatttgtcaacgtttctactcgtattttatttaatgaaattcaagtgactaatatatacatatgccactggaaaatttgcaatttgtttttatgcttttggaggctgcgttgatacctaacctacttattatagaaaatagacaatgggaagaatcaaatgacatgatcttttatttaaaaacatatgtagatcgtttgaatcaggctgcatgcattgctacctaagtacctaacctacttgcgttgttattgttgttgtgtacttgtgttgttttttatttttcttgttggattcctttgaagcactattttaaatttgtaatatacattattattggataacgatttttggtatttaaaacaatctatcatagatttaagtgaactagattgttttaaataccaaaaatcgttatccaataataatgcatattaattagattgttttatgataatttctcaaataattttttatattaataagatttgaaattttgacaaaaaaataaatagatttgaataacttgattaaattaaaaatgataaatagaagataatattgtaaatattaacatatgtaaattaggagaatggatttaatacattaagtgttacctaaaaatttaatccattctcctaatttacatatgaaatatttatattcttagcataaaaaaaaagtccgactatatttcaatttagatcattgtttgagaaaaatttcactttttaggtaaatgaccaatcacgttacaacatatcagtatcaaatccacataagacatccatgtgacacattgcatatgcaaagagaaaacgagacaccaaaattttgtacaaacaataatcagtcaatccgaggctactatattaaaaaattcaaaaaaaaaattgtgatttaatgatattttgaaagtttaagttttttcgtcctaaatttgaaaactgacacatttttgatatttttacctttgatacatccgtagaaaaaatatttacctactaaatattttcttatatgtagcttataagtataattatgtgaataacactaactaaaatagatattagtttatttaagtttgaaaaaaatgtgacggttagcttctcatagcttgagttttgtggaaactttactttattatattaaatatcatcatatcacataatatgatagtaacaaactaattagtaatgtaccatcaacttttctagtagtaagtactactttgaggaatcttgcactctgatgatatcaggaatatgatcataaacttcagagcatcaactcctagaagaaaccgagtgaggtggtccaaatcaacaaacctgaacacacaagaaccttgaataagactttccaaataaaagtagaaaaaaaaaacagagaattagaaattcaaaaaccatactcttattttctgggacaagggtttttttatacccgaacaatttacaaagtgtattttcataccaaaacaaatttgaaggatgaattcatacccaaactccaaaaacatttgaattttatagctaaactttacatttagtgcttaattcaaaatcgtaaataacgagtattagtcaactgttacagttgctgagtcaaatgacatgtatttgatgttatacttcaaaacgacatcgtgttaaatgttagaattaaagttatacaaaattttgtaaaaatcagatattgaagccacgacgtttcactcatttaggcagcttattaacatttgatcgacaactatcatgagttcgagacctaatttttttgtacaactctataaaattttaattctaacacttaaaacgatgttgttataaactcttgaccaaacctagatatgaaaatacgtttttcccctgatttgatgttagccccacgaaactcatgacccgaacctagatagtttgcttgtcttcaagcaaacgctgtccagatcaaccaagtgaagggacttattttcttttttccaatgattcggaattcaagacccactacactattgggtcttcatataataaaaggcccaataaaagtctccagaggaaacaaaactaatcgaaacgacgaaacagttaaggtaacaaagtaaacaaacacgattcccaaaacacgaagaaagataaagcaaagaaaaaaaaagaaagatg

SEQ ID NO: 30003 - DNA, 3003 bp, Unknown
  misc_feature (1)..( 3003): 2750-1469P.txt file - cDNA_ID_3024762; gDNA_ID_2214545; Annot_ID_185395
agaataccatgaatagacaaaggagaaagcttccaattcgaagagatggtgaagcccaaattcaacgtgagggaattgaagccaatcatgttgcacccgaaatagttggaggcgatggagttgcaaagcgtggagttgcagaagatggagatataggtgatggagttgtagaggagatagtaaatgaggagggagaaggatatgatctcatgattctagtgttgatgaagatgattgtccggttattgtcgaagataatagcgggtacagagaggcagaacaatgtttggctgaaaatttagaggaagaagaagatgaatttgttgatgttgaaatctgcaataacttagaagaccattttgggtttgatgcgtgttaagatgatgctgttaataaatctgatgaaagcggagatgatgtttgggacagcgagaagattccagatccattatcagatgatgatgacaaatatgaagctgagaggccattcactcatggagaccattccgatgaaccgctagccttgaataatacaatcaacaatgcagacgaattcaagtatgcactcctcaggtattctctaaagactgaatacgatatcaaaatgtttaagtcatcatcgaataggcttggggcaaagtgtacacaacacatcaaagaaaagtgtccttggatagtgtattgttcttttgagaagaggaaaaacaagcttttgataaggagattctataataagcatatttgtgtaagatccggttaaacaaagtttttgaaaagtggaactattgcacaactttgggaagaaaggcttcgattgaatcctaaaattaaatctcaggagatggtagttgaaattaagagggagtttaatatgattgtgactgtgcatcagtgtaggagagcaaaacaattgctaagaaataaaagaaaggctagtcatgaatcacattttgcttgcaatgattctataggttatatgtttgttttgatgcattgaaaacagcttggaagaagtcttgttggcctattattcgtttagatgatgcatttatgaaatgggatatcaaagggaaaatgttagttgcagttggtaaagatggggataacagaatatttccaattacttgggcagtggtagaggtggaggatattgataattagatgtgttttgtgcaactgttgaaaaaagacttgagtcttggagatggagctgacattacaatgatatttgataaacatcatgtaagatttttggttctcgtaagttaaatgcaagattttatgatttcttgtgttggatattgatattatttacttgtggtgacaagatttattaaatgcagttcgtgatgagcttccccaagctgaacacagaatgtgtgcaagacacattttggaaaattggaagaagacaaacaaggatattgaatttgagcgtctgttttggaaaatagcaaggtgttacacatcacaatcctttgcaatatagataaattttgatgactttaattttgactataaaaataatattataaatgacaaatttaattacaatttattatattcatatttcataaaaaaaattatattatttatttactatcttcaaaaaaataaacatttaagatagtacttatttagttattgaatgtagcagatttatagttggaatatgtaaactgcaatattttacatgcatgccatttcaatatgtgtaaaacattttgacagacgatgcatgacacatatctctctcacaaatttccaaagtccttttaaatttttccacaacttctatttatatatatttgattatttattctgaagaatacttttagaattttatttatcttcatatttatggataattttggtatatttaaaaaatgagaaatgaaaaaatatttaacaatgtggataaagatcttctagaggttctaggtttaacagaaaaaaaaacaaaatcgtggcagttagctcaaattgagttccatgttgataattaaggttttcttaaaccagataaaaaagtttgggttagaaagatctcacataataatatatttatttaggattttggtgctttgtggacggatcacagagagaaaacaataagttttcaggaacagtgtggttctatacatcatcaaatacagagttgccaactatatgacgcgaatctctgtagaagtctatctctactccatacctaagtcgaaggtctactctggacgataaagtgtatgatttgtcccgaaaactaagatttagcctttttacggacagttcaaacctggtgaatatggtgtctttcccaaccgaatggtcggcgtttcaacatatttggaggattttcaaagcgacaaagaagaattcataagcttctttttattattaatctctcacaatgcaaatgtaaaagttgataattcggtatgaaaagttcgaaccgtttcgtatcatttatgtaaacaatattcctcaaaattggatcttttgaactctaaataaaaagataattaaaaaaatgttcatctatgatgagctacatatattatattgtattagcaacaaacctcatgatacgttcaacgtcgaaaatacacattctaagtaatagaaaaataactattaatattcccatccatgttgaagaaaatataagaaaagctaagaaactcaaaaagaagaaataaaaacaccatagaaaccggaagtgtctaaaattccaccacaaatctctaagtgactttctcaaaaataaagacttcgtcaacacaaactttcttttgatagaccacaaaaatttcttatgttgtctattcttggtatgctttgatagagacctctcctcttcaacactcgctctctctctttctttcctttttttcctctatcatttcatccatctcagattatcttcgtttttcttcatctccagagactctccttccatctacccttagagggcgcgcctcccgtgcgccttcttaactggttatg

SEQ ID NO: 30004 - DNA, 3003 bp, Unknown
  misc_feature (1)..( 3003): 2750-1469P.txt file - cDNA_ID_3024770; gDNA_ID_2214545; Annot_ID_185392
aaaaaggtattacatgccaagttcggcctcacggtctaaaagctgtcaagtcatatagttttaaccaaaaaaaaaagagagatgcaacacgaggacttcccgggaggtcagccatcctagtactactctcgcccaaacacgcttaactgcggatatctgacgggatccggtgcattagtacctaaaggtcaatgtagaaaacacatccactataaatatgaaggttcttggtttatagttttctttgttttcatgttcatcgctttaaaccatgttaaaggtaacatattatcttttgattcagattttttatttgcaccaagaaaaaatatctattgattatttatatatgaaaagctggtgttaagtttttaatctcttgttctataaatgtttacataatactttatctacattttaaatctattttttggttaattaaacatcaaaccttttgggcgtaaacaagtctctagcttgatcaagaaacaaaattttcttattctgtttgccagacctaatgtaattcactactctcacacattttcttcaaaagaaatctttctatttctacaagatcatatatatctcatgcaatgcatataatttatatatatatttgaatatctggaagttcaagcccgaaaaccttacatctcctagtggcgggatcatattaaatttatttcctttggagaagagatctctcactcgaatgtcgaaactaggagatttaccactaggtcaaccccacattggtttaatatatatatttttttgtctacatcaatatagtagattaatgtcattttatggttaaatatttctaaaattattcgatcaggatttttgtttatgaatataaagatacaaaccaatgtttattaaatttttaacaatttattgtccagtagattttaataaacttggaggaagaggataaagaagactcacttcattaccacatgaagatgatcgggctacatcgtcgggttgataagcatgagtcgtggcaaagcaatacacattcttaagaacctacacatctgtgaggattttcattcgtccatcaaactcatctccaaagtttagaagagaaagtttagaccggaattattttcaccatttctaagatggctcatgcttttgcattgattattggtgaaagtaaaccggaagacggaagactctttccctgtgcatacacatgctctattttatttttattttggctcaacattgataaaaattgattttgtttttagttagtagtttttttttcttgtcgtattttagttagtagtttagaaactatcattcaagaaatcaaaatttgctttaaattgataaaattgacaataaagataaatggtgaactaagtctcaaaagtcaaaactatcattcaagaaaatatcaaaaaaattctttagattgataagaaacagcgtaggagaatgagaaaagtggatggaacaaatacttcaagtttacttaactgtttgaaccaaaatttctgtttaaaaagaaaaacaacatcgttttggaattttaacagaaactgttgacgactttactttgtttaattagtctgtcacttgacttaacaataccctaaatttggtaaagtcaaagaaacttcataattaataataaaattaattaaaattggtaatttaattcacccaaaacaaaattgacattttttttcaaactgatgttttttgtcgtcaaacttttcattaaaatccaaagaggattacaaggtgataaagagcccaattacacaaaagataaactcaattagcccaaaattacaagaagaaacaagagaacataggtctaaaagggacacgtgtgaagatacgtgtattgatgcatgctggaagtggaaaggcacagccaccaccatctccaccgagctgaaccaccgatcaatccttcgactttcaccatagaaaagctttttctgaccaaggattttaccgatcttcagcttcaaactccaatcaccttgctttgctaccttttgctaaactctccgattgtaaaaaacagagattagcaagccatcagatctatgaaacacgggaagacgcagcgggcgagagggcaaatcagtcgtaaacacactctcttgatatgttctgcaccagccaacgaaatcctctcaacacgatttgaaaccttgaggtgataccttcttccaattccgattacggccacgattaggatatgaaggatttattcttctcatgatcgaaatcgagcagccaatgatcttaaaaactctcaattaaacgttcggattttgattcttctttactggaagagaatttagattctgcaaaaggattgaggaaacaaaatcaaaatagccaaaacggctaaaagagaactcacgcttaggtgagaaggtacatatccggatttagccggcaaagaactgattttaattggaaaacaaaaaatacataaagcttcctctctctaaaggatatgagagagataagagagagaagcttttttaaaggttgcggtaatggaccgactttcaaactgatgttttaaataatatttttctgctaaataataaacaaaaacatataaataaaaaaaatacacaaccacgaacgatcgacaattgggctcaatcggatggaaaacccacatagcattcatttaattcatataaaaaccatttcagcgagaaaaaatgtaattgggcttttccttaccggatttgaaagtgagcccaatagatataaaccctaagaactcagtaattaaagcccaaaacgacaaaaccccgttttcttcgttttacttaaaagaaaacaaagctcccgccgccgccgttatcacgacgaccaccgtgcgataccctaaatttcaacgttgattccactttgtcaagtttgtatctttcccactttgattccgatttgttaaagatttgcagattaaaagttttctttttgaagaaatccatgagtgcccaaatg

SEQ ID NO: 30005 - DNA, 3003 bp, Unknown
  misc_feature (1)..( 3003): 2750-1469P.txt file - cDNA_ID_3024860; gDNA_ID_2214545; Annot_ID_185365
cgcaacagcaagcgtccacatgaagcaagctccggattcgttgctgagaatcgatttgcagagatggtgtcgaccgacaccagtacctgtgtcgatcgacaccccaaacgggctgaaccagaactgtgtactaaagctgcttcgcaagttcagatcactgctgctattctaggacctgttgtcacgacaaccactgcatctctacaactgcatccacctccgaggaggcaacggtactcatatcttcctcttaaacctacagatatcatcaatttgactttaaaatttccaaagactgtttcacggtttagcaagccacgagtttctcgtcgagcgcttgtttgttcttttgatgattgtgcaggtaaaaggagtattccacccatacttgagtctcaccctgctgatgttccgcacttctttggtcaacctcacacaccaactgcctataagccacctcggatgatgagacgtctttcaaagaagcatttactgccaccttttgatccacctgatataaaaaatccaggaaagtcaagctattgagtctaaagaagcgtttagtgggaggcaacccacttgtatgattttctttttcttttctttttcgttttttttttctcgcttactccggatttgaatgccacttgggacagtgacgtttaagtctggtggaggcgcttactaactacgttttctttttgagtgttattcttatacatatttttctttttcagtcgttttattgagtcaaaattttgttaggaattatgatctctattctttagattatatcgtggttgattaatgctgcaggttcgactcaatccgactattgtaaaatttagatggcaaaccaacaaacttgaggatatcctagtttccaatacaaccactaaggttagagctaatctcactgctctttcttttacctcatcaatcggttagtattcatagatattgactccttatcatacctgatattgagaccaatgtgataaagaaaagtattcctctccccttataaaaataaaataaaatgaatgatgaataagagattgataggactttcagatagtgtataggggtaggaatgtttcctatgaccccattattatacattatttggaatgatcaattacaaaggttggaaaaatgcctagggtgtcgatccagtatgcgagttcccctttgtttactctctaaaaagaataattctggggagagaaagaacaccaaaaaaagaatataaagaacggtcgatttatcatggtatagtacaggattgaatctagacggatcttgaatgttagcttgtttgatgagacccagcgatgaaagcctaggggatatagttgtggaacttatgtatggaatctagaatgttgtgtaagcttgcagagaagtacatgttggttaggatttgattagaactgctagacatatggatttggttaggatgatcaaggcaataagctagagaatgttgggagttcctgtgttttcaaacctcttccatgggttcggcttttgtgttttgcttgagggcaagcaaaagctaagtctcggggagttgatataaccctatttttactgcttttagctatgatttaggtataggttttagagtccttttgtgatatgatcatggatagcattaacgatatggagcatgaaccggagcttgaacgtgagcttgtagccgaggaaggagctaagcttgtagctgaggatgagcttgtagctgaggagaacttgtagcggaggatattcttgtcacaccggccgtcccaatgacttgttctagagctaagctattcgaccaagccattgccgggatgcttaaccacatttgggaccgaccaaatgacttgagccaagtcactacctctttggttttgattcaagctcaaggacctcatcaagatggataagtgattcatgagtgctctttttccctgcctttggttttgtcccactgggttttccaaaggaaggtttttaatgaggcttatgttttcacttcatataatccattttgatgattcaaggcccaaacccactaaaataaagagacaatttcgtggccttagtagttgaagagtttattttgattttcaaaaattgtttttaatttctgttgttttctaggcagccttggagcatgttccaagacttgcctcttcatcttctcttctccttctctttatatactcttgtatttacttttgagaacttatctttcttttaatcaaaaaccttttctaagaagatcatcttgttggtgtgtatatccagcaaaatccttagtctcttttagtgcgcatatccaaaggatctaagtctcgatatcttgaagcccttccgcaagcttctgtgatatccatcgattcatttaaatctatccatcatcacggcatcacagccacctctatccatttctcaacctaagagtgccgagtccttgggaggatctcatcatgtggtatcagagcacactctgaaagttgagttttccatcgttatcattttgtatattttcatctttagatctgtgtccgtctgtcaccttgatttaattttcataattatttggtgcatgctaaaattgcgaaattaactgtcacgggtttgaaaaatactctagtattttttaaaattgtttctggaatttttgggaacgttatgataatatttagcatccgaacaagtgaaactgtcgtaattagggttctagggcatctgaagggttatttcgtgtttgtttaaaaagaactagttactggtgttgttttgttgtctctattgcagaaagaatggctgaatctgaggaggaagagactagccacaatcgaaacaacaaacttttggtggaagcctttgagaaaatgatggataccaaactgaatgcttttcgccaagagtttcatgagaaactagagttggggcagactcgtcctcgagaatgaaggagagttaatgagccgcttgagcaaagagatg

SEQ ID NO: 30006 - DNA, 3003 bp, Unknown
  misc_feature (1)..( 3003): 2750-1469P.txt file - cDNA_ID_3024864; gDNA_ID_2214545; Annot_ID_185364
cgatcagcgatccaactacctccttttgcaagagaacactttgctattcaccctgcatactatactcttgtttcacgaggaaagttttgaggacattctgatgaatccccactagatcatctagaagtctttgaagacttagtgtcctcaatcaaaggagatggtgtacaagctgattatcttctttgcaaactcttcccacactctctcgcgggcagaggaacatcatggttgtgacaaatagaagcaggttcattgaaaaattggactgacacaaagaacgcattcatgatcaacttccttgatgattcagtgacagaattattaagagagaagatctcttcattttctcaagctccaatagaaagtttaaaggcagcttggatcagcttgaatgagattgccaccgcaagcaaagaaaatcatgtttcagcaatctctgctcctgtccaagccccccccccctccccccctcaaccctccttagacagccgactcgactccatgcttgcgcagattcttgagagctaaacaaagctcgtggttgatcttaatggcaagtttgattatgtgtacacagatcttaataggaagatcgacaatttgagatctcatatatctcagccttctcctacctcagcatttgtctatgtagtcacactacacagtggaaagaaaccaaacccgatccttcagcgagaactttcagaaaagacttcatctcgtccagttgcagaaaaaacttcagtgtcaatcgatacataagggtgtcgatcgacaccaattgatcttaacgactctgttttacctttgtcaagtggaatcaataatttcacagaggaggaggaacttatacccgatggtgtcgaacgacaccattaccttcgtcgatcgacaccaacaattctcaaggagaagtcaagctgtgacaaacccatatcgaccagagtcgaccccgacagtgtcgaccgacaccaccttggtgtcgatcgacaccaacatcacatagacaggccactattgatgtttgaaagagcaggatcgatatcagacagtattgtcgaccgacactcacctagtgtcgatcgatattggacttagactccacctatctgccttgaatctccgcctattgcttacacaccaaaaattccttgtctactgcctcgacagtccaagcaagagattcctgagatgcgttgcatgagtatcatggatgaggttctacttcagttgcctccagttgaaatagacaagttgtcaccccctcttcagagtgctatgatacgagacgatgctttagagaagcaggatgacaagacaaagacagtggttgtctctgaacaggtacttcgcaacagcaagcgtccacatgaagcaagctccggattcgttgctgagaatcgatttgcagagatggtgtcgaccgacaccagtacctgtgtcgatcgacaccccaaacgggctgaaccagaactgtgtactaaagctgcttcgcaagttcagatcactgctgctattctaggacctgttgtcacgacaaccactgcatctctacaactgcatccacctccgaggaggcaacggtactcatatcttcctcttaaacctacagatatcatcaatttgactttaaaatttccaaagactgtttcacggtttagcaagccacgagtttctcgtcgagcgcttgtttgttcttttgatgattgtgcaggtaaaaggagtattccacccatacttgagtctcaccctgctgatgttccgcacttctttggtcaacctcacacaccaactgcctataagccacctcggatgatgagacgtctttcaaagaagcatttactgccaccttttgatccacctgatataaaaaatccaggaaagtcaagctattgagtctaaagaagcgtttagtgggaggcaacccacttgtatgattttctttttcttttctttttcgttttttttttctcgcttactccggatttgaatgccacttgggacagtgacgtttaagtctggtggaggcgcttactaactacgttttctttttgagtgttattcttatacatatttttctttttcagtcgttttattgagtcaaaattttgttaggaattatgatctctattctttagattatatcgtggttgattaatgctgcaggttcgactcaatccgactattgtaaaatttagatggcaaaccaacaaacttgaggatatcctagtttccaatacaaccactaaggttagagctaatctcactgctctttcttttacctcatcaatcggttagtattcatagatattgactccttatcatacctgatattgagaccaatgtgataaagaaaagtattcctctccccttataaaaataaaataaaatgaatgatgaataagagattgataggactttcagatagtgtataggggtaggaatgtttcctatgaccccattattatacattatttggaatgatcaattacaaaggttggaaaaatgcctagggtgtcgatccagtatgcgagttcccctttgtttactctctaaaaagaataattctggggagagaaagaacaccaaaaaaagaatataaagaacggtcgatttatcatggtatagtacaggattgaatctagacggatcttgaatgttagcttgtttgatgagacccagcgatgaaagcctaggggatatagttgtggaacttatgtatggaatctagaatgttgtgtaagcttgcagagaagtacatgttggttaggatttgattagaactgctagacatatggatttggttaggatgatcaaggcaataagctagagaatgttgggagttcctgtgttttcaaacctcttccatgggttcggcttttgtgttttgcttgagggcaagcaaaagctaagtctcggggagttgatataaccctatttttactgcttttagctatgatttaggtataggttttagagtccttttgtgatatgatcatg

SEQ ID NO: 30007 - DNA, 3003 bp, Unknown
  misc_feature (1)..( 3003): 2750-1469P.txt file - cDNA_ID_3024891; gDNA_ID_2214546; Annot_ID_185442
tgtatggaccaaaactttgcaatggctagtcgaagctgattcatcactaaaccgtttttattatacaaggaactgacaccatcgaaactcttgcagatgttacccaggattgaagcatttggctccaatgatttccaattggtatgacaaactgaccacctcctaagagctctcatccttcttagaatgtaaaatctgatatatatctatttgcagaatcttattgcctccaagctgggagtccagaaaatcgctgggatcacggccttggacacaagagagaaaaaaacctacgaacttgttccagatatggaggtcagtgtactaaccttttttgtatatcttctgggttctaggtccctctctttagtgaaaacaggaaattggttcaccataatcgatattgttgttggcattatactgcagatatttgtagagacagactaagttataagacagcctccccgagtggtgttcttcctcgacaggttttgttattgcacctcctctgtgttgttaattgtttttgtttcttagtagaaaataatttggctcctttgtagaagaagaaaaaaactaaacggctttaacatatggactacgccgtttgtatcttgttgttacaaaccattaaacgttactgtttgatcaatatgttaattcagaactgtttggtttaaagcataagtattgaagtcgtcaaatgaacaacttgcaatcttttgctttgtatgagatacaaataaaatcgtggtccgtttataaaatagctttctccaaacaatttcaattcccttttaactaacacaacaaacgacccggcccgtcaaaagaagaccaacagacgatgaaataaaaggaaaaactcaattttctaaactatttttgggggtcgtaaataagtgaaaagcctgccgacgaaaaaagaagaagtgaaaaaagaagtgaaaagcccttgtcttatttgtcttttactatttttctgatttaaaataaagaaacaaacatttacagtatttgtttataacgggggctaagtagagaatcatgagaagattaaaatccctaaaagttttgggggaaagaagaaagaaggaagacgatgatgatgctcagaatccgaagcagagatggactggagagagtcacagcggagggagctcatatcactgtttcccagctcaaaaccttgatcgcggatcagcttcagatccctctccataagcagaccttatccaccaatcgtgatctcctcctcgccaaaactcccgctgatctactcgccttcaccgacctcacggacccaaacctccccctctcctctctcaacctcggccatggctctatgctctacctcgcctacgatggcgagcgctccattcctggagctcctcccgttactcctgccggatccttcgggaggaagatgaccgtcgatgacttgatcgcccgccagatgcgcgtcactcgtcaggagacgtctcactgcgactccgtctccttcgatcgcgatgccgccaacgctttccagcactacgtcaatgagtctctagcttttgccgtcaagcgcggcggctttatgtacggcaccgtcaccgaggaaggacaggtggaagttgatttcatttacgagccgccccagcaaggcacggaggctaatcttattctgatgagagatgctgatgaagagaagcgcgtggacgcaatcgccatgggcttggggatgaggagggtcggtttcatttttaaccagaccgtggtgcaggacaagactgaatacactctgtccaacgccgaggtgctacaggcggcggagcttcacgccgagagcgagctgaaggagtgggtcacggcggtggtgaagcttgaggtgaatgaggatggtggcgccgatgtccatttcgaggcgtttcaaatgagtgatatgtgcatcaggctgttcaaggaagagtggttcgagacggagattatgccggacgatgatccaaagctctctaagatgaagaaggaggtggttgttggtgtgaaggatcttaaggaggtagataacgatttcttcctcgttctcgtcaggatcttggatcaccaggttcgtgtttttctctctacccttcctttgcatcaatcatcattgttctttgtactaatgctctgcttgggcaaataaagtaattgaatctggagcttttaagtcttaggttaatgaagcttgtcagtgtttgctttccatgagataattgaaaattagcatttcgtcaatggtccctgtgttttaacattaggctgctgtgatcaggggcctctgtcatcaacattcccaatagagaaccggagcagtcgagcaacgatgcgggctctaaaaacacatctggaccgggcaaagagcttgccgttggtgaagaagatgtcagattttcatctgcttctctttgtggctcagtttctggacgtgtcatcggacgtccctgctttagccgagtgtgtgcgtctgcagtcgcctgtcccagagggctatgcgttgctcatcgaatcaatggccaacacttgttaatttttgtgtcattgttttttggttcttgatacagtatatcatgttcgttttatggtccagaaaatcttttttactagttgacaaatgaaaaatctctagtgtactcgtgatgtatttgattcaagtttgggggttaatttaagttatcaacaacttgtagaaacaaagttaattcacagagtaataaatcattctaataggtatgctcaggggcaaattggcaaaacataaaaataaaaagagagctactaaagttttcgagcgaaagcgaaaatgaaaattttataattcgagcgaaatgttaaaaagctgaaaattgggggaagaagagagaagagtttcatcgtcactggaatcaatagagtcaattggcgggagaggttagtctcgaaaagaagtggaagccctagggggaaactttctcgctcactcgctcgtctgcaaacaccatg

SEQ ID NO: 30008 - DNA, 3003 bp, Unknown
  misc_feature (1)..( 3003): 2750-1469P.txt file - cDNA_ID_3024895; gDNA_ID_2214546; Annot_ID_134600
agctcacacgtgggttttctctgactctcttccttcttcttgtccttttaaattgctccatggccatgaccctcattcttctcttaggttggtttgctctgcattgtacaatgacgctgatggtgagcgtaaatatcttccccagtttttcaagtttgtcgttgcaaacccactctcagtgaggaccaaggtgattatactagtcaattacgtatcagcatttttatttgtcatttgttttcagtcctctctttatgcttgtctaattgttgctatttctgatatgcaggttcgagttgtaaaggtaggttcgagaatctccacttcactctgtgagtgcttctttagaagctttagtttttttccttgtacctcttaatttggtgttttgcatggatcatagatgggaggtttttctaaatatcatgattggcagttataccgccatgtcattagaattggatctcttttcttgacttattattcgtcaatgatcccctggaaaattgattacttctgttctggtcctcactaagtaatcttataatcctcgtccacaatatcttgaacaagtggttttgtgacactaagcaggattcactgttccgcccttttctgctgtctgtgtagtttaacctgtatttatttgtttgtattggttgtaaaatcaaaatacaagctcatgtgctgttgatgtctgggacaccaggagacgacatttttagaggcttgcattgagaaccatacaaaagcaaacctctttatggaccaagttgattttgaacctgctaagcaatggagtgctgtaagattacagaatgaagactcaacagaagatcctccaaccaggtctgtcagattttcccagaatcgttatgtgcatcataagccactcattctatcaaatcgtcctaatttgctgttccactcactctctgtgtctcagtggtcttagtggactgatacctaaaccgccagttataatccgatctggcgggggtatccacaactatctctacaagttaaacccatctgcagatgtttccgggcaaacaaaattccagggaagtaatatcctgggtaaatttcaaataacatggcgcacaaatttgggtgaacctggtcgcttacaaacacaacaaattctcggcgctgtaagtttacgctttctactctgtgacaacatgacatgaatttgtgcctatttgttgattgtttgctgttaggattttgttctaagtctgaatgtatttggtttccttagggctttgagatattgcttcctggggaagccaatgcagggtatcagttagattaggtggcagttagaacaactaggaaaactcaggttgcaccaatatcttcatttagcagtcttatactcactaccttgcattatagacctgacaaaggtttacttaatttaaaattttctgtatctccttttatgcttcatatgagatgctcatctcatcgtctaacaaacttccctctaatttttttttttttttcagccagtaagccgtaaagagattaatatgcgagttgtagaggttccagctgttatacacttaaatagaccctttcgggtaagacaactgtttttttctctctaatgtttggatacccaaagatttaattgaacttacacgggcttcacactgagtgtaaactgttttccataggcatacttgaatctcacaaaccaaactgataggcaactgggacccttcgaggtctcactgtcacaagatgaaacacaattggagaagccggttggtattaatggtctccagactctggtaacatatctgaactttctgttttcctaaaccatgtagttagaactttgccgtacacggtgacagaattgtgaatcacgtcttggctatgcaatgtgtatggaccaaaactttgcaatggctagtcgaagctgattcatcactaaaccgtttttattatacaaggaactgacaccatcgaaactcttgcagatgttacccaggattgaagcatttggctccaatgatttccaattggtatgacaaactgaccacctcctaagagctctcatccttcttagaatgtaaaatctgatatatatctatttgcagaatcttattgcctccaagctgggagtccagaaaatcgctgggatcacggccttggacacaagagagaaaaaaacctacgaacttgttccagatatggaggtcagtgtactaaccttttttgtatatcttctgggttctaggtccctctctttagtgaaaacaggaaattggttcaccataatcgatattgttgttggcattatactgcagatatttgtagagacagactaagttataagacagcctccccgagtggtgttcttcctcgacaggttttgttattgcacctcctctgtgttgttaattgtttttgtttcttagtagaaaataatttggctcctttgtagaagaagaaaaaaactaaacggctttaacatatggactacgccgtttgtatcttgttgttacaaaccattaaacgttactgtttgatcaatatgttaattcagaactgtttggtttaaagcataagtattgaagtcgtcaaatgaacaacttgcaatcttttgctttgtatgagatacaaataaaatcgtggtccgtttataaaatagctttctccaaacaatttcaattcccttttaactaacacaacaaacgacccggcccgtcaaaagaagaccaacagacgatgaaataaaaggaaaaactcaattttctaaactatttttgggggtcgtaaataagtgaaaagcctgccgacgaaaaaagaagaagtgaaaaaagaagtgaaaagcccttgtcttatttgtcttttactatttttctgatttaaaataaagaaacaaacatttacagtatttgtttataacgggggctaagtagagaatcatgagaagattaaaatccctaaaagttttgggggaaagaagaaagaaggaagacgatg

SEQ ID NO: 30009 - DNA, 3003 bp, Unknown; identical to SEQ ID NO: 30008
  misc_feature (1)..( 3003): 2750-1469P.txt file - cDNA_ID_3024895; gDNA_ID_2214546; Annot_ID_185441

SEQ ID NO: 30010 - DNA, 3003 bp, Unknown; identical to SEQ ID NO: 30008
  misc_feature (1)..( 3003): 2750-1469P.txt file - cDNA_ID_3024895; gDNA_ID_1971751; Annot_ID_175318

SEQ ID NO: 30011 - DNA, 3000 bp, Unknown; identical to SEQ ID NO: 12395
  misc_feature (1)..( 3000): 2750-1469P.txt file - cDNA_ID_3024899; gDNA_ID_2214546; Annot_ID_185437

SEQ ID NO: 30012 - DNA, 3000 bp, Unknown
  misc_feature (1)..( 3000): 2750-1469P.txt file - cDNA_ID_3024903; gDNA_ID_1971751; Annot_ID_175314
acaaagatgaatatagtaaaagtaaaactacaccaatctcttattgtgtttgttcttcttcttctttaggtctgttagccatggaatctttaattttgggaatatatatatatatatatgttaattagtacaaaccaaaaaagtattgattttattttatttaaactgggtgagcataaattagtaatgttagtataacatcctcctctacgagaaaagactagtatagtatattgtttctccttttaacagattttatacggattcttctccaactagtcagtcccttagaccactttttttctcttgacgaatcaaaacaaatttacactacgctaaaggggactaattaaggttaatgggtagatatcatatcgattagttgtgcattaaaagccaaaggggaaacacagacaagaacactacgctaagctagatatatactattttgttttctctgttgatgatgagatgacattaattaataaagacagatcaagatgcgagacaagcttcccagaacattcgattttgatccatctcactcaccrccgcagcagaatccacagccagattttcacgttggcttctcccacatcttatgtagctattcacttctccttctccgtcttcgtcttcttcatctccggcgtctctttcttcatgattcaccgtatcgtcctgcaggtcaaaacctaacaaactcgttctctgactcacgcaagacgtctcgcaagaactggcactagaagactcatgaccaagatcgtaatccttaacgcatttatcatcgtcaacgctgtcgtggccagcttcggaatctgcagatgcttctaaaagcaagaacggtgacacatcaaacacgttgttggttgtgttcatctttatttttctggtcttctgttctctaattctctttatttgtctcctaactataacagagaacttagacaagaaacacgagcagctacgtattatagtaatatatacattcatatacatgtaagcagaaagtggccattattattgacgacaaatataaaaatgttttcttttcttttgtttttgtttatgttttaagagcaacttttgtaacagggatccattggttccagaagatggaagttgtatgcaaatgacgtgagagcctgttcttctagaagggcggtgtgtaagtataaacaacgtgcgttctttaccaaaaattaaatagacacgtacaaaaacaaatatcaattgccaaatttgaaaacagagcgtatttatgcttttttcaacaggtcttctagaaagagcagcaaacatcatcagttccaaaattcagacacaagtccaagcgtgaaagctattacacttgtgttgtctcaggctattcattttctcactcaacatagagattcatgaatcaaaatcatttcatctactactttatatagttatcagaatacatgtatattctttttcatacgcgatactcgtattaattgttctagccttggtactctattaggtcttactagattttaacccgcggtataccgcgaagacaatttattttttaaagttactatatataaaagtttgcaaattatatttatctataaaatatttttattttatagtttacgattgttattaagtaacgtcctgtcaaactcgtcccgtcaatccgtcctgtaaaaaaaactcactgattttatttatgatatgtttatgaatcattgtctaaatattttttaattttgtaataattaaatgctatcaaatatctctgcggtttgatgattataatcgaattattatagtcatgtagaaaaacaatatcaaaaatgataattttgtagtaattaaataagattaaatattttgggaagttttattttagtaactaatcgtgtaattaatgtggagagattttgggaagattgtcaaatatttaattcaaagattttctttttaattatcaaaaacaattattaaatgtcagtggcagccactgtaaataaattctaactctaggatttattttacaaaatggctgcaaaaatgtatatatagatatctaaaatatcatccatatctatagcgttagactaaccagtgttgcatatttatataattctgctgcaaagaaaaaaagaaccacgtaagtaaataaatggtcatgtaattttggtgctagggagacaaaatacggaaatggcggtcgctttcgtttagaaataaagggaatatggatggggcaacgcgtggattaaaccagaaacctttgattttatttgttgactttggggatgccgcctacttctttaatcaaagttaatgattaattaaatttgatatgtatcttttgtcacacaagcaattaaccagtttacttatctcgttacgcaattaaacatgatcattcaaaatgaagcacctaacgagtagacccacatgaacaagttgcctaggttatatttttaagaaaagtagtcatacagtagtataattttacattaaatcatgctttgattaaaagaattaaataacgggatataatcatttatccaaagaaacacaaagagagagagatataagtaatcattaaggtttttggaacgagaacgatcataagtgcagatacaaaaaggattacttatcagttatcatacctaatttgtttatacgtgaaaaagatttctaaaatgtatattcaaccttgtctaaaaatatttgaaagtaatagagatattggtgtacctcatctggtggccccaatggttgtgaaatgggcagctccatagaataaaaacaaaataggcccattaatgttaaaagggggcccattaggacccagtggtaattatgaaaatatggggaagaagcagggtcaagtgaagatggaggcgccaaagaagcgagagtggataagaaaatcaaaaaaaggattctctttttctctctttcttctcacttctctctgtagttagtgtgtctctctcgccggccgatatg

SEQ ID NO: 30013 - DNA, 3003 bp, Unknown
  misc_feature (1)..( 3003): 2750-1469P.txt file - cDNA_ID_3024907; gDNA_ID_2214546; Annot_ID_134592
acgagatcgacaacgacccggactgccgtgagatcgagaaggctcttctccggctcggctgttccacggcggttccagctgtctttgtcggaggcaagcttgttggctccaccaatgaagtcatgtcccttcaccttagtggctctcttgtcccattgatcaaaccctatcagtccatcctttactagcaaaattaaaccaactcaatatataatatctaattattagctagtgagaataaacacagttacagctagagtgtgagctagctagatattcagtgaggacttcgtctgaattaatgtttatcgtttgtatgttctattgtttagcttctctcgtgtttcagtttagttaatcaactggtgtatgttgatgtatgactctctgtttatgctaatgaaaatagtattgaaacttttacattttttcccacacaattagtaacgatctcttgtgtatgttgagtaatttagggctttccatataataaggcaagaaaccgtttatacttgtctgtttttaacatggtatcagaaggaggctacacacaaaccattttcttatttagaaatattcacatacactgacagtagctagaataaaaatgtgaatggccaacacatgcatgaactcgtcttctaattatcaagatgtaatgtataagttggcttcatcattattagttagacctattgatagttaacattatatcgggcgatatacagatttagcctttgtgatgttgtgtttagagcgtacttttgaatcaaggataaatcagtgcccattagagtatatataaatcgaatgtgaaaaatattagatcagaatagacttaattagtctccaccatacaaatttggtaagaagaaaaacaatgataagataccagtggcctaatgcaactaaagcagtttgaggaagaggatggaagatctttcgcggtccaagtatatcatggctacacaaaatcactgctctttttgcgttcctttattcttgagtatcttcacgtttaatttactattattttctaatgaaaaattgtacacctttttatatatatgaactctttgttttttcgttagttgctcgtgtagtaaattaaacatatatgctcataatcaataaaaacatacaatgttagaagaaaaaaatacaattttttttactaacgaatcatatgaatagttgttttatatacggtacattaacgatcctctcatcagctttatagataacgaagcatattattctccttagttccgctttttatcacttgagattaaactctactcacaggtttaagcacgtaaattagttactaaataatggatttgacatttacgctttgcatgcttatatatgttacccataattatttccctttagttacttaaagttaccaaaatcaactacttcaagattctccaatcaaaagaagcgtgtaaaagcctctatagttatatagtagtatatagaccttgaagatttctttttgaagaaaatatgattatactgagttcaaaaggtcgaaaagaaataataaaggtagaatccctttacatgatgtgtggaacaacttttcttgacctccaacttcttgggatcgtgggaaatatataggagaatctaatcggaagttgtacagaacgtgtaagaactaagaaccatattcactttgttgtcattgttataagattcaagattctttgaccggcgcgtgaaaaaagcatccacctataggctcaagattcgtgtccaagaaaatatcgagaaccgatgattacttggaaagtggaccattttttaaaaaatcaaaaattaaaaaaggaacgtagctcatgcgaatagtttagtccaccaaagtgaaatggtagaacatttggtttcagtttagttgtgtgtatttttattaaaggcttcagaatcaatttcgatttttgaaaaatgagtttttatagccatgttagtatgttacgaggatggaaaagcaacctagctagattatcttgtgatatgtgttattgttcaagagaagtaggggcagtagttgtcgagatcatgttattagtgtcgctggaatgttagatattgcccatcctgtctctttttccccatcgtgccctaaaagtcaaactatgcatggtattagctaatcttgaataggtttaattcagtacggaaactctaattgaaaactaccttcatggagtaatagttatcgaggaacgatgatgaggtattagtggagataagcagatttggactcaatatcaaaaattaatggtgggatccatttccgtttcacctaatatacatagtggcaaacaaaaaacaaatataagaagaaaagattcagtatcgagcattctagctatgtcggtaacgtgacaaagtcctttttttcgtttgtctgtttctttaaagttaatcaaatcggccaacgctgcctcaacaacgagcttcctttttctaacgtccctaatttgccacgtccattttctggactagtcccggtttaaaaaatcttcagagatgtattcgtggtcaacttcattaactctttctcttgagcccttcattagttatgatcttatttactttttaaaaatctaaccaagtactgtatattatatatgtggtagccaaaatattatgttaaattctaggctaatccgatatatcaagaaaaatcaatatataaaaatggagagctatttttcacgagttaagtgagagagatgagtaaagaaaggcacgggaaggtgaagagagtgtaggtttccagcttcttccccaagaaataaaatgtatttgactttgtctaagcaaatatgtcgtcactttaacgtcattcattacctagaatgcaattaagatatggcttttacataagccaccaaatttggttttgttgccccaaaatatcccaagaaaagatcaacttcttcttcttaccaaaactgtcggcgtcgtctcctctaagctcctcccatg

SEQ ID NO: 30014 - DNA, 3003 bp, Unknown; identical to SEQ ID NO: 30013
  misc_feature (1)..( 3003): 2750-1469P.txt file - cDNA_ID_3024907; gDNA_ID_2214546; Annot_ID_185430

SEQ ID NO: 30015 - DNA, 3003 bp, Unknown; identical to SEQ ID NO: 30013
  misc_feature (1)..( 3003): 2750-1469P.txt file - cDNA_ID_3024907; gDNA_ID_1971751; Annot_ID_175308

SEQ ID NO: 30016 - DNA, 3003 bp, Unknown
  misc_feature (1)..( 3003): 2750-1469P.txt file - cDNA_ID_3024917; gDNA_ID_2214546; Annot_ID_185419
tcttaacttgaatatcgcttcggtttcatgagtgagaggcaaatgatttgcttggttttcaggtggacgatgtgttcttcgatgttgagacatatgttccgtcattggtgaagcaagcttctagccaagcgctcacggtggccacggaggtgcagcgcaccggcgttgtggacactaccaagagcattgcaagaagcgtccgggacaagtacgagccagcggcagagtattacgcagcgacgctgtggcgtttactgaatcaactgccgttgttccctgaagttgcgcatttagtgatccccacggcgttttactggtcagagaagtacaacgatgcggttcgttacgttggcgacagagactactttggggcagagtatctacccatgattcctattgagaagatctctgatattttggaacaagatcagtgtcgagctgattgactatttactcttctgaagccaaagattccttcttctatagagtatatatactgtatgtactctgtttttctttcctttctgcaatttgctatcccaagagatgtaatctttcttcaatatttcatttaaacaactttgccttttaataataacaagaacaagagacataaaggaaactgtcctcttcagtctcaacttttataaaagacacaagacccaaaaagtagtatctgtttactagtaaggagagtgtctgtttttcttgcggttccttggcggcttaacaaccaactcacttgaagtccaagaccggttaatctcggtagcatcctcatccgacttccagcaacatagtcgcccatcttcacccccagtccatccaaataaccctgcagctcctccatactcgcctggcatctgcagaacgctccttactacatctatgtgacctccaccaagaatagcttcagcggtaccgattgatccaggctgtttgtagttcaccggaaaataaccaacggttcctgcgcacgttccaccgatcacccataaatcttcacctcctggacaatgacaatcaacaaaataatcaacctgcaaaagagtaatgggaaagttcaactctgtaagtaaccattaggtttctggttagtgttaatgttttactagaagggaaagaatgagattgttacattatcttgagtccaactatctgatgcgagttcccgagctttctctaggttgacttcacagcttccgtcttcccaattccaaatactagaaaggagtaaagaaattaaaaacagcacaagtaacagactacagttggagaggagggcgtgaaagagtaccttagagtttctatatgagtgagacaccagagctttttatagccatctccgaggaaacctattttgccaattgaagttcccacgttgatgacctaaagagcgaccaaggcagaaatggttcagaactctcatctactatcttgatgcagcaagaaggctgataccttaaatctaaaacttacagattccagatgatcatcgtcattgatatcaccttcagtgttaaaaagacatatcaatccatccacggaagcggaaagaagcttgttgggcttgttaggaacaaagtgtacctataattaagaacagagttgacatctataaactaacaacaaactagttcctttcccgcttgagcagaaagaatgagagagcaacaaacctgagtgacgtcgtccatgtgggattcctctaaacaagcaacttgctttgagtttctccagtcccacaaaagaacctgcaccatcgcttcagattgtaacaagctgaaacatagaaaatgctcaaaactagccttttttctttctcaaagtgtactcctttttaaacatttagagaaacaaaaaaaaaaacacgattccacaggattgagatgcctaacctgctctttgcatccaccagccagaagattatctgcagcacctccataggagaagctgaaaatctcctgatcattcccagtatcaatacgcgaaacctgaaacacccatgatcaacttaaattcaatgagttccgaaaatggaatcacatttacgacagaatttatataaaaaaaaaaaaactcacctgttggaaacttcgagtgtcccaagatctaatggtaccatcggaggaacaagagtgcaaaacgtgaggagacgccgccgagtcggaggaaaacgcaatctgattgacggtatcggagtggcctttacattcgccgtagtactgaccagtcaccggcgagtaaagcttgacggtgttggttgataaggaaaccgcgattgctgtccaatcgattctgtcacaaaaccagagttgggttcactttcagtaaactaattagtatggttatcgaaaagagagaacagaaagcttttactttgggacaatctggaagacgtagtcagagccgaagttggtctgaatagagttcttgagcccaaatttcttcacgttttgagccggagaagaatccgaaagctgacgattttgaacctccacttccatctccgacgacacttcttccatttgccgtttcagcgaaattgataagggttttaacggtctagggtttgttcgttgatcaaaacgaaacgaggattagcacttacctctctaagtcatagagaaggttataactctataggtcaaaatttaggcctgttttaaccttttcggcccatttaacgcacggtccaatacgattattagcccaaggaaacaacaaccaactcgctcgctcaccgtgcgcttcttctaaacatgtccatagaaacataaacatactaaaatgtgaaaagattaaattaaaaaacggatagaaacatatagaaagccacgtgatggtagcaaacagatttagtggttacaaccagatatcatttgatattgagatttatgaaaatgtcctttttcaatggctccgatcggtcagtgatcggatctaatattataaaggtgtgttgacccataacataatattattactaatacaagtaacatg

SEQ ID NO: 30017 - DNA, 3000 bp, Unknown; identical to SEQ ID NO: 12375
  misc_feature (1)..( 3000): 2750-1469P.txt file - cDNA_ID_3024925; gDNA_ID_2214546; Annot_ID_185415

SEQ ID NO: 30018 - DNA, 3003 bp, Unknown
  misc_feature (1)..( 3003): 2750-1469P.txt file - cDNA_ID_3024937; gDNA_ID_2214546; Annot_ID_134573
cattttggacactatcttatagattcgatctattgtatttctaaagcatatatgcacccaatttttaagaataatgaaagaatactcccaccataagcatttagcttcatctaaggatcttcgcaccaaacaggaactcatgtgataggtacttatgcagtagcagaagacctagcaaacccgactgtccttactatttcacaggtaacccaagtttgacatcttctattataaaagaagttaaacattctctacacaattataatattattaccatttgcgtcattaatggctctggattccgtgcagcaaatatggagaacttgttgtctcaatgacagcttaagtatagatgggggctcatgttcttcaagcttgttaaaaaatgcactcggcaccaggcgatacacctcaccatcacatgttcgacctgtcctccctctacgttgctcagcctataacccacataagaagctaaatttagaacatccagtcatccactattattccataaatggtaaattctagcaatacctgagatctagagacccaaacaagctgtactgcgtctctttttctggacggatcccagaacacttgcagagaccggcacgagtcaatgacatatgctactttgggtattgttaccgaagattccgcaatgtttgtagccaatattacctgagaacagtattttggaaaatttatataactatgacgtcacaaaatggtagttgcaactcattgcatcaatacgagtttgatgtccccccaataataatgctcatctctcaaggacaaagaaacatggaaaggtaaaagagaaaccttgcggcgggatctgcatatcttcatagccgccaaggcttgctcggtgtcaatgcttcggtgcaatatgtgaacctcaaaagatgcaaaaaagggttccaattgatgatactgctgctcaagggagtagtatgtcggaaggaaaaccaaaatactcttctcaatgtctggttctttttcatgaatatataagataagatcatgaataagattttgcagttcaggtttgatttcagtatcagctgaagaaggacttggaccaggacagtaagctgacaaatcagaactcacaccaagcaatcctgcaacctgcttcacaaacagtgtcatattaattagcttggaaatacttgccgtcagaaaagaagaaaatcaattggataataatatagtttcataaagagcaacaaatctaaaaaagtttaacctgctcaagatataatactcttcgctggaaaattgttctctggtcagggctaggaatagcaactacttctacgcgttcacccctgcctagttctttaaagtagtctctgtaccttgttatatcagcagttgcagacatcaagaccaccctgtaattaatcaaatcacctctttaataaccatgacctcaatacaaacgttatcgatgataacacggttgaagtaatgaatcggtatagtatagaactgacttatcttctatcagcaaacacaaccacgcgaaacaatttaagaaccttaaagtaattacatcatgttgtagaaaagggttataacctgaggtcattattcttcatgagaaactgcttaacacagacaagaacaagatctgactccacagatctttcatgcacttcatcaagaatgataaccttgtactttagtgcattcaaccccttgtctagcatttcatccaacagaactccagcagttttgaacagaattttcgacctgcatgcaacaggataattgcataaaagtcatcaataagggggaaaaagccaaatattgtcctgaaaactcggacacagtagaagaaactgaaaggagatattgttctataagtcaagaagatgaagataatgatagttacccttcggtcaaaatcttagaatgcccaatgtggtaaccaatttctccacctaaatcggagttgcgagatttagcaaccatcttagcaacagctacaaccgcaaatctcctaggctgtgtacacaaaatgggagccatgtttgcttccagaaggaactgtggaacttgtgaactcttccctgaagcaaagaaggacaagtaagtaaccacactacgtatgagatgagtcgaaaatccagctatccattacaatcacaacagttcaaaggcgcagggaagctaaatatggcccaacttgtactatttccgtttaacgcgttaagatagaaacgaatcaaatggactatccactcacagaaaacattcaaaatctggtgtcatacaggaagaaaccccaacggagcatttctgtaatcaaaatgacgaagacgacaaaacaaaaacaaaaaccccaacggaaatgcagattactaactagagtaagtcgtctcggaacgaaggaagaaaaatagaataagagaaagaagaaggcgagcgcaggtaccgcatccaggctcgccgacgatgagagtgacgcgattctcgaggattttgtcgatgattctccttttcatcgccataatcggaagcgaagcgaagttggaggagggtaaaggtaacgattcagaagagctggaagacgaagtcggcgaagaaaccgccattgttgtcgtacgcggagcactgtctctcttcctctacacacagagtctagtccagtctctggtatttctaatactgccaatcacatccttcctctctacgcttttaggggggttttaggggagcgtcgatcaggtgcgacgagcgtacgtttagctcgctcgttgatctctcaagtctaataagttgactaggtttgactagtcaaaatgtgtgcgggtgtatacacacactggagagcttgccgcgaattacctaggtcccactaaggaaaggacatatatatatcatgggcaaaaaagtgccgccaatcaaaacacttgaaaaaaagcaggaaaaaaacttacaaatagaaccggcccactcatagcccagtaataaaaaagtccattaatg

SEQ ID NO: 30019 - DNA, 3003 bp, Unknown; identical to SEQ ID NO: 30018
  misc_feature (1)..( 3003): 2750-1469P.txt file - cDNA_ID_3024937; gDNA_ID_2214546; Annot_ID_185408

SEQ ID NO: 30020 - DNA, 3000 bp, Unknown; identical to SEQ ID NO: 12371
  misc_feature (1)..( 3000): 2750-1469P.txt file - cDNA_ID_3024941; gDNA_ID_2214546; Annot_ID_185407

SEQ ID NO: 30021 - DNA, 3000 bp, Unknown; identical to SEQ ID NO: 12370
  misc_feature (1)..( 3000): 2750-1469P.txt file - cDNA_ID_3024947; gDNA_ID_2214546; Annot_ID_185404

SEQ ID NO: 30022 - DNA, 293 bp, Unknown; identical to SEQ ID NO: 12369
  misc_feature (1)..( 293): 2750-1469P.txt file - cDNA_ID_3024953; gDNA_ID_2214546; Annot_ID_185400

SEQ ID NO: 30023 - DNA, 3003 bp, Unknown
  misc_feature (1)..( 3003): 2750-1469P.txt file - cDNA_ID_3024970; gDNA_ID_2214547; Annot_ID_185468
cacaacgagcagcaaccaggagaatatcggatcatcaagcgtaagcttccgtaaccaagttcttcagtccacagtaacgaatcagaagcaagattcacccataccggtagaatcaaatcgcgagaaagcagctagcaaggaagtagaagctggttctcaaagcaccaatgaggggattgctggacaaagcagtagcacagagaaaccaaaggaagaagaaagtgcgaaacaacgttggagtagaagccagagagaagctgcattgatgaagttccggttgaagaggaaagatcgatgctttgacaaaaaggtaagagacacacaagcttcatcataaaaacagcatctgaaacaaatacaagatcaaactgattcaatggagatgtataaaaatggattacaggttcggtaccagagcaggaagaagctagcagaacaacgtcctcgagtgaaaggccagttcgtgcgaaccgtgaattcagacgcgtctacaaaatcatgaagagctctttcagtttttcctctgatttcttttgttgattttataacagaaacttatttagcttttgcaatctttagtgtgctttttttttttatgtatttgattggcttcttcttctcagctaatatgagatactggggcaacttttgtatatatgtctgcaaatgatcaggctaagctaaaacagtaattccaatttcgttaagttgagaaatatttcttgttgtgatcatatccaggccgcttctctctcgatacataccaacaagaaacagattctataaaacttgatttatataccattgctatagtctatgtattaaaactcatcacattaattctctcacagtcagagaaacaaaaaaaggaaacaaaagctatcgaaagaaaaatcaacaaagaaatctttttttgtgaccgttaaactaagattttgtgaccgttaattgtgattatcagtttccttttctttgcttataaataaataattagtgagagtctcaacgcttcttctaaaacattcgacaaatcaaaactctctatctctcgcttcttcttattcttcaaccctagttctcttctcaagacaattttgtcttcaaagaggagactacaaagaggaggatatagccaagagaggggagagctttatggtggtggatgatgtcacgagagggctaccaaagaccgacgggctcaaatctgactttggaatgggctttgctctatgggccctttttgctactaaatccaacaaggtattacttttttcattctttttttttttgttttatttaccttcaaaattatttttaagtaaaactaattagtttcaccataacatttatataactaaaatgtttatatattttcattagtttaagtgtaaaatgtttttacacctatattttattataactttagattttttttatatagataagtgttaaatttttaaattttgtgtaaactaattggatacatcatccaaacccctaggaggtgtgccaggttcaatatatggtttacacattatttaactttttaacacttgttttgcttttattaaaaatgtttttaaacttacatattttcatattactattaaatctttaaggtatttttatttggataagtgttaaatttttaaattttgtgtaatctaattggatacatcatccaaacccctaagaggtgttctaggtttaatatatagtttacacattattcaactttttaacacttgttttgctttcgttaaaaatatttttaaacttatatattttcatattactattaaatctttaggtttttttttatttggataagtgttaaatttttaatttttgtgtaaactaattggatacatcatccaaacccctaaaaactgttctagattcaatatatggtttacacattatttaactttttaacacttgttttgcttttattaaaaatgcttttaaacttatatttttatactactattagatctttaaggttttaaggtttcatttataggtttaatatatggtttacatattatttaagtttttaacacttgtttttcatttattaaaaaatgtttttagacttatatttttacattactattaaacctttaatgtttttttgggataattttttttttttaattttgtgtaatctaattgaatacaagattcaaacatgtaggtggtgttttaggtttaatatggtttacaaattatttaggtattgaacacttgtttaaaaaaataaaattaaatcttagtttaagtggtaaattttaaacacgttgaaaactaattgcgcctaagcatctcgtacttagttggtccgtaagttttggtgttcgaagtttggaaagttttcacgtaatttaacacttaaactttaaaaaatcagttcatttaaaactttttgaaaattagtttaaatggtaaattttaatcacgttgaaactaaccgcacatagatatctcatatttagttgatccgtaagctttggtgtttgtaatacttataattagtttttgaaaaatgttgattgtttttactaaatttaagaaattaattcactaaaactttttaagaactagtttaagtgataaagtttaaatatgtcaaaactaaccgtacataaacatcatatccttagttaatctataaagtttggtattcgaagttttcacataactaaattttaaattatgttttggaatttttcttcttagtcaattcaataaaccctcaaaagtgaaaacccaatcattttgctaaaccgcttctgcgaaccaatatatgaaaccgattaaaaaagccactagattgattggtttaaattaaaaatttcaccggtttgacaagatacccaatcattatacacaggtaaaaaaaaagcaaaaaaaaaaaagacagcaaaaattacggaccataaaaaacggccacgtgttcatcatgttcaccgtcaacgaaagagattccgattaagagagatg

SEQ ID NO: 30024 - DNA, 3003 bp, Unknown
  misc_feature (1)..( 3003): 2750-1469P.txt file - cDNA_ID_3024977; gDNA_ID_2214547; Annot_ID_185466
gacttcttacattatgcaaaccatatatgtgttcaaatattgatatttgaaaggatagagtatgatgtatatgacgcatttcgttttatttacatgatcacccaatcgatggttacataattaagatttgtcccttcgtaatgattgtgtccctataagctggcaatatatatatagcaatcttttgtataactaggtgtcctaaactagagcatagcggtctgctaatttcggctaaggcctgaatcgttaatgatggaatcagaatgtacatctcatggaagtcgatatcgttcaacttatagagataggcacatgttaggtatctgaatgctttagtatcaaaattagaagctctcttccattgactaatttcgtaaaacatatatacgaagctatcagaatcaatgtttcattgtacggattactatgttatgtattaacagtcagttactatatttaagcagatcataagaaatgaataaattttccaaatatatatatttaatcagctaaactggttaaaaagaaactgattcaatacataatagatttgaagtcagttcaaattacgttaacggaagagtgtgctttatgttgctggtctactatatgtatacattccaaagaaatgaaatttcgcacagttcaaaactttatgaatcaagccataaaatgtgacactccgtaaactccattatattacatatgagatagtgtgaattctgtatacatagatttactgggctttagaaatggattttaagcccacaaatagtcttgcttcatttcaagaggtggccagtagtaaaaaataataatattaattttcctttttgataaaaatgatttactcttttcaattaaagtcccatctgccaacgaagattccaccacgtggcaaaggaaacgttgacggtcaaaataacgggaatccgtatcattcgctgtcacgttcatacgccacgaccaatcaacagcgtttataacggattttcagactttaaggaaacaaaatcgctggacacgtcacgcgtcaatttttgtactgtaataaaaacatcactcagatcaatgatcccatgcacgcgggaccacgtacgcgtgataaagtcttgtgatacacaccgttggatgataaagtgcaatccatctaacggtgattttgttcaagttgagaataaaataaatattttagttagaatactttttaatactatataataatattgggaaagtggctgagcataaacatgtgcatgcctgcctgtatcttgcagccttcatgtggatttatcagtgcgacactatccatcatcaaataactcatatctacactttctttcttatatatgtgaaatttatacattacattttgtaaaataaatatttatattccaaaaacaacgtagtagacgtgcctcaaaatcaaagagatgtggaacggctttagaagcaaaatccaaaattggaaaataatgataattattgccacaaaatattgattacgaaggtgatatatatattaatcactgattgatgttgttaaggaaaagaataaagttttgggctaccaaattttcgaatgttgaaattgacttttacatcgtgatctgacaaacgcatgtgttgattcaattgttcataaatcacaatacttcaaaatttcaatacgtatattttttcatttcactaatcactaatacattggtacgtttctatagattttgccactagcaagttttagcaaaatctgttatcagaatgctttaagttgagaaaactgctaatgctattaaaagaaacggctaatgattggtagacgcatcgatcgatcattcgttgagagttttcaacaaggtctaaataaactatttaaataaaatatcatagactataaaatggaaacgaaaaaaaagagcatatatttccacaattaccgttagtacttaatagtagtagtagtaaacagtgacacatgatacattttgacggctctgatcgaataaaaaagaaagttgtactaacagactttattaaaagacaagctacaatgattttttttttttgtaaggataatattttttttttataagaaaactgagaataggcaatttctgcaaatgttttgaggaagacaacctgtcttctgtgttaaaaaccaggtctgccctacatttataattatttcattgtttttttataataaagggtttacagttaaaattcaaaaatacaaaacatccaaaaaattcgaaaaaaggaaagatagaatttagaagattgtgccacaaagtcaagacccacaaaaacatttttgttttgggttatgtactgcacaaaaaaaagtgtaaataatttaaaataaacccaaaataaaataaaatagagaaaaattcagcagattattctcttcgatatgtattaaaaaattctcacagttatttttattaatgcttggagacgaatggtcaaagtttggttttatttttttgataataatgaaagtttaattatcaagaattttgcagaaatcaagagagaaggttgaagacagcgaagcaaatgtttatgtacacaagagacgcataaatatataaaatacagcgaaaaaggtaaaattgggtctctggcttttcctcatattttcaattgcttctctcttctctcttctatagccccattgtcgtgggttcccactagcagctttcttgtcttcctccattttcttttccttcattctactaaaacagaggtttttgcctcttcctctcttgtttcactctttagggtacacacaaattcactcttttttcttctttgtttgggaggggaaaagttacagttttttcctctgttttggatcaaaatttcgtttttttggttgtgttaagaaagcaacagagagagagagaaagattgaaactttggatgtgaatttagggttttgtgaattggggaaaaagcaatccagagatggctcaacagagacaatttcagatg

SEQ ID NO: 30025 - DNA, 3000 bp, Unknown; identical to SEQ ID NO: 12400
  misc_feature (1)..( 3000): 2750-1469P.txt file - cDNA_ID_3024981; gDNA_ID_2214547; Annot_ID_185464

SEQ ID NO: 30026 - DNA, 2765 bp, Unknown
  misc_feature (1)..( 2765): 2750-1469P.txt file - cDNA_ID_3024985; gDNA_ID_2214547; Annot_ID_185462
gtttgaactttgatgtttacaaaaaaaactcatttagtaagacacataatgttgttctactgaggaaaatattatattttcatgcaatggtttcggtttgtcacaaaactcattttatttaaaagccggatgaatttaatgggcctaatataaaaggcccaataagccactggttagagtatatgtggactggtttcaccaccgccgcaaaaagggagactgagataaattcgtacagcaatcggagttactatgtggacagtgaaactggcggcgatgccggttcaatttctcatggagcaatctccgttggctatttacagccaccaccaccgcataaagtaatgatcaagaattcttctgaaattttctgagctcaatttcttattctgtgaattgatttgtggcaagagcgactccatgggaattgccgaattggagccatctcgtctctgctgcttatgcaacaggtaacttttcaattgctagtttgtcgtttgtgtttttaatttcggttcggtttacatggttttgaaaaattcaattgatttcggttgggtttgaattggaattaaaggagaaaaacactgaaatcacgcactcgaggctttttttgaaaggagcgagtgtgtttcaaaacaagccatttggtgggttagaacccacagaaaacgtatacacgcgctcatcacgcgattggtgagagtgggtgtgaaatcgcccgagaggtgagagtggagtatgacatggaacgctctgattggcttataaaataaaaatagtagagatgttgctcctcccttcctatgtttatatttatttacttctcttttccgaagtatcaaaactgttctcaaacaaaaagcttggaacaaaattaaaaccaatgcaattcatatagaagagctaaagcgttttgtttttttatggctaagattttgtgaatggtcttctcattttcaaggatgttcaacttcaacaacatagcatggaactttctttgttgatgttaatctctaacatgtctggtggaaaaaaatcacatactcagagggagtgtatcacttgccttgattatcctcattcttttggtgactttactcctggtttctgaggaaaacccgcttcatgattctctttttgatgtataacgtcagttttcatcttcttcaggtatttatttgctcttcacagcttttagtattcatttcttggctatgtcttatactattcagtaacattatgatccaaagcttttgaaatctaaagaatttatagtctggttttgtgatactttttagtttcctattcatgttccccattcataatttcttgacaaggttggtatggaagattttctccaatgagacattcttatgcatgttcctttttctgtaatgtgatgtaagtagattgcattttgtgagaatatgtggtagcagagcaagtttctgaaagtatctcaaatttgcttactacaatctttgcttttgttttttcttagttagcagaacaagaccatagcattcataggagactcattgggacgacaacagttttaatccctgatgtgtatggccagcggtggtcccattccaagatgtaaacctttcaagcatacatacgaaaaggagattgtcatagatccttcaccgatcagtccacactttttccagcctcgtctgcctggatttcacagccacctcgtaatctctctctcctttactctctttctctgatatgcatgaatttgtttgtttcatctctctctggatttctttttttgcagaacattctgataagttcagagttgttctctcttatcacattcccatggatttcttctcaggcacatagatggaacaacaaatgagagcaatgtggtggtgaaactgagatcaaacgcttctgatataatctgggaagtgaagatggagggacgaagactcatccaaggctggctaaagctccccaccagccgagtcggcgacgtagttgttttcagacatgatggagatttgttgttcattgtcacttcttttggaccaagctgctatgagattcggtatgaaccgatgcaacacctgttctccagctgtgttcttcttctaaaacgagccaaaacagattcttgacactaactctcacaccatacaatctcaacaagtataaactggtaagtaagtgttcatcaatgtttcaacattgttgtcggagtttgtaatgttttcgagttctttatgggcagcctactaccggggacaattctgatggcggatggtgtcgagaaagtgaggaagataacgcttgtggatcgatacggtgtcaaaagggagatgagtcttaaaccagaggacagatatggaagaatgagttctagccatgatacttccctgtggtccatagatcttaaagggaaagtgaatggtgcagtagagacctgcggtgtcactttccatcgcttggacacttactaaaacttcagtgatcaacacattttagacaactttgatccaaaagcctgcggatgggcttacgggatggacatcttcgacctgaaagaatggtaaaatgcagataagctcttcttcttgacaactaaaacttatgacatcgaaccttgtaagttagctcttcttcttgacaagtgtctgatactcatcattcatctccaaaatgctgattaaatccagcattctcataaccaggccgcttctatctctatctcccacagaaagactagcattggtagcctaatgtcaatg

SEQ ID NO: 30027 - DNA, 3003 bp, Unknown
  misc_feature (1)..( 3003): 2750-1469P.txt file - cDNA_ID_3025009; gDNA_ID_2214548; Annot_ID_185499
aggtttggtttgtcttcaccagctttctttagatttctcttcatagtctccgatctttacaatctgggaattggttttcgggaactatttgataaatgctcttagaattccggtttaggggaatctgcgtttattgtgttctcattctgcattcgaatcaatctgttcataattgaagatatactagctatctgatttatgaaaaagttaaaaactttgatgttgagaatacaaagagacttactttatatttggattttgctgtttaatgttgatagcttttgattcttgaatgcttttatagaacaacttcactcacaagacaatgttgatgttgtgttataactttcgataagatttgaatgttttgcatatagtgctcaatgtctcatgatgactcttgtgttgatagctgattttaacaactttgtttagtggtggaaacttatgattttttttttatgttaaccaattttgacagagtcataggagtaataaactgagtgaccgggaacttattcaaataatctgcaagaatctgttctatgggaaaataacctacttacactcggataaaggaccagaaatgtcaccaaccatgacagcaaatgaaaacacacttcttattcgtaagataccaattgctaataccaggtatgttttcaatttccaatctttggtgttccagtgtatgtttctgttacatcaatttctgttacatagtgtggtccatctcatagccgatacacactgtcatagtctttgtgcattgaattaattgaaataaactatagtgtctgtggcaaatgttactatatttgtgtcatttcttttaaccacttgaatcccctgagatctttgtgccccttcatatgatttatgaaatccatttgaattccatggttaaggtttgtattcattggagatgctgtcgtcttaaaggatccaaacgattcagataagtatctggtaagaagattagcagctgtagaaggattcgaaatggtatcgggtgatgaaaaagaggagccttttgttcttgagaagaatcagtgttgggtaacagctgaaaaccaggagctcaaagctaaggtacatacataactaaatgatcttatgcaaaaacccaactatatagtctatagtctctttctgttcactttatccttacatgtgtgtttttaacaggaagcatatgatagtagaacatttggtccagtttcaacagcagacattgttggaagagctatatactgtctgagaacagccgtcgatcacggacctgttcgaaacaggttaaacataatcttgtctcttaaatttgcatttcagtaatcttgttttgtttttgcttactctaatagttcccttcgatttcagccaaactgcaatgggacaagattctccaatcctggccgtggaattggacgtggacgagatggctaagaaccataaggcatagagagacgcactttcttgtgtttgtttattattgtcaaagctaaaattgccttctttgattgagatttgagaaaacaataaatcattacaacaatgaaactaaaatcctaaattacactttccaaaacaatcttgaaaccagttttgtttgtaccttgaaatatatatttttgcaccaaatcttgatgtagcataaaaattattataatttttaggtaatttttcaaaagaaagtgaaaaaaagtggtggtccaggagagatcgaaccagcgggccatagtggatctgagagacttcgaactatgatccatccactgctgtaagagggaagtagtcgctgctctgtgaaaccagcctcacgcattaccctccgactttagaatccgcctgagtcaagccttcgcctgacccacacagattactcacagcttggactgggcagctcagatatatgtcagcatcaggtccgacccgaggaattgaaccactgttccaccaccttattgtccccactcgggtcacaagctctcgttacttagctcgacttacagttgttgtgttcttctgatatataaacaaacgcaaaactgctgagttttccgatgtgggacaaaaaactgtcatttgttttgatttatcaatttacttttacgtgggctaaacctttcaggcccattatagactgatgaaaagccctatttaacgcaaagagctctaaaaatatgaagagacagtttttgagataggagaggggaaagcaaatgcaagaagaagaagaagtgtctctatgtgctctgtctgaatctgttaacggcgttttcaggaactttgcagctgacttctgactacgttcctgataaattcttagtcttcctctctctctcatagtcagaattgtttagtatctctgttttcgggcatcgtgttagaataatttggataagctttctatctgtttggaatagcttgccgttttgttattgttgtccaccacttgttcgatgaaatgactgtgtgaaggttttaattgcttttcgacggtgttatttgcctctctatggataacgaagttgcatttcttgtcaaatttcaatccaaaacaaaaatttgcatttttgcttatgttaaattttcagaacccagtaagattatgttgcgaaaaatcaggactgttttagctacctagattatgttaggtatatactatgaaaggtttaatctttgcataaatttggtgtgttaggcattactttctgtgacatttgatcagatatctaagaaacattgagaatttggttgaacacatttgtgccctgaagatgtttacgaagctatttcggtgtaggacttacttaattttctttagttcacgcgtaattccttaggcattggctctgtgagttaaggttttgaatatgttagaagttggatccgaggtaaagactgctgtgtgctttagttcatcacattattcagcattaagggtcagattttcaattatgcatcgcgtcattagaaagtgaaaagattttatactttatg

SEQ ID NO: 30028 - DNA, 3003 bp, Unknown; identical to SEQ ID NO: 17112
  misc_feature (1)..( 3003): 2750-1469P.txt file - cDNA_ID_3025011; gDNA_ID_2214548; Annot_ID_185498

SEQ ID NO: 30029 - DNA, 3003 bp, Unknown
  misc_feature (1)..( 3003): 2750-1469P.txt file - cDNA_ID_3025066; gDNA_ID_2214549; Annot_ID_185527
ttctcaccacgttttgtatctttccttttttgttttggtttaaagcaatatgagaattttacatgctttaggtgttttttttttctttttacagcaagaaaaaatgaagagtacaacccaaagtttacagagtaatggtacaacaattaccagacgaattatcttcttacagcttggttaaatcaattgctaaagcacaaactaatggcgtgtatatatattgcatatttagccaaatagtaagcttgaagattctaagactttcaaagtaatcccttgctgagttgctattatgctgtatatgtacaatagtatataataattaaaactttaacgaagacaaactcatgtgaaaatgtaataatcagaagacaaaatataagttaataatatgtcatatatataataatagaaatatatgttcttttcgaattaaaattaaaaggtcttaattttttacaattgcaaaaactttaaactgaaaaaatgatttaatcttctggaatgtacattatataatatccgccaccctacttgctacccctagctaaaagccaaaccgatggaagactcgcttgcattaaattatgcactagcttaatctacttttaaactctcttataatacatttaattcctaatttctatcgccattttatatttttactgatatcaatattcgaagggtccatgcctatgattccatgtcatacataatatttcctttcatacctacattcattttaatgaaaaccttaaatatatatccaaaagctatacatttatgtaaactaaactggtataataatttttgaaatatgtgtatgtctactgatttactatttgattagttcgtagtaaatatattataaattgtttaaacataaaaacaaaaaaaatcatgtaactagataattttcttgacgaagattcgaattaacaacacaaaaaagttcattttctgatatcgcaatggtctaattaatggttgttgaatagtttatcttttccacgtttcataagcttttttggtacgcgacatccatattgaaaaatgtctgtctacactgagctcaatccaatgaaatttgttgtgaatgagatatatgcattcacggatttctaaaaaatatgaagtccatgacatccattgaaacatttgacaaaataaaaatataaaatatgaagtcattacaacgtagagtaaggtttctaaaaaccccactctcgtttcgtagaagccccactaccacctcactttaatttcattcattatctcatttacgttgatactttaaattcatttttccatataaacttgtaagtatgaaatttgtacttagtatatattttatctatctttccatgatgaacttaaatatattacagtttgcctagcctttttagctcagctatatatatatatatatatgctaatgttgttacgatgtttattgttttgtgtctatatcttatttacttttttgaattattaataaaatggaacaattatacatatagattatagatacatatatctaaatataatatattgtatctatatatattaatacaaattttaaagaactggcgggtttctaaattctaacatatgtactgtaagttcagcttcttactaagtcataggaacatggagagcgttggcaaaatcatggtcagtttgttttgcattcataattgaagacatagtagtatcatgcaatgaagatatggtgggccaaatatatcataaaaaaaatagcgaaacaataagagaacgttcgtgaagctgaagcatatgaaaaacacgtaaatatatttatgacgagtgacatagtaagcatacgtgatattattatttaattagtaatataggccaccaatcagaattctttgtctcaacgatgaataaattaactataataatccaaatttttaacattgttttaagaatatccgttattcaattagtctacctataacaatgaattattatggatcctttatcgctatgccttgatcaggagaattagattagttacactttcgcaatttttgtagcgatggattggaacaaaaaccaaaacaaaatatagactatttacacataaattatacatgaaatcaacttaatttgttattctctaaagtttagattgtctttataaaataccaatcatatacctaactaaaactaatgaatctttaacgtgcatgagatggtgcatgtgcaaataaaactataaagaaaaccatgatatattttttctaagaatgatagtttttgggaattttagactttcggtctatatttttcgtatgtccacaccaattgttgatattgcatttaaaacattaattattattttttccaagtataattgaactagtaaccatgaggtccatgacatccatttgaaagatgtcaattcgtaatattgtttcaaaatattttttcgtttataatacataaactttaatttttcctgtaaaagatatcaactgttcttttcatttgtgttacaacccaataattattaaatatttgaaactttagtatttagaaaaaatacataaaactaatagatagatattttattttattttgaaacaaaaagctagaaatggagagtgagagaaaggtccaaaggcacggctaagaaaacaaaaccgtggacaccctgtcctcaatttgacaagtctttgtctcctccttaactctcttcttctctctctttgtcttattctagtttggtctcaactcccaaaaacgatgacgtttcattcctatatagtcgtcctctcttcttcttctcctcctcttatctctactcaacaccactcaatttcatctctctttttcccttccattgttagtataaaaaccaagcaaacccttaatcacttttcatcatcatatatcaccttaatccacatgcatacacatatctagtctttttgatatatggcaattgtatcctccacaacaagcatcattcccatg

SEQ ID NO: 30030 - DNA, 3003 bp, Unknown; identical to SEQ ID NO: 26266
  misc_feature (1)..( 3003): 2750-1469P.txt file - cDNA_ID_3025078; gDNA_ID_2214549; Annot_ID_185521

SEQ ID NO: 30031 - DNA, 3003 bp, Unknown; identical to SEQ ID NO: 25892
  misc_feature (1)..( 3003): 2750-1469P.txt file - cDNA_ID_3025082; gDNA_ID_2214549; Annot_ID_185520

SEQ ID NO: 30032 - DNA, 3003 bp, Unknown
  misc_feature (1)..( 3003): 2750-1469P.txt file - cDNA_ID_3025086; gDNA_ID_2214549; Annot_ID_185519
cagagagagaaatagagttccttcttcgatgagaaaactcgcgacggagtaatcagagattcgtaatccgtcggaagaaacttctcccatacgatatctgatttcaccgccgattcgaagatcttcgaaaccgcagcagcgacgcaagcgtcttcaggacttgtgaaagagattatgtttgaaatgcatccctcaggcaacgaatcgagagtagaagagacgatcttttttctgctttcgcttcgatttttctcaatcagtgtccgtagccgtatcatcgtctccgtcgatgcccctgatttgtgaacaatgagcgcgtctacttcccgctcctttgtattttggggtcatatgggccttttacaatagagaagcccataaaagagagccgttgatttgggctttccggcaaacactcgtaagaaccttgtgagtgatcaaaacactatctttcttctcaatatactgaaatcgttcatgtgagaattatgaacattataacatcaaaaatccaaattcagaaacattactatccacaaattagaggccaagatatacaacacagttatttaacttggtttgacatctatactgaaaccaaaacataacccgaatcatccaaccgttcttccacgggaagccggtttacataaacataccatgataccaacatcctccacttgaaagaacacggttggaacttaacttttgttgttcaccacataaaacctaacataaccaatcaatacaataaacaaccgaatatacttttatgaatttgaatttacctcttcggtcttcactccaccaataataccaatagatgagccgataatcgggttgttccgccgcattacttcagaggattttagcaggtcggatttcaattccttgaatgatcaagccacacttccgattgagctgcttagtctctaaagcactcatctcaatttcatcattatccattattcctccatcattgaagaactccccaagctcaatctccatccacccatcttctctctgcttaggtttcacaacgttcctccttcccctccttatagcttcactaaagcatattaatcttctagaaggctcctgtcccaccactcctaccgcagcttctatggccacattctgaaagccataacatttatccactcccttgaacacaatataagccgagtaacgagttcttggagataatacacgagtattcgttctgccacgaatctcgaaccaacatacatcgcgaagtttcgctactttttcaaaccttcataacacagggcaacaattgtccatcatcatcccaacgagtcattacaaccaaactaacgcaaagataatgaaaattagagtacctagattcaggaattggaatccattgccaatactgaggattatctccccatatgattgagaggttcatcgcagataacatcagacacctcttcccactcgctttctctaaccatacgctctttgatttccaaaataatcaaaatgattcaatagcagcaaacttcaaaattacaccaaaatagagatacaaattgcaactttaaggcgatgagatgagacagatcattcattattcataaattttgctacctttttgtcatcgtcgaatagaacaggatcgttacagagagagaaatagagctccttcttcgatgagaaaactcgcgatggaggaatcagagattcataatccgccggaagaaacttctcccatataatatctgacttcaccgtcgattcaaacgttttcgaaaccgtagcagcgacgcacgcatcgcgtggatttgtaaaagagattatgtaggagatgcaatcttccggaaatgaatcgaacggagacgactccgatttaactctgcgttttctccccatcgatcgacgcttgtatcttcgtcttcgtcttccacggaagctagtgtaaaatctcaagtcgttctattaatttacgaaagtacccctaaggattacgaaaatttcaagtcgttctacatattgacgaaaatagccctgatttgtgaacaatccacgcgtctacttcacgctccattgtttttttttggtcattattgtggattcgttggttaaggatttggttttgaaaatatccaaattccaaactaacaaaccaattaaaaaaaggtcaagtcaggtatgcattatggatcaacggtgggaatattatttgttttgaatttttataatatagtctgactcgttattccagaaaagtaaagcttaagctaacgaatacgaaagaaaaaattgataaaaaatgaaattaagtaaaagcaaacaatctatttttcatttgaattaaagaaaaaaaacaaacacaaaacacgcttctcttgttgagaagctagcaaaacaacactaaacctgaaacaaacgtaaatccgccgcaacaacccagttttttccgacggcgtacaagcttcctccgccgtaacgccgtcgtttaataccaagaagcttgattaggtttccgtagtgtgtgatttgtgagattcgttaaaccctagctctactactttataattcctgtgatgatctttagctagattgagagatcgaagtgatttgattactctagtgatgtatttgatcgtttgattttgggtttgaattttcccctttttagacgtaatcggaaatttctatgttcggagagttttgattctttctgtaattaactttactttttcgttatcgtttacttgtatgtaatctctttgtgtgtctttcaagttgctgaagttttttcaatactttgatttttaagctaagcatctttatcatctctctgtttatctattgatatagctatgttctagggtttgtttccattatccttgatcggttttggttggtttaatgtatagaacagtgattttttcctgttttgatggcttacaaatagtgattttatgtctctgatattgaattttggcttcagttttaaggttctgaacactgatg

SEQ ID NO: 30033 - DNA, 3000 bp, Unknown; identical to SEQ ID NO: 12421
  misc_feature (1)..( 3000): 2750-1469P.txt file - cDNA_ID_3025107; gDNA_ID_2214549; Annot_ID_185509

SEQ ID NO: 30034 - DNA, 3000 bp, Unknown; identical to SEQ ID NO: 12422
  misc_feature (1)..( 3000): 2750-1469P.txt file - cDNA_ID_3025110; gDNA_ID_2214549; Annot_ID_185507

SEQ ID NO: 30035 - DNA, 3000 bp, Unknown; identical to SEQ ID NO: 12429
  misc_feature (1)..( 3000): 2750-1469P.txt file - cDNA_ID_3025126; gDNA_ID_2214550; Annot_ID_185548

SEQ ID NO: 30036 - DNA, 3003 bp, Unknown; identical to SEQ ID NO: 26268
  misc_feature (1)..( 3003): 2750-1469P.txt file - cDNA_ID_3025134; gDNA_ID_2214550; Annot_ID_185539

SEQ ID NO: 30037 - DNA, 3003 bp, Unknown
  misc_feature (1)..( 3003): 2750-1469P.txt file - cDNA_ID_3025140; gDNA_ID_2214550; Annot_ID_185537
gtttgttcttagaatttgctggaaaatatttatttttttgttcgttttagatcagtttggtttctctagggtttaggcttgatgggtgtgattgattgtttttgattatggtgtaaagattcaaaactgagtggtttttgtttttgttttggttacaggtttgacattggcaccactcgttgtgagagtaaatccaaatttgaatgttattctcacagcatgtatcactgtttatgtgggttgctttcgttcggtcaaggatactcctccaacggtaagacaaagacgcaatcagattgtttttttttattagtgaaacaattttccaaattcgatctaaattgtttctttggtttgaaatggtgtaggagacgatgtcaaaagaacatgccatgcgtttcccattggttgggagtgctatgcttctctcacttttcttattgttcaagtttctctcaaaggacttggttaatgctgtgctaacagcttacttctttgttcttgggattgtcgctctttcgtatgtcttatctaaatcatgccttttgtttttttatttgtttatctgtggtcaagtcatgacacggttatgtgtgtttgcagagcgacattgttaccagccatcagaagatttttaccaaatccttggaatgacaatcttatcgtctggcgttttccttatttcaagtgtacgtaactaagattaccttcagtattctttggtagccatttttctcattatataagttatgggtttgtttgttatcgtttgcttagtgctagtctttgaatacttatttggttgatgtaatgatcattcaagatcctaggtgtttgtctcattttcaaatctgtttttacttttcttactctatccagttattgttctatccttctggttgagatgtgcttattttctttgatgtctaacacctttttactaaacagctttggaggtagagttcacaaagtcccaagttgttgcgggaatccctggaacattcttctgtgcgtggtatgcgtggaaaaaacattggctggctaacaatatcctcggcctttccttctgcattcaggttacttcccttgcactttatgggaatacataaactctgaagcttcactgttataacataatatttaagtttaaagtgaactggagtcactgttgttgagtgtctctttttttactaattaatgccgttgccaatacagggaattgagatgctctctctcggatcattcaagactggtgccatccttttggtaagaactgcatcttttgaatgctattcttgaaaacttgtttggacttctagatgaaaagaaaattcgtttgaaaatgactcaatcattcggtgtttgttatgcttgacttgcaggcaggactatttttctatgatatcttctgggttttctttactccagttatggttagtgttgccaaatccttcgatgctccaattaaggttagtaaaaatgcctcaaaagtacacaccataccaaattgattctgatttgttcttagtcaatttttcagtaatctcattgttacatatttctttcagctcttattccctacgggtgatgctctaagaccctattctatgcttggtcttggtgacattgtcattccgggtatgttctctaatgcttaacccaatagctatattcagcttatggttatgcattcttgaatcatatttttggatatgatatgaatataagatattaatttttgttttcctttaggtattttcgttgcactagctctaagatttgatgtgtcaagacgtagacaaccacaatacttcacaagtgcatttatcggatacgctgttggtgtgatcctcacgattgtagtcatgaactggtttcaagcagcacaggtcagtttttgtgtcttaattgttgtcatctatttattgcaaccttattttgggatttctctctgataggtttttgtttttgttttgcctttgtttcagcctgctttgttatacattgtcccagccgtaattgggttcttggcttctcactgcatttggaacggtgacatcaaaccggtttgttttctagtccttctagatttcgatgtatctattgttgtaaacgcaattatgcaacccaaacagaagaaccttcctgttaccttctgtttgcttatcgtgtttttggttgtagattaagatgtaaaggattagtgagcttatggtcttcttcttcttctttgttttgttgctgttgcagttgttggcgtttgatgaatcaaagacagaggaagcaacgactgatgaatcaaagactagtgaggaggttaataaagctcatgatgaatgaggaaaaatcgagaaagaagggcagaggagaaatatatacacataaatgtgtcttaatatatggaacaagaaggaaaacaattttgtttccaaatgatcatcaatcagtcccttctaaccccttttttgtttttttagattttcaaactttcttttggccaagacttgtgtaagttactataagttacaacaaattttctttgacttttctttctgttttatgttaaattcgttaggagactggaagttatatatcatttcgaacagaattcgaaatatgagctttttagctattgtagacaacgtggtaaggatatgaacagtgagaggcaaagaatagcacatgatgatgataaagttatgaacataatctgtgctgagaaagggacatttttgcttggggagctatttggagacaaaaaaaagctagatagaaactctacacttaatgttttttttttttttttttctgacatctagtacaattattgcttggagagcaagttgtgtgtttaataatatataacgtatatgtaagttgaataaaaatgtagagaaaaatcttaatgttaaaaaaaaagagagtaggtttggggtttaagtttgtgattaggtctagagctaaagccaaggaacaagcacgtatcaaagatcaaacaaaatg

SEQ ID NO: 30038 - DNA, 3003 bp, Unknown
  misc_feature (1)..( 3003): 2750-1469P.txt file - cDNA_ID_3025213; gDNA_ID_2214551; Annot_ID_185570
attcaagagtagagtgacacgaagctatgatgcatttattcatagagggagagatagaacatctggtgtttcctggattgaagtcttatattgtgcccgtttgggatttgtaagtgtagttgtcgctaggaaatatatttgttgatgctaaggtcatacagtcgtatagataatgctactgttaaacgagtcttgagttgtgtatttgagatttccattaccgactgagacgattggtgtgttaactttctctctctttccttccttttatgcaggaggacttatcaaatctttgatatggcacttagggtccacaagaacatacaacagagagacatggttattggtcggaatcttggaaactggattctccgggggcttgaccggatgaagccatcggctcaggttctactaccaaagaatacagagccaagcatagacaaggcgaaaagagtattacaatcaacccgtcttaaaccacatgttaacacgcagactcctcagaaccgtgaggttgataggaacttgttcatgtccttgaggaactttcggtccaaataccccattgcttcgatgatgatgatcaaacctccaagatccacgggaactactactcagtacaggccttacagtgttggtgaatccagtctgattaaaccaatttatgctagaggcgggttcaacagcgtcatcaggaaggacattttgcagtggatggtgcagaagagataaagccgccaaaattcatcaaaggcccttctgtttcttagattacaacatactcagaaggaaacacttgtctcaaccgtatcactttgtatgagtttttaataaccggtggattgataggaaaatctcctggacaactaaaaattgtgactagtattacttacttgactaacacgtctatctgttcttcttcttcttctaattacaaccaggaatgtcttctgagagattttgggttctataatcaataacaaaacaatcaggtttacttttcgggttttcactctcgattggatccaattggcctatagactgactcgttgtctcatatcagtcctccaattttgctgaatcattctttttagttttttactactgaccgaaactgaacttatctaatttcgtgacagacaaatgagtacataattaaaatttaagattaggcccaataatctgcattcagcattattctgaagatgtctctactgtagtggttacggtttttacatgaagcctgctatatatatactttatcaaatatttcagagctcaagcagagagcttccttctctggcaagcacgaaaaggccaccatctcctctagaaatcctgagatccttgtcgagataagtggtcaagagccaagagctgcctcggtttcctggaaacggaagcttgagaggtggctgaccagagagtgcccgtgaaatgtttgctgccacatcttgtaaggggttcaaagactgctttaacaacgaaaggctaatctgctgcccaaagacgcccacactctctgggagatctacacttgatttgatcaccgggggttttagcgtgccttctttgaaagaaacctgacatttaccaaacattaagacaaccagatggtgataccaatacaaattcaatctacaaagaaacctttttaacatagctttgttttaatggtaaggtttgattgactggaatgtaatcaaaagtacaaactgttaatgcttcagtgaccttaatactcaaactggtgtttgtaagtttagttacctcaattcttgaagggcttcgaacttcaaatgaagcagtagcactgaaggagaagtctgcaaaagggctggagagtgtagtggagttgtcgataatgagattgtttgtgtctattgactgacttatgcttttaactttcaacaaaggtgtcgaacccgcagctagtagaggaatcaactcagagaaagcagtgtacctatttcataacccaagaaaatacacaaaattggaacaacagtaacaattcctggattattatcattcttcatcaaagatttcacaatgtctcattctcaattcacagtgttgaaattctcagcgacaactaaaggttcctacatcatcgaaacaagatcatttaacttacagcaaaacccagttgccgtcgagaagttctggattctctaacggagccggagtaggattcagagcttccagttgattcacaagctccaaaacctccgctcggacttctgacccagctttgaaacctaattcagttccgtacaccgaatccgccaaacaccttttcagctcccaagtcgggtcagacaccgcacttccatttccagcgtcggcttcagtttctcctccaatttctcctccccactcgtcttcgttccttggaggatccgattccataaaccgggtcccggattcctcaagttcgggtccggatttctcgccccattcgtccgtaatcacattcacggtcacattatctggctgagagtcgggctcatttgcatctccaggtttctcaccccattcatctgtaactgcagacgcatctaggtcggattccgattcagattccgagggcagagaagatcggattttagaaaaccggagtggcttgggacgataaccaaaagagaaagagagagagttaagttttagggagatagaaggagagaaggtcttgcttggatttatggaggaaacatagaggagtgaagaaggacgagcgacggtgaagagcgtagccatggccgatctttgtgttcgagcttggtgagaaaatttcggaaaacaagattactcaagtcttagaaaatcacacgaaatttagatgaccccagaaaaaacgcaattttaaaacttcaaaaaaaaaaaaactttaaactaatgggcctgacccaggcccattataacgatttgtattcgtctctttcccttatccccgtagtgatactttgtctgagtgagtgagtttgaaatcaatcatcaatg

SEQ ID NO: 30039 - DNA, 3000 bp, Unknown; identical to SEQ ID NO: 12439
  misc_feature (1)..( 3000): 2750-1469P.txt file - cDNA_ID_3025217; gDNA_ID_2214551; Annot_ID_185569

SEQ ID NO: 30040 - DNA, 3003 bp, Unknown; identical to SEQ ID NO: 26271
  misc_feature (1)..( 3003): 2750-1469P.txt file - cDNA_ID_3025237; gDNA_ID_2214551; Annot_ID_185555

SEQ ID NO: 30041 - DNA, 302 bp, Unknown; identical to SEQ ID NO: 12432
  misc_feature (1)..( 302): 2750-1469P.txt file - cDNA_ID_3025241; gDNA_ID_2214551; Annot_ID_134665

SEQ ID NO: 30042 - DNA, 3000 bp, Unknown; identical to SEQ ID NO: 12447
  misc_feature (1)..( 3000): 2750-1469P.txt file - cDNA_ID_3025245; gDNA_ID_2214552; Annot_ID_185593

SEQ ID NO: 30043 - DNA, 3000 bp, Unknown; identical to SEQ ID NO: 12453
  misc_feature (1)..( 3000): 2750-1469P.txt file - cDNA_ID_3025259; gDNA_ID_2214552; Annot_ID_185609

SEQ ID NO: 30044 - DNA, 3000 bp, Unknown; identical to SEQ ID NO: 12460
  misc_feature (1)..( 3000): 2750-1469P.txt file - cDNA_ID_3025263; gDNA_ID_2214552; Annot_ID_185606

SEQ ID NO: 30045 - DNA, 3 bp, Unknown
  misc_feature (1)..( 3): 2750-1469P.txt file - cDNA_ID_3025263; gDNA_ID_1563873; Annot_ID_148440
agg

SEQ ID NO: 30046 - DNA, 3003 bp, Unknown
  misc_feature (1)..( 3003): 2750-1469P.txt file - cDNA_ID_3025271; gDNA_ID_2214552; Annot_ID_185604
attacatatggagctattgttaataatcaagatttcctcgtacatgtgtccttaatatttgttcaggcacctaaatgaatcaaagattgaattgaattagagagctaattagagatttttaaggaatgtaaaagatttacaaatctgtttttttaattctaaagatttttaaagaattatttgggtagaaattaattacaaacccaaaacagaaagcatcattgtcttttttaccaaaaaaaaagcatcatcgtctctaatatatgaaaccaatagtcaatgacccatcaccattgttgatcgattccttattattgttaggtttcagtttcttaatctcactccagttaatcacaaactccctgattcaacctctctttgcttctaccattggttgtcctttttccaccactaattctctggccaaagtcttgatgtttccccagagatgtcaccggtataacactccagtttcaggaatatagtgatgcatgcgaagaattttaaaagaatcaatttggtcattggtgtcactaaaatacatttatcttttcgggtgtcactaaaatgcatttatcttttcggtcaaatgttctcaaaaatactctgaagttaaacgtgtttgagctggaataatttttaggtgagcgaccttccgaaaaataattattgtccaaaaaagaaatatgtacatcaaagagtgtaaaagatttatcatgtcatgttactatattagcagaagatagtgtgttctttttaaaaatttattatcatgtcaaaatttctccatatacgggaatgcatcgggacaatttgtaagtttcaatttgcactgttatttttagcgctaataattccgacgaatattgatgtcactaagaatagtatcatacaataaatgagtagatattttatcagttaccattatctaaagtacccataaatgatgctaaacttttttttctttttcctacttttacgtcgtttataactgatgtaatttaattgatgccagatcctctttttcgagattccttgaacctcataattctatatatttcccaaattttcagatttatcaactaaaactactctacatattaagaaaacaaagaagaaaaatagctatggccaaggcagcttctacacttgtttttcccatcattttccttgttatgttcgccttaagtacgcattttatctttagaattattcgtcaaaatattcaatcatcttcttttcttcttataaacatagtttttattgtagctatattaattgggttataccctatatgatgtaatccattgctatctttttcttaagtgtacatttaatttcgggctttcttcattgacatatactcttagggttatattagttccttgctatgatttctttatctcaagctttttttcttcaaaaattttatattcacaatattcattggcatatgccctaaatgttgtagtccattgtgattttagccatgcataaagtatcgtttgtatcaatggtttgctcataccaatatcttaaaagttttcacatatgatctactataatttgtagcgtcggctctattcattagcatgtagcagaaatattgtaattcagtgtaatgacatctcctaagttctagtaaatattttgttatctaaatatagaacggttttgttggttatagttgaacaaaatatgggatgcatggcggttcttggctcgtgtggtgtcattacagattgcagtgggtcatgcaagactaagtttggacaagatgctagtggcgattgtgaccgtgacggtggtcaaggaacatgtatgtgtggttatccttgtccacatgataagctacatatgtgagatctacaatactttgaaatctatatttcttcaaaatgtattaagtagaaatcaaaattgaaaaaaaaataaaatcaaaacagtttgtgctatggtctctcataatctttcagatggaacttttgatatcaatgaatgttagataacataacaaaatgcttgagaactgaaagccaaaattgggagtataatccggataaataaacgaatctgatctgaactaaatcaaaacaaaatactcaatctgaaaagtaaaaacgaaccatatatcttaatctaacttatatgattttttttttctatatccgaaaacccaagtcggaaaaataacgatattataccgaagtttttcaaaaatttcaaaaattaagcttatattttgactaaaatatgaatccgaacataaattttagtttgaataccattattcattttatataaagaatcggacaacttgaactgaactctagaacacccctagctaaaatgcatctttacattctttatgtttttggacaaaaaaatgcatctctcgctctcggacaaatgatgcaagaaatacttgtagtagtactctttttggatccattattgcaaacttaatctcgagtaaaatgaaattattgataagattttctctaacgtttcaagatcttgtctataataattatacgttaaattattacgattattttaaagtgtttgacggttttagaagctaagtcaaagtttaacatttggattcgaaggaaaggaacatattttctgaattttacaagaaacagaaaggaatattttctattttcaactctactactaatatacaaatacaactatataataagattcattgttgatcatgtgattaatcaacaaagctactgttgcgcaattaatattcgaatctctaaactcatgtgatttaaaccaagattaaaaactatatattataaaatttaattatttgttacctaactttaaacatattttgtcttaaatccaaatttaattagcttgttcacaaggaaatgcctcaaaagaggaaagacgattgattcatctcaaccttctcgtcttctttcggacaacaatgtcacaaaaagtctgatcctttctctttagatttggcttcgagaaatg

SEQ ID NO: 30047 - DNA, 3003 bp, Unknown
  misc_feature (1)..( 3003): 2750-1469P.txt file - cDNA_ID_3025283; gDNA_ID_2214552; Annot_ID_185601
ttatgactaagagctcaactctcccaccaatgatcaatgctatggaagcttaccaaattatagagttctcagatgcagaaactaatccagaggatggttagtcaatcttcactactaatgaattttcgcgatatttttatatgtttcggtatatttattttggttttatttgcagtcgttgcggtccagaatattagagctgcttatgaattgagtagaatagactggcaaggagatccgtgtgttcctcggttgttcaaatgggaggggataaattgcagctacacaaatacttctattccaccaagaatcatttccttgtaagactatttaataacagatttgattactattaaaaatcagtgtttaaatctctaaaattgtgtgttatgttcttataaccagagacttatcatcaagtggactaaatggggtcatagcacctagcatacaaaatctaacacatcttcaagaactgtgagacaacaatatatatccttttaaactgcatttattttgttagaaccttttatatttattattaattgttatcgtaatcgattgatagggacttatcgaataacaatctaactggaggagtgcctgaatttctagccaacatggaatcattgttgatcatgtgagtttatttcatggtaaacaataagtgatcatgatttcttgcaccagatttatggatgatgtttatatatatcataatgttcttatctgttttgacagaaacttaggttggaatagcttaaccggtccaattcctcgagcccttcacaatagagaaaagaaagggctaaaattggtgtaagatttctccttaatggttttttttgttcgtgatgattttgcgtattcaataacattcttgttctatagtgttcaaggaaacccaaatctatgtctctctggctcatgcaagaacacgaaagtcctagtgccggtttttgcgtctcttgcttcattggcggctcttatcgctttgttggctctcatttttgttttgagaaggaaaaagcccgtatcaaaaggtataaataaatagattcatcaatcaagaagtacataagggcttaatactctgtaaagttcatggtatgtagtaatggcattacttatatggcctttccatatacagttgctacacgggagttaccaagaaagtcatcaatctttgccaaaaagaaaaagttcacttattcggaagtcgttgagcttacgaataacttcagaagagttcttggagaaggaggcttcggagttgtctaccatggttctttgagtgataccgaacaagtagcggttaaagttctttccgagtcatccgttcaaggctataaggaatttaaggcagaggtatgtcaatattttgcactagttaactgaaaaaaaaacttgctggtattgagagtttaatataatatgaaatggacccaaaaggtggagcttcttctaagagttcatcacataaacttggtaagccttgttggttactgtgatgaaggaggccatttagcacttatatatgagtacatggctaatggagaccttaaacaacatctatcaggtaattaaacactaattatacttgacatgtctttattcgtctttgaatcaattaataatgtctttaacttgttataaggatttagcatttttatttacaggagaatcttctggacctactttgaaatgggctagtagactcaaaattgctatcgaggcggcacaaggtttaatcttgctaactttaacatttccagtcacctttttataacattgtgatgacattataaagttcttcaacttcatatatcttccaatccctttttggcctaccaactttgctataatcactcactcaacatggatacaattttttaacaataggtttagagtatttgcatgttgggtgtgagccaccaatggttcatagagatgtcaaaagtacgaacatactattagataatcgtttcgaagcaaactcgcggattttggactttcaagatcgttttctgtcggagctgaaactcaagtggcaacggttgttgcaggaacacccggatatcttgatcctgagtaagttctctaattcatagacagctacataatgtaacttgaacttgtttttttccttcattaagttccataaacttcaacttcttgcagatattacctaacaaattggttaaacgagaagagcgacgtctacagtttcggaatagtactcatcgaaatcatcacaaaccgatcagtgattgaactaacccgagaaaaagctcatatagcagaatgggtaaagattcttataagcagaggagacatcgaaaaaatcgtcgacacaaaccttaatggagattacgactcaaacacagtctggaggattcttgaactagcaatgtcatgcgtaagccactcttcatcagatagaccaaccatgtccaaagttgttaatatacttaaagagtgcttgctctcagaaaatttaagaacaagacagattcatcaagataatgacgatgactcaaagaactcagacttgactttaaatttcggaactgaagtaacccctcttgcacgctagtctcttacacgaatctctttttttttttttttcaatttatgttaattatagacttctttttcttgttttttatatgaattcattctcttatatttttttttcaaatttgaacagatatatagataaaacaaaactttaaaaggaaaaaaaaacgaaaaagattttgtaattttgttttgtttttgttccatcaccattattgtcacgtgcgtggcacagaaactagaaatatataaaaatatatatatatttttttccggtggtatagatctgaatcagagaattggtaagtagtaagaaccctagctttagattcgtcagattctgattactcgaatcaaagcagggtttttgacactaaaaatccgatctcgtgaagtgtgttttgcatcgaatcggaaaatatg

SEQ ID NO: 30048 - DNA, 3003 bp, Unknown; identical to SEQ ID NO: 26276
  misc_feature (1)..( 3003): 2750-1469P.txt file - cDNA_ID_3025297; gDNA_ID_2214552; Annot_ID_185596

SEQ ID NO: 30049 - DNA, 3000 bp, Unknown; identical to SEQ ID NO: 12449
  misc_feature (1)..( 3000): 2750-1469P.txt file - cDNA_ID_3025301; gDNA_ID_2214552; Annot_ID_185595

SEQ ID NO: 30050 - DNA, 3000 bp, Unknown; identical to SEQ ID NO: 12474
  misc_feature (1)..( 3000): 2750-1469P.txt file - cDNA_ID_3025327; gDNA_ID_2214553; Annot_ID_185633

SEQ ID NO: 30051 - DNA, 3000 bp, Unknown; identical to SEQ ID NO: 12471
  misc_feature (1)..( 3000): 2750-1469P.txt file - cDNA_ID_3025329; gDNA_ID_2214553; Annot_ID_185631

SEQ ID NO: 30052 - DNA, 3000 bp, Unknown; identical to SEQ ID NO: 12469
  misc_feature (1)..( 3000): 2750-1469P.txt file - cDNA_ID_3025333; gDNA_ID_2214553; Annot_ID_185629

SEQ ID NO: 30053 - DNA, 3000 bp, Unknown; identical to SEQ ID NO: 12468
  misc_feature (1)..( 3000): 2750-1469P.txt file - cDNA_ID_3025339; gDNA_ID_2214553; Annot_ID_185625

SEQ ID NO: 30054 - DNA, 3000 bp, Unknown; identical to SEQ ID NO: 12481
  misc_feature (1)..( 3000): 2750-1469P.txt file - cDNA_ID_3025345; gDNA_ID_2214553; Annot_ID_185620

SEQ ID NO: 30055 - DNA, 3003 bp, Unknown
  misc_feature (1)..( 3003): 2750-1469P.txt file - cDNA_ID_3025428; gDNA_ID_2214555; Annot_ID_185699
tggaaaaatctaaggagactaagatcgcggctccactgtcctccaagaaggctgaatcaaggactgttcctgaggcttgtaatgtaaaatgtgaagacgcaaacgcagaaatgaagatggctgagggaagcctaaacgcattaagaacagaaaaaggatcagttgagagcaattctaatcttcaagaagaatcaaacggtgagattattaaaccttgtgaagctaaggagaatagagaacagcctgcaaagaagagctttacagaagaggaagctgctagaattatccaatctatgtaccgtggatatgacgtgagaagatgggagccaattaagaaattgaaggagatagccactgtccgtgagcagatgggagatgttaaaaagcgtattgaggcgctagaagcttctactgatcagcacattgaagagaaggagattgttgttaatggagaactggtgatgaaccttcttttgaaattggatgctgtcgaggtaatgcatgaaagactaatttcattggttggccgagatagtttatctcagtatgtactgctgtgtaggatttttgctgacagtttcctatactgatgtttatcttccagggattgcatcctagtataagagagttcaggaaagctttggccacagagctctcaagcattcaagacaagcttgactccttgaaaaatagttgcgccagtgcagagaaagaggctgtaaaggaacaagtggaaattaaatctcagcctagtgactctccagtgaacttggagcactcccagctcacagaagagaacaaaatggtatctgacacgaatttagagaaggtacttcgtctgtctcccgaggaacatcctatgagcgtcttgaatagaacagatgaaaaacaggctgaatcggctgctgaaacagaagagggatatggattgtttgaaaccctggcaacggattctaagcaagctactgaaaatgcagcggctgcttcctcgacaacaattccagagaaaattggagaggttgagactgttgttccgggtaatccaccgtcagctgatggaaacggaatgacagtgaccaacgtagaggaaaacaaagccatggtggtggaaagtttggaggagccaataaacgaattgccgcaaatggtggaagagactgaaacaaactccatacgggacccggagaatgctagtgaagtctctgaagccgaaaccaactcatcagaaaatgaaaaccgaaaaggagaagatgatattgtattgcattcagaaaaaaatgtcgagctctcagagctacctgttggagtgattgacgaggaaacacagcctctttcgcaagatccatcgtcatcatatactcgtgaagggaatatgactgcaatggaccctaaaacagcgagccaggaggaaacagaagttgatcactcacccaacaactccaaaggcattggccaacagacttctgagccacaagatgaaaaagaacagtctccagagaccgaagtcattgtgaaagaacagcctctagagacagaagttattttgaacgaacaggctccggaaccggaaatcactgaacctgggatatcaaaagaaaccaaaaagctgatggaggagaaccagcgattcaaggaaacgatggagacgttggttaaggcaggcagagaacaactagaagtcatatcgaaattaaccagtcgggtcaaaagccttgagaagaaactgtcacataagaaaaagacacagatcagacgtcgtgcaagcaaaccaatgtccgtaagtccaaccgatgccgtattatgacccccataaacattgatatgtctcaattcctcatatattgtatccatctccatcctattgagtacagaaaagagaacgagaactcaaaaattgtcttaacgaaaatccaaatatttgcctctctgttttcttcgacgttcatggataacctccttaaacgacccattcgctctgacagattcgactaaattttgtgtcaaggcccaatatataactatataaggcccatacaatgatcaacccattagttatttcaaatgtttttattatttatttcaaatttttgctataggtgtaaatttcatgtattattactttaattacatttaaaatttgtatctttcaaatttgttatgggagaaagaaagagaatgattgtgtggtttgtgcggacatagtgatccttttcatgccataactcactcttcgttttcttctttctcatcgtcacgttaggttgtctctgagccgccaaatattcatctcttgtggtcccgttcacgtcccaacgccatttacactcatctccgtaacctctctcttatgtgctttctcattacaaacaactaaaattctcaaagattaacatgtgcaagagaaataacaagtaatgatatgatctcattctcacctaatctatggttgaaaaaaaggaaatggtgtcagtattagtcataataaagccttggagttgtagactatagcatgaaaggaccaggaatcttcaagcatggttattttctgatacgaatgatttatattttaatcgtttattaacacccatttaacctcataatgactctattagcctactctcaatccccaaatttactagcataattaactaattcaagggattatcttcacccacttgtgtgcatccatcaaaagttaatttcttatcttagaaatacatttcatctaaaccaaacaaatgatatacactctcatttctattcattagtgtcatttctacaattgtagcagtatgttaactactgtaactattgtgatccaaatatacagtaaaaggttgcacctctactgtaactattttaacaagttcgcaaaatgtacataggagaaataggttgatttccatggagaaaagaaaatagtaaaaggtgaaaaaggttcactcacacgcatcctctgtctctgagagatatatttccccttgcagtaaataaaaatctatg

SEQ ID NO: 30056 - DNA, 3000 bp, Unknown; identical to SEQ ID NO: 25910
  misc_feature (1)..( 3000): 2750-1469P.txt file - cDNA_ID_3025432; gDNA_ID_2214555; Annot_ID_185697

SEQ ID NO: 30057 - DNA, 3003 bp, Unknown; identical to SEQ ID NO: 26293
  misc_feature (1)..( 3003): 2750-1469P.txt file - cDNA_ID_3025436; gDNA_ID_2214555; Annot_ID_185695

SEQ ID NO: 30058 - DNA, 3000 bp, Unknown; identical to SEQ ID NO: 12502
  misc_feature (1)..( 3000): 2750-1469P.txt file - cDNA_ID_3025450; gDNA_ID_2214555; Annot_ID_185690

SEQ ID NO: 30059 - DNA, 3003 bp, Unknown; identical to SEQ ID NO: 26294
  misc_feature (1)..( 3003): 2750-1469P.txt file - cDNA_ID_3025457; gDNA_ID_2214555; Annot_ID_185682

SEQ ID NO: 30060 - DNA, 3000 bp, Unknown; identical to SEQ ID NO: 12508
  misc_feature (1)..( 3000): 2750-1469P.txt file - cDNA_ID_3025463; gDNA_ID_2214555; Annot_ID_185675

SEQ ID NO: 30061 - DNA, 3003 bp, Unknown; identical to SEQ ID NO: 25784
  misc_feature (1)..( 3003): 2750-1469P.txt file - cDNA_ID_3025467; gDNA_ID_2214555; Annot_ID_185674

SEQ ID NO: 30062 - DNA, 3000 bp, Unknown; identical to SEQ ID NO: 12524
  misc_feature (1)..( 3000): 2750-1469P.txt file - cDNA_ID_3025514; gDNA_ID_2214556; Annot_ID_185739

SEQ ID NO: 30063 - DNA, 3000 bp, Unknown; identical to SEQ ID NO: 12531
  misc_feature (1)..( 3000): 2750-1469P.txt file - cDNA_ID_3025559; gDNA_ID_2214557; Annot_ID_185756

SEQ ID NO: 30064 - DNA, 3000 bp, Unknown; identical to SEQ ID NO: 25915
  misc_feature (1)..( 3000): 2750-1469P.txt file - cDNA_ID_3025563; gDNA_ID_2214557; Annot_ID_185761

SEQ ID NO: 30065 - DNA, 3000 bp, Unknown; identical to SEQ ID NO: 12532
  misc_feature (1)..( 3000): 2750-1469P.txt file - cDNA_ID_3025599; gDNA_ID_2214557; Annot_ID_185754

SEQ ID NO: 30066 - DNA, 450 bp, Unknown; identical to SEQ ID NO: 12545
  misc_feature (1)..( 450): 2750-1469P.txt file - cDNA_ID_3025650; gDNA_ID_2214558; Annot_ID_185819

SEQ ID NO: 30067 - DNA, 3000 bp, Unknown; identical to SEQ ID NO: 12565
  misc_feature (1)..( 3000): 2750-1469P.txt file - cDNA_ID_3025661; gDNA_ID_2214558; Annot_ID_185809

SEQ ID NO: 30068 - DNA, 3003 bp, Unknown
  misc_feature (1)..( 3003): 2750-1469P.txt file - cDNA_ID_3025665; gDNA_ID_2214558; Annot_ID_185807
aaaggtcaccactggggaaggaaacacggaactccgcagacaaagacagtttcatatcagaatcgtccagctcgagtttttcaatgttcaatacttgaacagttgattgtttgcaaggattcctaataaaccattgtttcattgcaaagtaattctgctcgtctgtcagtacatggaaaacaaagtttttactgtcctgaaacatcaataaccaaccaagaattagaaatcagagttctatgactgcatgaaaaaaaatactaagtaaagaaaactggatttaagacgcacccttgcatgtacaaccgttgagttgatcacaacggacgatgctagtatattatcggagatgataacaaagtgaagtaatgagggatctgaaaatttctcactaatgggatcctcaagtgaatctgacttgaaatgttccacagttagtcgcattgacaagcaatgaagactcttaggcattgtctgtactgcaagctggtagaggaacacactctgtttcatgtggaaactagcttcatcctcagtcaaatcaaggatctgtctcaatttcttgtcaacattgttacagtcgactggaaaagactttgcctttgcaattacagcttccatcttctgcaactttttatcaaccctgacacaacagtgttaagagatacccagtaagtacgtttaaagaaattagcataggattctacacatcaaagcttctcttgagagagaacaaacaacatccatggcgtcctcctatcatctagtacattagtttactaaattatacattggtttaagatattgagaccgataaggcttcaaaatagtgatatttctggatgtgctgcccactggataggtgaagagagaatgttatgataaatattttctataccataaaccatctgaaagcaagtaaaccactagaaaacaggatgtccagacaaactgaaggcaaactaggagagattcatgtgactagaatccaacaaaatcttttccagtaaggaactaactttcagtacaaaaatgattaaacccaaactggtagagaacttactgtggtggaaggtcagcatcttgagaactttcactaagaatacgctcaaactcttggatattctgtttcatatcccgagtcaacttgctttgagaaggcattttagcaatactgggatagtatgctctagccacaaacagctggtccttcatttgcttcaccttggcatctttcattggttccttattttcctccctccagaggcagtagctcccatatttcacttcacaagttctccaagtttcatcaccacttactattttcctctgaacacctgtatatgaggcttccgattttgttttctgttcacagaagaaagcagagtaaggttaacgttaaatgattggtgagagatataaagatgtctactaaggaaaccacttaatatatttgtacatttgcagggcttggattggcaacaacagttggggacactggtaatcctgcagattaatggagagaccagacgtaaagtatcagaccagaatcaatataaaataatggaagaggaatttcaagaaagtgaagcttgtaaagcagacctctttttttagaatcagtgccgcttgttgcattcacatctctggaacccacgtttatgtcgcttttctagcatgtgatacaataaaacaaaacataagtatagaaattgttacaaacagtttaaccatctcacccaaggaactaattcttgaccttgcccaagacaatttgagatacattaagcaacataattcatgaaagtatttcaactttctagtctcatgagatagtcaaatataaaaaaaataaagagatcattcatctaatttctctaccctttaagcaacatcacacaaaatatacggcaactgattaactacaaccttttgacctatagtttgtttgtagtgccagtaaagtttccagattcactggctaatattagcattggcatcttgcatagctttccatgaaacgaaaaggcatctaagttttttctaatgttagcattgacatcttgcaagaatactgtggcaaacctgatacaaagcctatacatttacaaatagccctattatctgtaatcaaactacaaagcctatatattttacaccacttgaaagacaagatgtgaaacattaatgccaataattatgacagaaacatacttcaatagttgaaaattaaacatatatagaccagatctgaaatgtgtgtgtcaattagagagcagtgtgtaagataatgaagtgcttccaaccaccataaatgctttgactctatgggtacatgaaaagatctaaaatttctgtcaaaaactactaatctataacataaatggaacaggtcaaggcctttaatccacactgaaacaagtggaaccaaccttgggaagaactggattgattttttgaagaacctcatcgacccgttcggatacatctctctgcaaaaccaaagaaagaatatcaaaagcagcaaaaagattttggtataaaaaatgagaatcgaatcaatcaaaggagagtgacattacctgtgtatgcttagtagcattgattctggtaaagctctcaaactgattccaaaagaaagaagattcagaacaaaatcaaaacacaccaaaacaaacacacaaagaaacgagaaattgcttactgaagaagccggttgaacagtgacaaatcctgaaaaagtgaaaaagatgagattagatctgaaacagagatcggcagaaaaaaagcaaagagagtgttagagagagaatgataagagataccaggagagtgaaagccattgtgaagaccgagtaagaaagcaagaggaacaagcatagaaagaataacaagaaccaaaactccaatcaccagaactttccaccggcgttttcctccgccaccacctcctccaccaccgcctccgcctttcatattcccgatttagaattgaatgaaatg

SEQ ID NO: 30069 - DNA, 3000 bp, Unknown
  misc_feature (1)..( 3000): 2750-1469P.txt file - cDNA_ID_3025669; gDNA_ID_2214558; Annot_ID_185806
ggtgatcgtcataggtccaactcctcccggtacgggagtgatagccgaggcaacacctaacgcttcctcgtaacatacatccccgacaagacggtaaccaaactcacagctactatcctgcaatattataacacgtcatgcttcaatgtctaatcagaaacaagaaaacaatctgaaggaaaaacatttcaagctctaattcagtttaacgttttctatatcagattggattcaagctatggtataagtcttttttcattggaaagtattaagacttttgatcagttaaggaaaatagtttcgtttttacctcgactggagttgttccaacatcaatgacaactgctccaggcttaagccaacttccacgaactaaattaggtatacccgctgctgctataacgatatccgccttcctagtaatgtgctctggatcctttgtaaacgcatgcaccgtgcttactgtcgcgtcatgcctctatccgagaatttcagaaaacataaatgcatagttaattcccaaaccaaaatgtttaagcataagaatccacttgaactataaagaagaactaatacctgcaataataaagacattggtagtccaacgatgttgcttctgcctatgaccacagcattttttcctgctatttcaacacccgttcttatcaacaactccacacagcccttaggagtgcaagatacaaacagcggttccctccctctcattgcaagattccccacgtttaatggatgaaacccatcaacatctttctccaatctcaccatattcaagatttttgattcattaagatgctgtacaagatatcttccattaaatgattggactcatgagaaaaaaaaaaaaaaaggaaaggaaaccaacaaaatacaagaacgttctcctgaaaaagagctccacaagtaagatgctctatcgcataacctgtaaattaaatgctttacctaccaacgaaaaggaaaccttaaaggggaaaatgttatgcatgagtccatggtcgatgaaaatatatgaatcaagaatttctacatacaagtatgaaaacaaagtaaacgtaactacttgacctcctaacatagaactaatctttgacatcaacaacactaacatcccccatcacaacgtccaaagaaaaaaatgagaaacatacttggggtaaaggaagttgcacaagaattccgtgaatagacgtgtcttcattgaattttctcaatacactgataatctgtccttcagtacaatcctctggtaattcagccaaaacagatttaatgccagtttcttcacaagctttaattttgttgcgaacataagtttgcgagtctctttgttcaccaaccaaaacaacagcaagaccagggacttttccaacagcctttttcatcttccccacttcactaataatctttgttctgatttcctcagcgataacattaccatctatcaccacagtcttctgttcagtctctgtataaatgcatacacacagaaatcaactcatacaattagagaattttcttgtaacatatatatatagccatgaaaatgcaacaaagagtattaccaaaggaaacaggaggtggaggatcagagtaaggaatccaattttcaggcaagtcaagtgacacgagaggaggagacactaagatggaactaaagcaatgtacatcccttgttgccaaacgaaacgccttagtatgcgccgaggccaaagctttcctcgcgatcattaacatactcaaaactaaaagaacagtcactgattcaaatcaagcacaagaaaaaagtcaatgtaaaagtacagaccagacaagagaaccttagacaggtcagcctaagctagaataaaaccataatttgatccttttagctccatactcttcattacatccacacaaacaaataaagaggcgcataatacagtaaaaacaaacttgcaccagattgaacctaaatggattaaagatttcaccagactatcataagctttcactcagctaaaattcatcttcttcactcagctaaattcatcatacatagaattcttaacaaagaagaaatcggaaaataggaaaaaacagaggagagatttaccagtggtatataaagcgtcgtcaatggcgttgaaaaatatcgctaggcataccggagtttaggattcaacgagtgacaatataaaacgatgatgattaacaaaaaaagtaaaaagaattcaccaccgtgtgagaaaagacacgtgttatgatctggagatagatcttgcaagtgggttaaataataaacggcggagacatagccacacgtgtgaaaaaaaaagaggtgtgtgtgtgtgtgtgtatgtgtgtatgtgtgtgtatctctctctctcttcctccaagtagcaaaaagcaaaggggaaagagacgatgcgatcgggctaagtgcagaaacacttatacttgtgcattctgcaacacaacacacacacagagaattcgacgagagtatgatttgagtgtatcgagaacagagagagacattgatagagagatcgttggcaacgttttggggatccaatgcgttcgtaattgggaaagacatttcattcaattctaaatcgggaatatgaaaggcggaggcggtggtggaggaggtggtggcggaggaaaacgccggtggaaagttctggtgattggagttttggttcttgttattctttctatgcttgttcctcttgctttcttactcggtcttcacaatggctttcactctcctggtatctcttatcattctctctctaacactctctttgctttttttctgccgatctctgtttcagatctaatctcatctttttcactttttcaggatttgtcactgttcaaccggcttcttcagtaagcaatttctcgtttctttgtgtgtttgttttggtgtgttttgattttgttctgaatcttctttcttttggaatcagtttgagagctttaccagaatcaatg

SEQ ID NO: 30070 - DNA, 3003 bp, Unknown; identical to SEQ ID NO: 25918
  misc_feature (1)..( 3003): 2750-1469P.txt file - cDNA_ID_3025677; gDNA_ID_2214558; Annot_ID_185798

SEQ ID NO: 30071 - DNA, 3003 bp, Unknown
  misc_feature (1)..( 3003): 2750-1469P.txt file - cDNA_ID_3025683; gDNA_ID_2214558; Annot_ID_134823
caatttttaacggattgttaatgatataggaaactttttttttttggcaaactaaaaataccgaagatagatttgtgtccgaactgttaactaagattttgtgaaaagactcagccatttaattggttgagcttagctttttctaacacgcagaagtatgtagtgagaacagttgtgacgaatctatcaaggatcaatcaagatcaatcacaattctacttatgtaaactatatattctgtaattagaagtctctagaacatctagtctgtatataaacaatgtaaatcatctcaatacaaatcatccaattctatattctttatatggtatcagagcatcatcgatacctaaaaataaaaaacctaaaaacagccgcctctctcctttctttcttcttctcccccgttgatttttttattcctctgtttttcaaacttcaaccatgtcgaatgtttcttctgaaaccgtcaacctcaacaacacctccattgttcacatgaacatgtcgaatgtgacaaaacttacggcctccaattacataatgtggagccgccaagtccacgctctccttcacggctacggtctcactcaataccttgatgcgacaaaagctgctccagctcgtgagattaccgtcaacgacgttgcctctgtgaatcctgagtatgaagcctggagtagacaagatcaattgatcttcagtgctctcatcggcactctctctctcaccgtccaaccaacggtgtcccgcgccgctacctctgctgatgtttgggccactcttgctggtacctatgccaaaccgagtcgtggccatatcaaacagctccaacaccaaatcaaacaatggaagaaagacacccgcaccatcgacgagtacgttcaaggctttatcaatcgatttgatcagttggcattaattggcaaaatcattgaccatgaagatcaagttgattacattctcgggggtctgccagaagactacaaacccattgttgatcagatggaaggacgtgacacaccaccaaatggatgtttaacaaacagttgtgacgaagatggatgttttatccaaatggctttgaatagtgtatagaacaagcaacaagcccgattcggcccaaacccaaccccatttaatcatatgtggttttagtagtttaaataagctactttgagtctttgacaactgttcttcatatccatcataaattgtgtagcattttacattttacattttacgtttgaaacttaatcataagttttgtgaatcaaagttaattgataaaaaatcactcttaatacttttccacgtctacatcactgtcattttcatttcagacttgaggcattcatttttcaccatgtttcaggaaatatactgcaatttcttacacgtatagagaggtccttaataagtatgagtagctatatcgtaatgtatttataccaatgtactttatgctcacacgtgttcggtgtacatataatatgttgcatgtggcatttcggtgcctaattatcaagtttttaccgaaaataagggaaaagtatataatcatgtagcctttcagacaccgacaaaaattttaaacagtaaatacgatttttctgttcttcttaaacagaaaatgattaaacatgaatgaaacttttaaaagcttattttgacgacgtgttctttagccaaatagacgacatttaaacacatcaccggaccggaaaaacaccagttgaaaataaaataaaaaatgtatttgtaaaagtctgttattacaagaaaatatggtcgatcgttccatgtttaattgtgtttcttgacactttttagttcttataaaacacctttactacataacttgataagttggatgagaataaagaattataatagattctcataaaaataactttataagatatattctctcttatatatatatatatatatatattatgagatttcctaatctaaaataaaaataaatgtaaataatatatataaatattactaaaactaatatatgttaatattttaaatctttctacaatctttatgatttttatattgttcgacgatcatctcaaccattgactctcgatctccaactacagataaagtaaaattttaccaaagaaaagtctagtgactcatcataccaataaaaaacacacaacacctagttttaccaaaataagactagaaatagtactatagtagttatgggacgatggagtgatggttttgcaaagcaaaagccaataattgtacatttcaggccgaaaccgacaatgaccccatcctacccatgtgtcatgcattcagtatttattatgtgtatcagtcaaattttcacataatgacgaaccatctacatacaatctatggcgtggcctgtggagggcaggacaaaccgacataatattgtgtatatccactgaaatttattattaaaaaaaactaatacaatgataagtactagtattagtgataaaaaaaacttatacaacgttgttttcatcttacaattaaagatattcataaacgataaatctctacttcgaaattttttaacatctccaaatgtttgttcaagctagtagtagtccacataaagtcacgttggggtttcaggctttcgttaaagattcacaccgtcggattgggatttccagacgtcacagatagacttatcttcttcgttaaatttagaatccaaagattattgtctgcacactcgttattatctaaaacagccttttttagttaaattgacgatattttagtgacattccaattttaaaattcgtatgggtctacattaaatgagtacagcgaccaactactccttccctcatagtagtatttaggtattgcattcacattacataagatgtactttcctactctatataaactctcactcccctaacactcttcatcatccatcacatctcctcttgcaaaccaacgtaaaacactaactaagagatcaatatg

SEQ ID NO: 30072 - DNA, 3003 bp, Unknown; identical to SEQ ID NO: 30071
  misc_feature (1)..( 3003): 2750-1469P.txt file - cDNA_ID_3025683; gDNA_ID_2214558; Annot_ID_185793

SEQ ID NO: 30073 - DNA, 3003 bp, Unknown
  misc_feature (1)..( 3003): 2750-1469P.txt file - cDNA_ID_3025714; gDNA_ID_2214559; Annot_ID_185851
caagcctcgaagttttggtttaagagccttgagcttcttagtgaaccggaacagggacgacgtggacatgtgtataggctctgtttctctccaaaaattttccaccaaaggtttaaactcctccatatcggccacagcattcacaaacttaaaaggcttatttcctctcacttgtgcaccagagttcatatttaaattgatacgacaccgtaaatggtcagaacaccctcccgcttcaaaaacattataagattgtgggtagaccatcttccaagcctcattcaccataactctatccagttttttccaaattgggtcattatctctcttattgcaccaagtaaaaaggggcccgtgagatgccaagtctgagaatgagcagtagttcaccaaagactgaaaatctcgcataccggaggtaactgctgggtgatcttccattcgagagtgctcatccatatccaaaatctcattaaaatctccaaaaattatccatggtttatcacgaatgatcggagagtccatatggtctcgaagatcattccacaaaatctttcgttcctctgcaaagtttgaagcatatacaaaagagtagaaaaattcttcttcttggctttctagtttcaccgaacaagttatcaactggtcactcttgtaaaacggagtaaaccttacattctccctccacactacccaaagacgacctcttctattaaactcatagttagttagcatggaccaatccttgaacaacttagaacccaaccactgtgaattttcctccttaactctcgtctcaatgagacaaccaaactgaaaattctgctcgtccacccatttctgaattacggaatgtttatttgatttgttgaggccgcgaacattccaaaagaaacccgacattaatgatgttttggagggagccctttactctgatctttaggattattcctagtagaagggtttgataatactttatgtgctgactttgatcccctaggcaaagaatgacgcaaaatcatctccttctttgctagtcgattctgattttctaccttttcctgaggcgggtcttgagttgagttttgtgtttcctccgcttgtttctcaacactatccgctgttatgatgtcctctccactttcatccttaccattcagagcagagtaactatttgatagaatagagacctccccaaattgtaaaccttcttgctttttcggtggactacgaccaaatttaggggtaatccatgactcagctcctttctcttcttccttaccatcttcagagattggtatgattggtatattctctgtcacacattctgcagtcacagaggctgcagtctgagaattagacaagacctgacccgtctctgtttcttcaacatgaattgggtctggatttggcgtgtctcgagagcaggtttttaaggcagagagacaagagtcacggaggtgaccccatttatcacaacaactacatcttggtggtaaccaagggtaggagtattttatcactgcagctagttctccctcctcctcgccggtaaacacaaactccttaggtaactctttcgttaggtccgcttccaccagcaactgagcttcatcgaaactcgaacaagattcagtcttggggtgcaatcgaattggcttacccactgcactagccaaaaactcaagacctttatcagtgaatagtgatggaggaacatccgttaaagtgatccagagctgaattgacttcatagctggctgagtttcttccgcaaaaggagaccactttgacaccaccattggcaaatccatgatattccacatgcctctgtttaaagctcttcgtcgcatggcttcgtttcggatacgaaactttatcgtcgagtcattgacggcataaacatcaatcagatttgacttgtcccccaatctccaaattttattaacgatcatgtgaattttcccaacgtgtggggcctttgcattgagaaagtgaccaattagaaaatcttcccatagtggtttagcaccgagaaagacctcttttggtactaccaccgtcgcttgaccatcaacttcttccgatacgaacttttgttgagtgaaggtgtgttttcgagcagcgtttacccacgatttcttcgcaggcggatgtgacatcctttgagtcgtctctaaagcactctgactgagtgcaggaaactggtctgaatctgagacaagtaaaaccctatatgtgctttggtttgaaacgatgagatcaccgtcctgtctctccaaagagaccggagaagatacaggagacccctctcgcaacggaacctctccggagaggcctggaggagccgccgccggcagcatgcttgtgagaaacgtaagaaaaccctagaacgcttcttttttcgcccctgccacgtcagctgtccttccgacctagtaaagacaccccttttttaaaactggatttccacgaccacaaggttaagagccttgcgctctaccaactgagctagatgggctttgtggtgcttgtaatgggtttgtctttccttgcggaagaagaatcgggtcaaccattctcatccttcctctacatcaaaaccctaatttctatattacatctctaacctcattcatatttgatatataacaccattcatttccttgatctctcactcatcaccctcacccaccaccaccatcaaaccctagttttgtttttcccccaatttcgtttccttgatcgtggatcattcttgctcagatctctgttagcgtctttgaatggtagaaacaactccgatcaccagagaatatatgctttcccattgcacaaccgcaagggcgagctttttccttcgtcgtctctccgccgcatcttctttcaaatttggcttctccaaagaaggctggtactaccgttgcatcggcgtcgacccttgaactcctcaacacggtttgtttttttaataaacctttctgattttgaaatttgataatg

SEQ ID NO: 30074 - DNA, 3003 bp, Unknown
  misc_feature (1)..( 3003): 2750-1469P.txt file - cDNA_ID_3025728; gDNA_ID_2214559; Annot_ID_185841
cattttagcaatcttgtttatgtcaaagctgttgacttatctctaccatgttatgcttagatatgcaatgcggttgctgtggcaggatatcttaatgcaactctagtaattcccaactttcactatcacagcatatggagagatccaaggttttagattgctttcttctgaaaatcttgtttgtgcaaatcaaagccatcttttgtagattgctttctgacagaggtttttctttcagtaaatttggggacatctacgatgaagagttctttgtcagtaccttatcaaatgatgtgcgggtggttgatacaattcctgaatatctaatggagcgttttgaccataacatgacaaatgtctataacttcagagttaaagcatggtcacctattcaatattatcgagactcgatcttgccgaaacttcttgaggagaagtaagttacaaattgttctttagaagtttgttttcatgtggtagagttagttacacattgttggtagggttaaaaatatagtaacaggataaaccaccttttttctagcggaagatatgttttggatctgtttagcacttgtcattgaagaactgttctctttgcatggcacaggattatacgaatatctccatttgcaaatagactttcttttgatgctcctcaagctgtccagagacttagatgtttggcgaattacgaagccctgaagttttcgaaaaccatactaaccctaggagaaacactggtgaagagaatgaaagagcaaagtgcaaaccacggtgcaaaatacgtgtctgtacatctgcgttttgaagaggtttgttccatgtaaaggagagacatctatagaatccccactggtctttatcatggttgtaaatttttgaatggagagttttgtgtctgagttgaaagattaaataagctatatctacatgttgcaggacatggtagctttctcctgttgcatatttgatggtgggaaccaagaaaaacaagatatgattgcagcaagagaacgaggatggaaaggaaagttcacaaaaccaggccgtgttatacgacctggtgctatcaggcaaaacggaaaatgccctttaactcctttagaggtatactatcaccacaatatattagcattctcggatattttcttaagctaatcatccatcagaatagttccacaaacccttgtgagcaatagtgtgacttgttctgtttggattatacttttcttgtaaattattcaggtgggtttaatgcttagaggaatggggttcaacaaaagcacatatattttcctcgcgtctggtgaaatatatgatgcgaatcgaactatggccccgctactagagatgttcccaaatttacaaactaaggagatgcttgcatcagaggaggaacttgctccatataaggtttgcttctttcctggtgtttgttccagagtatatttctcgtgatgaatgataaatctgacttgaaactctgtgttcagaatttctcttccagaatggctgcaatagattacacggtctgtctccacagtgaggtatttgtgaccacgcaaggtggaaactttcctcatttcctcatgggtcatcggagatatatgtttggaggacattccaagaccattagaccagacaagcgaaagttagcaatcctctttgacaatccaaacatcgggtactcacttcttctactcttcgtcttcgataaaccctaccaaatctccacatgaataaaatttgaattgttacctttttattcaccataccagtgttgcactcacctgcaaaccttacaccctgttactgtgttatcacttattgctcaaacgatgttttgccccgcagatggcggagttttaaacgtcagatgctaaacatgaggtctcatagtgactcaaaggggtttgagctaaaacgacctaatgactccatttacacattcccttgccctgactgcatgtcccgtaggaacaaaacaacaaccccagaatcgagaccacctcctgccacctgaaaacacacatttgattaccggccttccagaatctgcttctacaggctacgttcattccttgtaattctaattctttcaaatcagacacaggaccttagtgactcggcctgcccagaattttagggaagacagcgtttgaatgggccgtggaatcatctatttattctccggcgaggagtaacagccacaacattgtttgatacctttgacacattgaagctgatgtatctaacaggaaagacgagattgaagttttaacacattccctagctgctgctgggcaaagaataggacagcgtttggattttggtgtttttttcttggggtgttttggtggtttgaagaagcgtttgcgttttgtacattttgtgaacgcaggctttgtgttaggagatatgtagagagagacggacaagggggagaaaagaagctgccctaaaagttttgtacattgatttggttagagatcattgtctcttcttttcttttcttttctctgatcatagggttttttaattgtttcatcatcatattcttatgattcttttctttcacaagataattttttcaatagtgatttaattcatttttgcttcttccagtcgtgttcatgtttttcatttgttcttatatcagttttaaatttattcacttcatgtacaatggggtttgcttcatctctaatccaacaaatacaaacaaacaaaaaaagaatcaccttcctagtttatttctatgcgctacttaagcgcgtgagaaagtacgatccacgtggaactagcttctttcgccaacacaacacagagtttggctcacgaaaaagtgtgcgcgtggggaagaaaagggtctcatatataattggagtgtaaaatgtttgacctttttgtttgggtttatctcttttagactcaacaacagataaatttgttggtttcaagtattatcaatttcccggcgaaatctccaccagagttatg

SEQ ID NO: 30075 - DNA, 3003 bp, Unknown; identical to SEQ ID NO: 25926
  misc_feature (1)..( 3003): 2750-1469P.txt file - cDNA_ID_3025732; gDNA_ID_2214559; Annot_ID_185840

SEQ ID NO: 30076 - DNA, 3003 bp, Unknown
  misc_feature (1)..( 3003): 2750-1469P.txt file - cDNA_ID_3025736; gDNA_ID_2214559; Annot_ID_185838
tctcgaggaaagtctctttgttgtgcagaggttcccaccattgttgaccatcctttggaacgacgccgtttttgtgacggtgctcaagttgggtcgctttttgtgttgcttgctttttgtctcttcattactctaatgggccgtaacaactgcgtagacttgggtactttttttatatcttattattggtcaactgattttagtaaatgaagagaaaacaacccaagaaggagtgcatataaatccatgtttatagtaaggtataacaaacattcttctacgagttaagaagctcaaaaaatggatgaaaagtatacttaaacctatatctaagttctatatagattggtttcctcggtcgccgatcacgaactgaagagccattatatctgaaacgcattgttttatattttctcgatttctaactaagtgtaatttaaatatttctttttttctattataagtgttgttctcacttttctatgcaaacaaaaatatatttaatagtttttagctaattatattttactttcttattggttagattagttataactaatgatgtttttataggaaatagataaattaaataaaatttatatattttcttaatttacttgtaaaaaccttaaattacaaatattaagaaacaaaggaagtatgattcaacactaaagtcaacgttttattttgagtatttcttctataccaaaggtcaaatatcttcaatacttataactttcatcattcaattgaaataaatgaataaactaattgcgctttgctacgccacaaattctaattgcaaaatcaacttacattgattaaagagttgacctcacttgaaagtgataatgtatcaaatgaaaaagcttcctatcttgacggaagataatgtacgaaacacgataaggacataaaacacattcatatttttttcttatttaagaactacactaaatgaaataatacttgtggaggcaaattattctgaataactcttccataggagctccaaaggtattcgatctctggacctatcgatgtggtgtcttctgaaaacacttctacgtacgtttgcgttagtagtggattaaaacttacgtggatctcgcgggcttgatttatttacgtggatgatatgtggttagtacttagtaggacttaatgacgtgaattgaccttgttatatatggtggccgggtacaacttacaaggctaatacatattatggctctcagtcacacatttgacgtttctttagctttccgaatcgttagatcctccaacactcaccatatatagacgatcacgactatctccccgattaatgtcagtgcgggaaaccatactacgaaggtctcgtcttgcatgaatgatcacgtcacgtgtcatacgattgattttttttttttttttgaatatcaggagattctgggtcgaagcccgtaattcccctggttcgaaaccacgacatgtaatattagtttcgtcacaaacgtcaatcgaatcggcgatttttaagtttcgcctacgatctttaccaattgatatgtctttatacaaaatttagtttcgacaataatgactagaaatttttctcttaagatttcttaatcgttaggtgatgatcgcgattacaaataaaatgctaattaatggtcgagtcctaccatttctttccccacctatctaagtttcatcccaattccaaattcaactcgtagacatatgccttactctatgatttctctatcatttttcgaaaatatgttttcaagttgacatcattgtagagttagctaatgggccttcgacattaactcctgaaagccttatatgggccaatctattgaactttttctccttccattttgggctgatttattaagttcacaacacaccgattaggacgtgcttagtttttacttttctccttccattttattatccatcacataaaggcatgtttaagagatgaattttacataaatccttttttctctgcaaattcaagctcttctttaaaaaaaaaaaatcatttcatttcctctagtaagaattaaatttatatttagcgtgttcttttagtgaacgcagccacaacaatagcaaagaagaaaaacagttctacggtgagaagaaaatatagtgataagagagaactatcacaaaagatgaactacgatgaagattgaagtgtcgctggttaatttcagcgattcatcgaatgcagttgcaactcaatcggcgactcatccaaagttgttattttaagttctaatgtcgttttacttacctgctacttctcatgacaattcgtcttactccgttgttgccgttgtcgcaacgttcagtaaaagcacacgctaattaatttttaaaaaaatgaaaaaatagctatattcacacctataatccaatccccttaatagaaacgtaactacttttcctttttttctttttttctttgtcaaccattgaaaatcagcctaactttaaatataattaatattacaatggaaattaaccaattaattatagaaatataattaatattacattgattaatatatttttttaaaaaataaaccaattaaaatggtataatagttacaaaatcttaaaaatagagttaatttcagctaaaaatttaatttctttttggtttgaggcattttgagtttgagtgctgagagagttgaagcggacggggaagaacaagcgggagacttgatgcttgcaagcaaagtgttcctcctaatttttacatataactaaactcttaattaattagaaaagcaaaagaaaaaagttgagaactctctgtttttttttcctttctttttaatttcactttgattcctaattttttttgtttgttcgatcttcaaacccaacactctttcttctctcgatccttcccattttccgatcctcggattcatcggaatcgtcctttgatttgctccgaagatcatcccgactagctgaagccacatg

SEQ ID NO: 30077 - DNA, 3000 bp, Unknown; identical to SEQ ID NO: 12573
  misc_feature (1)..( 3000): 2750-1469P.txt file - cDNA_ID_3025741; gDNA_ID_2214559; Annot_ID_134852

SEQ ID NO: 30078 - DNA, 3000 bp, Unknown; identical to SEQ ID NO: 12586
  misc_feature (1)..( 3000): 2750-1469P.txt file - cDNA_ID_3025741; gDNA_ID_2214559; Annot_ID_185835

SEQ ID NO: 30079 - DNA, 3003 bp, Unknown
  misc_feature (1)..( 3003): 2750-1469P.txt file - cDNA_ID_3025755; gDNA_ID_2214560; Annot_ID_134870
agaaattctctccaaaatttcttatataaggtattttggagatgatttcttcactaatcaagaaacccacatattttttataataaaatttatctctctaaaataagagatttatgtttagaaaccattggtggagttgctctaacattttgcaagttttcgctaacagtttctatcatttctaggaaggtcaattttaaccctttcaatcttgtgatcataggttttataggtaagtttgtaagaaaagatataaaaatatgaaatactttaatattaaaattaatttcaacacaaaatactttcaaaatttagtttcttacacatcataaaataagaagatagatatctataataaaactaatctttttttatctattattaattacaatatcatatccatgaatcaatctgttatccatacatttttagagcagctcacgtgtactaacctacaaaatctcttttaatctaccactataaaattagatatttagttgttttgtgcgtaattacaattgtcattgtgataggaggggacatatgttatcggtcgattggtagtaggcaaccatggtaatcttcatttacaggttcttgtaaagaaaatgttgatttgcttgagtggtcctagttttcttctttggattaaagttagtttgcctactatatggtttcgatttcttccgatttcggtttaattttttttgctttgtaactttagtacttatgttttccttgcataggcctttgatcccagagaactctcgttttccttcggttttgtttccgagtactttaattttgcctattcgtttaatttttcttgtttggattgtgttgtagtttggtttttcagcaaatttcagttaaaaaattcagatgacaaaacaaaagaaagtttgtattaagaagaaaaataacaattatgtgtattggctgaaagataatactctttttgtttcttattattatttttttctatcaaatatttttcttaacaattatgtgtattggctgaaaatgttgtattattttctaatgcaacatttattaaatttcaagaaaaataattaaatactattggtttagaacaataagaaattgtaaatcacaaaaaataatacatttatacttaacttttactattttttttatttgttttaaaattttagaaaatatattattaaaaagaaatagattaataattaagttcatttttaattggttgatgttaaaaggaatcaattatggattttctatttttttggatggcatttgtggattttgcctctttttgaatagtttgtggattttatcatttttaacctacaaaaatataatttaatatgtgttttatcgtcatatttaggttagttagttgtaattgttcttaaaatttagtatttggtataaagtatatacttttaccaaacaaatccaaaatttgtatattttttaatattaaaagtggtaaaccataaaattttagtaaaaataataattttaaaaaaaaatcgacgaaatagggcaaaatcaacgaatctctgtaaacagtaaacttataggagtagaaactaaatttttattttaatatagttagaacctgcataggtcggaccctaaaaatatgttctggatttaattatttagaaagaaaaatatagaaaatgtatgtatgtcaaaaagtcttggaccataattggcggagagagaacctggggacggacaaaaaagtgacaatttgctccgacattaaagataattaatgaaatcaggtataattaaatgaacgcataaataaatgaagagagatgatgatatatgtataatcgtaaacgcatagagtagagaggacacatggagccacccttgtggtgtccgacaattacttttaataatccttccttttaatgaacttctattattttgcttagatatcatttttttttcttctatgtatgataaagttctacatttctggtttgtaatcttctaatattttgatagtagagagttggaataccataacatgttggaaatgttttccattttgaaaaccaaaacttttttttttaaaacaatttttagctatcgttatcaataagttcatcacttaaatgtttttgggaagttcacagtattttggaagatattctattaaatatcaactatttttctagttttgtgtgctaattttttcctcggttatctaatgttgtggttgattttattgcaaaactatgtctaagtttgtatggttagaacatcatttgagcaatataattaagtttgtgcaaaaaagaaagttgatcacttagtattaatttttcattatataatttgatcaagatgcttgcttaatccgatctagataataaacaaaattatctaaacagtatgaaactacaagttcctaatagttaatgttttgacatttacaaagcaactaagtaaaatgttattaatgaattggttactttttttttggtaaaaagttaaattcatatcatttttaaatttttgacagaaaatacagaaatcacagaacaaatgaaaacacgctattgaaaaattaaaaacaacaatattattcaaaaagcttttggttgctactgaatgaattggttacttgtttagattgggtaacaaaattctaaccaaaactagaatcactaatactcattctttaccaaataatacttcaaattcaaataagagtttgattgtgaaagctgtatagctgtacgtatcatgtccatattacagttgtaagccattgttacaaaactactaaaaacaaaaataaataatagaaaggtccgagaaacttgaataaaaatttagaatttttaaaacattattatcgtaaataaaaagagaacctcccaagaaacaagtcgtccttatataaagccaaccacacccctttagcttctctcaccatcatcatcatcatcatcatcatcatttctctctatctctttctaaaacacaaccatg

SEQ ID NO: 30080 - DNA, 3003 bp, Unknown; identical to SEQ ID NO: 30079
  misc_feature (1)..( 3003): 2750-1469P.txt file - cDNA_ID_3025755; gDNA_ID_2214560; Annot_ID_185870

SEQ ID NO: 30081 - DNA, 3003 bp, Unknown
  misc_feature (1)..( 3003): 2750-1469P.txt file - cDNA_ID_3025760; gDNA_ID_2214560; Annot_ID_185868
aatctgttttattttcattccaagagaggaaaatcgtgaggctgatgccttagcgaaacaagctcttcgtaattttgttgagttgccttaatggccttaataaaattaatttctttgccaaaaaaaaaaaactgaagccggacattaaaactctttgagatcgcactaacttggtaatcaacctttttaggaaacgtcaagcagaaacgaaagataaaaaaaaaaagattaataactctgatattcaccagcttataataccattaattgaccgataactaacataatattctaagggtaaatacctaataatacactaattttgcttagaacacgtcaaacaaacgctttttatttatttttattgataataagcagtattattggttcctaatttaaaaaaaaattgatgaataccttcaaatcctagaaagtaaataaatgaaagattctaaactattattaaagagttttttataatcttgctgattagtttttcataatcttgtaaagtttctcaaacaatctctctattttgataatacttttcatgactttactttgtaaaaaaaaaatgtaaaaagtcatgaaccaataacatagtaatttacatcattaacaatcagagattcttttgtttgaattaaataacacaaaacttttactgactttataagagtatgaatccaataaccccaaatttatgaagattttagattaccttttataaatcttaattgaataacacaaaactttaacataccttaaaaaaatcttgattgcataacaagagatttacatgacactttaagtaactaaaactcttttcaaatcataaacaaataacaccacctaaatcttttacaaggattctattatctcggcaattatttgatatattttacccaaataatcaaccctgactaaaaataaatacaagccaaattctcttctttgttttttatcacacgcctgtaaagaagagaattacaaacatcaaccttctaagcttttgctaggcttcaaaggctatacatgtatgactatattatagagtactctggtggctcaatgcctactcatttatactatactctagaaccctagtccctaggatctctaagaatcaatgagcaaaaatttccttgatctttcaagcatatccatttccttgtttgggatcttccttgatattcaagtctatccctttccttgttcgagatcttccttgatattcaagcatatcccttttattaggatatacatgaatatatttacttagatatagtcttattaagatcaggcaacatgtatgtgtataaataatcttcttcttctattgaataaaggaacgcattacaaaatatttcatggtatcagagcattctgacctaattttttcttcttcttcttctttcctgccgtgctgtcacgtaacttgaccaccgcattttctaaaatcttctaaattcttctatttcgatactaccttctatattttttacacccaccatgtcaacagaagaagcttcttccaggaatcaactcgtcgtcgccaacacgaaaccttccaatccctattcactcagctcatcagacaatctctgagccttgatttcttctgttgtgttaaaggaagacaattactcagaatgggcaatgatatatccctatttttactgtttttaactatgttttaggtataggttttagagtctaattgttatttctagagtcttttctagtctttttcaggtctttacatgtttggatgcatttggagataattaagcattctggagatcaacagacaacctaagctgcagaatcaatccggagacaaaaatgcacgtaggtgtcgaacgacaccacccctggtgtcgagcgacaccaatacctgacggcaattttgagacgcaacttattaatgttttgaagattttcaaattcggcccagaactttctcctctgtttaatgaaggcccatcccgtgttttagacatataattaggtttttaggatcattgtttagacctaagcttggagaggctattctcctcatcttttttgtactttgggagcaaaaccctgtggagactcctttggagaagatcttttactctttctcttgctattattgatttcttatttagactatgatttgtgtttctttgattatgtctgagtaatccacttgttaggtttagggtttctcattagggattcatatggtttaatagatctccccctgctaggttatctgtagaattcttcatctttaattgttcttaatgctagatctagattgatcacctagaacttgaatccaaacaatagatatgcccgccataggtatctgtagttggatctattatttgatgagcctggtttataggtgtgtaataagaatcggcctatctactaaggtgaacaatcgaactcgttaagaatgcatatttaggttaataatctctcggcttctccggttattcttagctatagatatagggagtttcgcggcacgcccactggttattccataattagagtttgagtttaaaaatggttcgataacaacctagctattattagatctactaaccaatagtttcctgagaacaccctaagcctgacgtttttactttcttgtcttacaacctcacaatctgctattgcttccttttgtttctttttgttttcattactatcttacttagcttaattcaaaatcttggtctattgtgtgatccgagagttttgtggaattcgaccctaaagtactacaatcgatctgttatttgagagagtggtcttaaggcaatttgacctatatcaaatttggcgccgttgccgaagttctctacgattcaccattagattaggattagaattttgtctaagcatttatttttattttttttacttaatctttctcttttttttttttcttgtgtgtttcaggtctttgtctaatcacaaaaccaggaacaagcgagaaacatg

SEQ ID NO: 30082 - DNA, 3003 bp, Unknown; identical to SEQ ID NO: 26305
  misc_feature (1)..( 3003): 2750-1469P.txt file - cDNA_ID_3025817; gDNA_ID_2214562; Annot_ID_185906

SEQ ID NO: 30083 - DNA, 3000 bp, Unknown; identical to SEQ ID NO: 12619
  misc_feature (1)..( 3000): 2750-1469P.txt file - cDNA_ID_3025821; gDNA_ID_2214562; Annot_ID_185905

SEQ ID NO: 30084 - DNA, 3003 bp, Unknown; identical to SEQ ID NO: 26307
  misc_feature (1)..( 3003): 2750-1469P.txt file - cDNA_ID_3025825; gDNA_ID_2214562; Annot_ID_185904

SEQ ID NO: 30085 - DNA, 3003 bp, Unknown
  misc_feature (1)..( 3003): 2750-1469P.txt file - cDNA_ID_3025833; gDNA_ID_2214562; Annot_ID_134889
agttcaagtagccagcataacaatcatgaaacaatatggaactcttctcttttttctctttttcttttaagtgttaagtctgtcatttttgttggttgttctctagtcaactcaattcaataatcaatatcataagaaaaacacatggcttagccatatttatagggttataaaaagcatttatcttataatataagttatcttctttgctttcatgtagaaagtatattctcttataatttgtttggtcaaacacaattgaataatatagtaacaggttgccaacaattgcatcagtgtcggctactgtggcttcttcttcaccactggcaaattctaatgtaactttttttatccacattgtaatccaaaacggatatttatataataataaggtgaaaaaagccaaaaatggtgagagtgtttttgggaggaagagaagacaaacgttgttgtctcctttattttggaattggaggacaggccatgtgatatgcgttgtgaaaccccaccactcttttagtctcttcatcgccaaaactgactacattcatgcacccattttttggttctttattattcttatattctgaacataatatatagtaatgcaaagatataattgccagttttaacttagtaattttttggtatgattttttattttaatataaaaaagtaacgtagtaatttatgtaagtgtcgtgactatgcatcattcacatttaattcttatagtatatgactattttattttgtcattttattattcttaaacaaaaaatgttttgatatgttctaaatttccaattcaccaagataagttatggatctatcaattttcaataatttacttaataggttttgtcacaatttcattcatataatctgaattttcagtagtgagaatgatgataaacggattcggaaaaaagaaatatgatgagaaaagtggatgtcaaaaaaatattttcagttactattggggtgaggaaaaaagagaatcttctttttttttttttattatactcacaattaggaggctttaaaaaacaaataaaaatacagacgaaaaaaataaaagtagcgttgacgacttaaaaagaaaaaactaaaattgtttaattggaagaaataaactgtaaggctgtgaaatgtagttacagcatatggtagattcttaaatgaatgaaataatatgataaggatttatcggtggttgtggttgtggttgtatttcacactaacaaaaaacttatataaacaagtttaccaaatatgctataatttttctaagaaaacgaaaaccaatttggataattggataaaaaatattgattagtgggagtactgaaagtattttttctctttaaaagatttacatagttttggataagaaatcaccacttctactccaaaaagcgaacatgagacactagatctccatggtattgcaaaacttgtcatcaatactccaaaaagcaaacatgagatgctagatatcctggcattaccatcagctcattttcgttatgtttcatgtttgtaatgatgcctcatgtattatactcaagatattggagaaggtggcgttaagttcaggtgcacttttggcgttatgtgttattagatggtaattgatttgatcaagtaaaaaatgtattaggctattagccacgacagtatatatgcagactatatgaaggaagaatatcacatcggtggctaatagtgaaaatcaccttttaggttattctgcttgtttatacagagcaaaagcatgcctgctaatctgcttatacttgttggtggctttgaggcaaaacttagggaacaggtcagacttacaattagaggcacttgaatgtagtttattgagtctaagctgcactagtttgtggattgagtttaagctgcacagatttcccactttggttctgtttttagtctaattttcctcctgcttggtttctcgtttctcatgtgtgattctgttctgtttgattccttgtaggtgtggtcaagtcttcatcagcttgcctcgtgtttggttctgttcttttctcaaacttactaccactggctgtaagatttactatccaaatgtgctatttacaaatgttaagatttgttgttttatgcttaaaatgcttacgtctagatggtgtttgtgtcaataattggtatcgaattcagatatgcaagttctctctatgtataactgtataactccctctttttgttactgtttctagtggtttcattcttaagacacccacattaaaaaggatcaccaatagattatatttatagcaaagacacccattaaaggatgactaatgaggatcgcctaatgttacctttagaaaaccatcagagacataataaaatccttacacatcaactagttcataaaagagacaaatttagcatgtactcttgtcaaatacagactgattcaatcttagtagttcccatattttattttattttaagatttaacctattcccataaaattattacctgaaaaagaaaaatcatcatagaagtacgaataaatgagagctgacaattaaagagcattacctactttttctgtcctcatctatctcctccattgattacgcttcttgattgaagcaccccacagagagagaaaaaaatagcatacatacattctctagttccttctctcttcttcttcttcttctaccccgcacgaacgtttctggagtatctcttttctcttatctttcactccattacagagcaaagcttgactctttaagttcacatggtgtgttttaaagttccttcttttttactcaatttcgaagctttgtgtctgttttatcaaataatgatgagaaattgagaatgtgggtttttgtgactctttgattcgttgtttagagaattgggttttgggattttgtgttgaattgctcagttttgaagtcatgcagataatatgttcgatgatattcctgttagtgatgatg

SEQ ID NO: 30086 - DNA, 3003 bp, Unknown
  misc_feature (1)..( 3003): 2750-1469P.txt file - cDNA_ID_3025833; gDNA_ID_2214562; Annot_ID_185900
agctaggtggctaaagacagatgcactcggaaccaaaacaaacaagatacccgacttgaagagaccacattttaaagcatacaagatcaagagaggtgtttgagttgtgtctacgttcagacccaaagaaaattgaaagaaaacgatttctggcctaaccatctagcaagtgatatttaggatcggatgctttgtaacttaaaggaatttgtgtgcattgtttcttaaccattgtgatagtttaccaaattgattttgaatttggctaagttacgttagaggcttttaccacactaatcatgaattagcctaattgttagaggttcattatcttgaaaatatgtagatcgattgcatgatttctaacatcttgattgttcaatttatctatcttgtttatttgctcattttagttcttaattttgttagtttagttttcaattatctactatatatagtttaattgctttcatttatcccttcttttattctatgcatgttagggtattagtgagaccgtagattctcataccgtcttatggcaaatgatttcatcataatttaatgtgttatactgttatggcattttcccgtggatttgattcaatctttagttactccaatgacataccacgcatatgcgtaatgtgtatttatggttaaaattacatcacatgagagtatcggacaatttacaaaaatgtatacgaggtagtgtataagacggtgtatgggataattcatatggttcagtacaaaataatatactaggctgtgtgcgtgaagggatgtatgagatggtataaacagaggtgtataagatgatgtacaaggccgtgtacaagataatgtgagattatgtaaaagatagtatacaagatggtgtgtttaactctgtacaagtggtgtttaatactgtgtaagggatggtatatgagacaatgtataaatcaatgtacaagatgagacgagctgtgaaatttatgtatttactctaagatccatgagagtttcttcttcatgtctcaggtgaggaggttggcgaaaggaaggttaggaaaagtgaagataaatttgattttgttacaaaagtcaaaaacatttgcctatataacttaaatatggagcccattatcattattcgtagttagtagagcttgttcacgtttatgttacgatcttgtattgatagaagaatgttttcacttgtcttcgactgaatcagtgttgccttctctcaggttatatctttcgtctatgctttcgtcaaagcaaaaaatccctaaattagatgaattttatgccttgactcaaggcataaattcatcaaatgtggtatatagagcgtatttagcttcatatatactattgagtttccagagtcgtacgagcgctatcaagtatcagaagcgaataaaaataaaatatccttacgaaaaaaaaaatcgtctacaaaaaataaacatcattgtcatgtaagaaaaagaaaattgacaaactaaatattagttcttaaacagttgttgacccttcctctccactaaatcgttaaccaagctttcaaaatcaatgtctctaaccaattctctttcgattgataatatagccaactcactcaatctttcttgtgacatagtcgaccgaagatacgatttgatcaacttcagctttgaaaaacttctttaagcagatgcaaccgaaactggaatcgtcaacattgttcctataaagcaatggtaccttcaatatgagacaaaaattatatattaaatctgctttgaaagcaaagtgaaatttttgtctccaattataaagtaacataactattctaatgagcttttgctatttggatctaatgttatcatattattacctctacaacgttcatccttttctagcgcttgttgttgttcatcttttgcatgcggatcatatatgcgtgtaatctggtcgttgtcaaatttttattaattagcatttcaagccattgccattgtcaacgaatattcagtatttattagaaaaatcaacagaaatttaatatctatttagttttgttgaaatttaaagatataaatcaatatttactataaatttaattttagtaatatttttccgatttagattttgttattcccgtttttttatattgatcagttttagcgttttttagcggtgaacagtagactcaactcggattggactagacgggcgatcccggtagaacaggtccgaacgcccggtctggttcccaaacactgcaattaccgcatcttgtgttgtggaccggaccgactatgactgaatattgcattcattttgatcctaaaaatgtcaatcaatgctcatttatttattatatattttggaaaaaagtgagaaaaaactgaaacggtgcgacgttattaaatcttttaaatccccccaccaaagcatctgcttcttcctcttgtctctctctctctctctctctctttcatcttcaaactctacaaacccagaaaccaccacacagtaattaatgtctctttctttcttcccatgtgatctttaacagacttttcttcttattctccatctctgaagttgtggggattcatcaagacttccttatctgtttcttttataaaacaagagagagataccacttttggtgttctttatttgcaactctttcaggcaaacactctttgtctcttttcttatcttattattgtttctattttttgttgataatactttcgattttttttggctctctgttctttctagatcgtttggttttattgtctataatattcattttgacaatctatgtattgatatgagaacattacttcttagtctctttagtttttttttttgtttttgacccttaagcttgatttgttgtttttagcttctggtgatttgtttgatcaaagaaagcttataagtttttttttctttttcaggttaaagaaatcgataggctctgttcttgattgtggtggaagagacatg

SEQ ID NO: 30087 - DNA, 3000 bp, Unknown; identical to SEQ ID NO: 12606
  misc_feature (1)..( 3000): 2750-1469P.txt file - cDNA_ID_3025837; gDNA_ID_2214562; Annot_ID_185899

SEQ ID NO: 30088 - DNA, 3003 bp, Unknown
  misc_feature (1)..( 3003): 2750-1469P.txt file - cDNA_ID_3025847; gDNA_ID_2214562; Annot_ID_134886
ataaagttcttaataacatttatggagaatcatcaatcctatcaaccatgaaagctcacttgatccttcaagtttaaatgatttctttgatttaactgttaagttagttagaatttccttcggacaagttaaattgatcaatcctagtggtactacatagtatatacccttagtgactacgcatatccactataagagaatcctagaaaatactagtatgataccaaatacattcacgatgtagcttacgttttggcagcttgctttcctttgccaatggccgcaccaaagtatctctgcaggaatagaattcatatgatgacagggaaaaataacgtaaaatttcatacttaaagacacatatctacgggcagaaataacttacatatgatatgcctgatggttcaatcatgtacaattgaggtccatctctatcataacctccaagaataaccccacagccaaaaggcctacaaaataaaaaccattttcttataattcattcaagtaggagaaatgcgtaggtgactaccaaagacgtagatgaattggacaaacctgagccaccaatacagggtacacagatgtacataacttgcaacacgctcagaaagttccttcacaggtacagcatcgccataaacactaaattatcacaagtgaaggtagagttggttacacagtcggaaaaagttatgcaaagccatgtaggaagaaaggagaacatacacattgacatcttatacccatatatttagatttttaatctaacaaaatgcagataaaaaatattttgaacgtttaactaagagaaacatccccttgagaaaagctttaggagttgaacagttctttcataataataaatcttagatataagctactgatgttttcattgatacctctcatagcttcgtgcttcagacttagcacgcgcaacaatttgcctcccatcagctgcaagcccagcaacagcctgacatgacagaagtagaaatacccataatcatgaaacaaaacaatatactacgagactagacacaatagtagttacaaaaaacttgaaagatacatatcctcagcagaaactaatttcctatagtttaggagaaaaaaacataccatgccagcatgacgatgaacagaatggattctcctgttggaacctggtagcatcatctttgatgcaataagtttctcaactccctaaaaaccaccaaatgataaacacttagcaagaccattcctttatcaaaaatctgcgtaaaatcttacaaaacccaaaactaacaacagattcacaacatatcgaacaggaaatgaaactaagggactgtaaaatgtgtcatcttgggtcaaaatttacacggtatatattacatcaaatctacaattctgataacaaaaatgtgaatacttcattccaaggttaaatcacagcacgagagactaaacccactgaagaaagtgacaaagtagtataaaaatcaatagaggaaggaggaagaatcaaaccataacaatcccatctttgcacttgattccaacaacagtcctgcgaagaaaaaaaaagggaaagacttttaacaaaccctaattcgtgtcgataaccaaaatctcaaagttttcagaagctaaatccgatctactaaagggcgaagatcgaagaagataaagccaactaacccactgttgtcgacagctttagcggcgtactcgatctggaaaacacggccatcgggagagaaagtggtgacggagagatcgtacccagttccaatgctactcatcttccttgattttttttttctctgactcttttctgatttcttcttcgtcgagtgatttaagctgagatcgaagaaaggggttttctttgttctcaagccagagacaagccaaatctttggagctccgtctgactccgggttggatattaaaacgattcgggttgttttgtcgggtgggtcgattcggttattaacgggctttattaatattatgatttggcccattctttggtaatcttttaacggtatcgtgaatatttttaagtgattttcctcttttgtataattttgaataatcaaccacatgaggaagaaagaaatatttctcttactcaacaaaatatatgatcatacaacacttctttatgaactcactagaggtaagactataatatgctctagcattgggacacacaaactttgggatgctcaacattacatgtttttaaaaccaagacagtaaattacctataattgtgatggatacaataagtttgttttttactacatctctagccaaactgagagacatagttgtggcgatcaaaaaagtatgacagttttgcgaaaactggatcttgtttaatatcaaatctttaagtgaaggtcatgatgcttaactacccattaggtgacccttccaacaacaaagtagtgatttttgtcctaactcctagatgattattaattacaaaaacagtaaataaaaagtactactatttctaaattttcttataatgctaaaactttttctttggttaacttaattaaaaagtagtttaaaatccatggtaaacacaaagctaaaccttttttaccgttttatatcactagtaatcccattctaccaactcgttgaatacttagtattggtacgcatggtaagatcagtaacttatatgaactaaaccattcaaagcatgtaaatggttgtcggcaaaacaacaatactatttcttttcacaagggaatatatacatcacctccctcttaagtaaagctagtcgaattgaaaacacaataaggcccagtggagaacaaaacaaaagaagaataaaaaagagaatcagattcgaaattattgttattgggcctaatgggccttttctttttccttctttataattccacacaacaatcctctcattacacacaccaacgttgattcttcttcttcttcttcttctctctttctcatctaaaccaaaaaatg

SEQ ID NO: 30089 - DNA, 3003 bp, Unknown; identical to SEQ ID NO: 30088
  misc_feature (1)..( 3003): 2750-1469P.txt file - cDNA_ID_3025847; gDNA_ID_2214562; Annot_ID_185896

SEQ ID NO: 30090 - DNA, 3000 bp, Unknown; identical to SEQ ID NO: 12604
  misc_feature (1)..( 3000): 2750-1469P.txt file - cDNA_ID_3025851; gDNA_ID_2214562; Annot_ID_134884

SEQ ID NO: 30091 - DNA, 3000 bp, Unknown; identical to SEQ ID NO: 12613
  misc_feature (1)..( 3000): 2750-1469P.txt file - cDNA_ID_3025851; gDNA_ID_2214562; Annot_ID_185894

SEQ ID NO: 30092 - DNA, 3000 bp, Unknown
  misc_feature (1)..( 3000): 2750-1469P.txt file - cDNA_ID_3025855; gDNA_ID_2214562; Annot_ID_185892
tcatatcaaatactaattgacgtatttaagggtcacacggttttcaaagttactaaattaatgatttatcatgagtgtatatactatatagtaaaaaacttatgtattgattactatctatattattcaaaaggaaagattccatctgtctgttgttataccacgttcttccaaaaaaacaatttatttaggtaaataattaatcaagcattttcatattatattcatgggtgttctaatttatatataaaagattattcaaggattcttgatatttaaattcatctgattttcttcactttgagcaacaaacaatgggagagataatgaacgttgactttgtaaactgtttgatcttaatcctcctctgcctcctttcaatcctctgttactctttcttcttcaagaaaccaaaggatggtttcaatttgccaccgagccctccctctctaccgatcattggccatcttcatcatctcctctctctttttatgcacagatctttgcaaaaactctcctccaagtatggacctctcctctatcttcacgtcttcaatgttcccatactccttgtctcctctccctcaatagcctatgagatctttagggcacaagacgtaaacgtttccactcgcgacttccctacgaatgaggggtctctcttcctcggatcatttagcttcattaccgcaccttacggagaatactggaagttcatgaagaagctcatcgtcacaaagctcctcgggcctcaagcactcgagaggtcacaacgcatccgtgcaaatgaagtagagaggttttactcaaacctattagataaggcgatgaagaaagaaagtgttgagattgctgatgaagctatgaagctagtcaacaacataatctgcaagatgattatggggaggacctgttcagaagaaaatggtgaagcagagagaattagaggcttggtgaccaagtcagatgccttgttgaagaagtttttgctggcggccatcttgcggaaaccacttaagaagattgggatcacactgtttaaaaaggtgttcatggatatttctctcaagtttgacgaggtgttagagaagattcttgtggaaaacgaagagagacttgaggagaatcaacaaggtactgacataatggataagctcttagaagtttatggagacaaaacttccgagtataagatcactagagaccatatcaagtccttgtttgtggtaaatattcatctcttataacaaatttagcgaacaccaatggtttttcttgactaagaaacgtttgatactacaggatcttttctttgcaggtactgacaccgcaacacacactatagagtggaccatggccgagatcatgaacaactctttgattcttgagagattgagagaagaaattgattctgttgtagggaaaacaaggttgattcaagaaactgatctaccgaatctcctttacttgcaagcaactgtcaaagaagggctaagattgcaccctacgatccctcttgtgttgaggacgtttcaagacgggtgtacgatcggaggcttttctatacctaagaagacaaaacttgttgttaatggttatgctataatgagagatcctgataactgggaagatccactggagtttaaaccagagaggtttctagcttcttcaagatcaagccaaaaagacgcaataaaagaagaagttctaaaatatctttcattcggaagcggaaggagaggatgtcctggagtgaatctagcttatgtgtctgtagaaaccgctattggagtgatggtgcaatgctttgattggaagatcgacggacataagatcaacatgaatgaggttgctggtaaaggaacgttgagcatggctcatcctcttaagtgcactcttgttcctcgaagtgtaaccccattaacttcaaagtaggcaatctacttcttgactttgtgttgttttttcttaatctcatcgtttcacatcttcaccagtttattggttacctttggtttaggtcaatttggccttatgtccactttaatattgtatgaaacttaaaccttttgtatggttcataattttattttcttaagaataacgaaaatgaaaaatgcttgctttacttttaagatttaaaagcagagcacacacgctcctagccaaacaacaccaaacatgcattaccccccatcaatctcaacgcttttcctcctcaatccgggaatgcaaccacgctggttctctacgagcggctaaagtggtttataaattataattgtgtcttcgccacaaactttagattgcagcttcttctattcttttacagttttttttttcttgcatcatttttacagaatttatgtgagcaattcattttcaaatttcttatctttcttttaataaaattattaagagaaaaaacttataaaatgtttattaggttttcattattttatatcatataaggctattaaaattttaaatcctcctttttaagacaaatttctgattttgttctcaattttgaaaaggtctatctctaacttaatttccattttatttattatctataccatataaatttcttcaaatctcaatcaattaaaaatttctattttgcttaaaaattaaatgattgcaaatttataactaataatttctttttttaccatatccatgatataatttattttaaagttaaaaaaatattttgattcatattatatgtgtatatatatatatatatactgtatatgtatatatacatatatatctgatcggactattattatctcttacctactcggcccaatagtaatatttcacaaatccagcaacaaatcttacttcttccaccttcttcttctcttcttcttctcttcttcttctacttccgcaaaaaccctttgagaaagagaagcaaaattctctaatcgttctttctctgccctaatccacgtatcgtttggtgttcttcttcatcgaatcgacatg

SEQ ID NO: 30093 - DNA, 3000 bp, Unknown; identical to SEQ ID NO: 12601
  misc_feature (1)..( 3000): 2750-1469P.txt file - cDNA_ID_3025859; gDNA_ID_2214562; Annot_ID_185891

SEQ ID NO: 30094 - DNA, 3003 bp, Unknown; identical to SEQ ID NO: 26309
  misc_feature (1)..( 3003): 2750-1469P.txt file - cDNA_ID_3025914; gDNA_ID_2214563; Annot_ID_185927

SEQ ID NO: 30095 - DNA, 3000 bp, Unknown
  misc_feature (1)..( 3000): 2750-1469P.txt file - cDNA_ID_3025923; gDNA_ID_2214563; Annot_ID_185924
aacagctcgacttgtcgacaaaataatatgaaaaaccgagttaataacttttgcatattccgaaaacttcggttgcttttagttgtgcgatctcaaattttcactgatttttgaatagaaaacggtttatatggaagtatatatatcatgtaacataatgttagcagaaacatattgttagcttttagtcctacaacacaaaacaggctactgtcaaggttaggggttacccttacgtattttagcgagaatattttaccgaataataccatttataacattgaaaaattaatcattaaatcgtatggctataatcaattctctacaaatctcatcgttttctgttttcctattgataattttcacaatttataaactacgtcgttttatctgtccagaaaaataaaacatttatatacaaaaatgtattgtatgaaaatttaaaaatatattccaaatttctactgcttaaagaatcccaaaaggaacaaaagaaaaaacgagtggctatctcaagagattagaatcgttcttgggatcaggctttattcaaatggcattttgtggaaaaggctatatatgacgtaattaccattaacctttttgaatggttactatatattatatacgaactcttttacgtgtaaattaaactgggataacaaagtccatttcatgtgaattttaattaagttaaaatgtagatgatccttatttttcctgtcccaagatggtttcatcattagtctttgatctgtaaaaaaataaaatactaaaccgaaatttaaaatgcccttacaagcgatgttaggacacaatagacggtatatggccagtgcccctccgatagagcacaaggccaagggaaagcaaatattacacaccaaatctttatattttatgttacgtatcatataatacaataaataaataaaagattatatgattatgttcgtgtaactctaccaacaaaaaatctccagttgattataaagctaacattaaactcctttctaaagccacaactaatttatttggttggtttagaataatgttattatataagggtgtagaccaaaatcaatctcttgaaggagcgagcaagctagggttaaagagatcgatgttggtctacatcgctgaccttaatattcataaccatataaatattatatattttaaaaaatcataaacgaaagttacataaccaggtaagagtaagatacggtatacggtattaccgcgattattgggctgatctggacatgttattgggcttattgaacttcaaatacaagtgatgaggccgcatattctattttcctttttggtgttatgatcgactaaacaaagaaacttcatacgctaaaactgtataacttccaccaacgcaaacaagagccaaaaaccaatatttctaaacaaaccaccaagctcaccctcactgcatatctccttctccgaaccacctttagccgaaccattgatatagtttctcaagcgatgacggatccgaattgacggcaagttatgtgtgagccgtgaggaatttgatgcattagtgaactacttgtcgcaacttataatcttgtgggttgcaaatagggttttaatgttaaacatctttctaatggttgtcttaatcggtaagaaaataaactgtaaaagtgctttacaaaaacgtgactctttttcttttcaccacaaacagaataattctaacataagacagagagacacacgtcacaaagtgaaaacaaagtatccccatttaaattaaaacagtttaacaagataaaatacaagtccgattttttcatctcccaaagattctcacagttaaaaatagaaaatagaaaaagtatatattctcacaatgctataaacgcttgaggagcatctgatttatcaataaagagaactaaaactttacaaatccaaaaacaataaaattatataaatccaactactttaaacgattttccaactagaaatttcgacttgatgattatagtgtcactgttttgcgtatctttatttaaatctaatagtctcatggttcccacatgttgaaggaacagaataactaattagaaaactagtacttatttatcgataaagaaaaatattattcttaaagacaaaaaacatgtaattaaaagtagtaacatggaatcgcttctcctaatagcttatgcttttctctatttattccttctctctcacgtattctcaaacaagaaacatccaaataattgctaatcgtgcatataattaagtaattaccattccaacttacacttaaacacacatttttcacggaagaggaggcagagtataaaatcaatgccgatcagtcggaaaattctaacgtgggccgctttggtggcaattatggccgtcttggtcgtcttagtgggtccatacatcattggaccggagagtatagagggctcgaaaaacgtcctaaccacagcgaggacaatcctccttcccgtggatggaccggagagcctggactggacccaagaggagaaggcccatacgttggcgtcactgacggtcgcatcctcaaatggagcggtgaagatcttggctggattgaattcgcctactcatctccccataggtttgttttatttatggatgaagtcatgcaccaataataagtagactgtttcaacgcaaatatttgtgtttgattatattactggttaaaattttatatttatatcttggttattatatatttatatctttaacaaacattatacacatttttttggtaaatttaataatgtttgaaaacacttaattatcaataacattggttatagacaacacaattatttaactatattttaattttgtgttgtaaatatatgaagaaaaaattgttcgagccataaggtggaacctgcgtgtggaaggcctttgggacttagcttcgagaagaaatcgggagatttgtatttttgcgacggttacttaggggtaatg

SEQ ID NO: 30096 - DNA, 3003 bp, Unknown; identical to SEQ ID NO: 16889
  misc_feature (1)..( 3003): 2750-1469P.txt file - cDNA_ID_3025927; gDNA_ID_2214563; Annot_ID_185922

SEQ ID NO: 30097 - DNA, 3003 bp, Unknown; identical to SEQ ID NO: 25687
  misc_feature (1)..( 3003): 2750-1469P.txt file - cDNA_ID_3025930; gDNA_ID_2214563; Annot_ID_185916

SEQ ID NO: 30098 - DNA, 3003 bp, Unknown
  misc_feature (1)..( 3003): 2750-1469P.txt file - cDNA_ID_3025955; gDNA_ID_2214564; Annot_ID_185962
agtcagcttttcggttctaatcaatggttctccacatggtcacatcaaccccactcgtggaatccgacaaggcgatccattatctccctatatattcatactttgtgctgaagttctctctcacatgatgaaccaagccgagatcaacaagcagcttaaagggataaaactatccacaagaggtccatctatctctcatcttctctttgctgatgattctctattttttactatggcaaatcataggtcatgccatgccattaaaacggttctacgtacttacgaggaagcttcgggtcaagcagtcaatttgcgaaaatcaactattacctttggcaaaaatgttagcaatgacataaagcgaagaatgagaaatctcctcggaatacacaatgagggaggtggcggaaaatacttggggctaccggaacagtttgataagaagaaatctgagatgtttcggtatattgttgagaaagttaaagaaaaaactcaaggttggagcaagaaatatctgtcacaagctggaaaagaggtactactcaaagcagtgctttagctatgccaatctactccatgaatgtgtacaagcgaacaaaagagatttgcaatgagattagtggagtactagcaaaattctggtgcggttcagacgctgaaaatcacggtatgcactggtttgcttgggatcgtcttgctttgccaaaacaggagggtggtcttggttttagggatcttgaaagttttaatttagcattacttggcaagcaaacgtggcgaatgcttcaatatccagagagtctaatggcaaaacttcttaaagggcgatatttccatgattcaaatatcctaaatgcagtccaagggaagaaggcctcttttatttggaaatccatcctacatggtagagatttagtcaggaaagggcttcgattctgtataggtgatggcacaatcgtcgacgcttggctggacccatggttaccaatgcatccccctagaccaagtgactccaccacctagaaacgttctcttgaaacaaagactatggaaattaagaactgctccgaaaatcaaacacttcttctggcggcttctatctacttctcttcctactggtgcaactttgaggtatcgacatattactaatgatgctaaacgtgtgagatgttgcagagaggacgaaacggtcaatcatctcttcttccgctgccattacgctcaagtcatatgaagaggctcgagaatcccaaatcccatctttctcgaccaaactgctccatgggacgataaaattcgcgccatctttaatatcaacacctcagcacgaacatctcatatgagacagttgcccttatggatcatgtggcgattatggaaaagtcgaaacacacttatgttccaacaacaaagtatacactggcggaaaagtctaagattagcgaagcaagatgcatgcgaatggcaagatgcagaagattatgttcaaaaaagctcaagcgggactcagattctaccctcaacggttaatattcaaaaaaattggacactcccacctagcggctggacaaaatgcaactatgatggtactttcaacagagacttgccaagtaaagctgcttggattatcagaaatgacagaggaacgttcttaggagcaggacaagcggtggggataacaacaacaaactctcttgagagcgagttacaagctctggtcatggcaatgcaaaattgttggagcaaaggccataagaaggtttattttgagggagataacaaagaggtagccgatacaatcaatgacaggaatccaaactttgcggtttttaattggctaagagaggttgtggcttggaaaacaagatttgaggattgtcgcttcacatgggttcgacgaaattccaacatggcagcagacacattagctaaacatgcactaccttcacatacttcttatcatttttctagttttactcctcatgtaattacagacatactccatcgagactttgtctctgcagttcaataataagattgatgttgatgaaaaaaaaagaaagtaaacttagtaaccgaaatatccgataaccgaaccgaatacccggaaacccaggattagctatagttaacaaaattaaatggataaaacaaaacgtacggttactacaaaatatccggcccataaaaggcccagtgatctctgaaaacatgcttcatgtcagatagataaaaaaaaaaaatagttattacggtcaaactttttttcctcttctgtgtttaaatttccaaatctcagtgtaccccacaaaacaaaattcgaaaaacctcgcaacgagcgcgagattcaaaaatcaaaatcaacaacacgcgaatcaaaagaaactgactcacacgcgcctctctcctcgaactccgtctcttttctctgctaaaacaaaaatcatctctcttctcgctctctgcttttgaatctctcttttttctctccaccacctgagattttcccatcactttcccggaaaaagcagcgattatcttcatggcttctcactcaccactatcccactgatgcttcagagtatgtttcgctactctctcttccccttaatttttcactttctctgcatttttctgtgttgttctttggaattagagtaatgcgcgatgaagaaaatggttgaatcgttactttagagtaattcgctgttgttttttggttattatcatcgtcttctatccaattttagagcgaattaagtagagattcgattttgtttagagtagagaaaatttcgaattcgctgttgttttttggttattatcatcttcttctttccaattatagagcgaattagggagagatttgaatttgcttcttcgattcaccagatccttgagctacatgtctcagactcaattctaattccttgttgcagttattggatttgaggaaggattatgaagacgaacatgcaagtaaaaggaagaggaggaaacatg

SEQ ID NO: 30099 - DNA, 3003 bp, Unknown; identical to SEQ ID NO: 25878
  misc_feature (1)..( 3003): 2750-1469P.txt file - cDNA_ID_3025995; gDNA_ID_2214564; Annot_ID_185949

SEQ ID NO: 30100 - DNA, 3000 bp, Unknown; identical to SEQ ID NO: 12672
  misc_feature (1)..( 3000): 2750-1469P.txt file - cDNA_ID_3026009; gDNA_ID_2214565; Annot_ID_185992

SEQ ID NO: 30101 - DNA, 3003 bp, Unknown
  misc_feature (1)..( 3003): 2750-1469P.txt file - cDNA_ID_3026013; gDNA_ID_2214565; Annot_ID_185991
tcacttctttccatccataaaaattgataagatccacaagggcagacatttggtgggcatcattaggtgtagtccgaagaaagaagggaaattggagggcagagagagttggatcagttgctgcaaatgagacaagaggaaagtggagcccttttgcaatatcggaaattgtatgagcaacagaggatgaaattggaccgatcatagccaccacttctttctcaagcaattcaaaagctgcaaaacaaaaaccactgaagcttaaaccaggcccttagtggtaaaaccaaagttttgtttccacttatgtacaggaaacacaggtcctagtaacagcctgtttagggtatgcggtctatattgttctatgcattattagcattcggaacccaaaatatgtaccaataaaaaacggattaaaacgtaaatcgatgtgccaatcatttccaactatcacaaaatgaaatattgttgctactgatgtgcattgaccgctttctataatatgtttgatatactgtatcagccatggatgagtgtcacaagtgtttgaaacacaaaagaactagaagaacagtcacggtacctccaaaggacccacgaaagacattgcaggcagaatcctccattaatagccgtagctccgtttctttgagaaagcttttatcattgttcacatcggaaacagctgcctctagagctacttttgcagctcttccgataaccgaatcaaaagcaaaaacagcaccgatgttcaccagttgaggtctttggcaatccattggaaccaccagaatgaccacaatcagtgccgtaatagcgacagatgggtcaatgcccagtcccatggagataatgcaatcaaagtaaggaccacttcagatagtttgtgttggaactagaaccatctcatttaaatctagcaactcttcattcagcattgaggatgagaagattagagaactaagcaaggtaaagtttccaactttgacctgtagagtcaatgcgattagaagacgaatcaagatctaagcgaagagcaatcacaagtcaaaccaaattgattattttagctgaaaactagcaacaatgtggatatgaagacttatatacacaaactcatccggacagaagaaaaatctgaaaaagagtttttacaaattcattgaaattaacaacagtgagacattctctttacctctttgagctaccttctggttctctctgcggaatatacgcaaacactttgtaggcataagttaaaaaagggaaattttacgacaacgcaacgaatttttaacaagagaagtcaagaactatcttttttaaaaaaccatgatttgacaggagattactaaaggaagagaaacaaaactagagagatcaaatcatgcccagaaattcatccatcattcttcttcttctgagaacaaaatagaagagagaaattgaaaaacgtgtgactgaagtgcttttttgattcgagctcacaaagtcctatctagtctatatactctatagtcacagcagccgtttgtttgtatttttgttttcagtggggcccatcattattgggccctacatgtaacggcccattttgttaagtttatttaagattagattacaatataaatattttaattgccatgtgttaatcattttatttcttctcaaaagtttattctcttaagttaatttgtcaatgaaatgttaatagtatttcattttatttttgcataaagagagacccgtagcaaggcaaaatttgagttggcgttttttattcataataaagatttttaggcggcaaaaaactattacataatgagattttatcacttattcatctaataatatttaattaaattacatatgtgtttttttctagctatgtcatttatttttacaatttatataaaattttgatatgtttccatgtatatatatattttaataaatgaaaactcaatccagaaaacataaattttgattttattttaaattatatgtttttatttataatttgttatctcttttatacattaaggtgtttttgcaataatacagtcttaatttttaaaaattacaattaagccctaaactttgtaaatgttccaaattaggaaggaaataaagaaaggagacaacttaaggttctcttattaaatgccattccctttctttcttacaagtcacaacctctctctctctctctctctctctctctctctctctgcgtctttctctttctctctgtctgaagttgagaacacgaaccactgaaaaacccgcgaaagactcgagcacgaaccaacaatggcggaacccaaaaccaagtatgatcgtcagctaaggtgcactctttctcctcccaactctctttctcttcttcaacttctctgtctctttcatcattcttcttaatttcgctcaaattgtgatgattggggataaattcataggatttggggagaattaggtcaatcagctcttgaaaccgcgagcatatgtttgctcaattgtggtccaactggctctgaggctctaaagaatcttgttattggtggaatcggaagtatcaccattgtcgacggatctaaagtagaaattggcgaccttggaaacaatttcatgggtataattctctctttttcatctttcttaagcaatgcgtttcttctatttgctgtttattgacatttattgatgattgttgttgatgtttcagtggatgcgaagagcgttggtcagtcaagagccaaaacggtctgtggctttcttcaggagcttaacgattctgttaaagcaaattttgttgaggagaatccagacactttgatatcgacagacccatctttcttctctcagttcactctagttatcgccactcaggtacattatgttgaggattagatagtttctagtctttgttttcagattttcacagagcgtttgccttattagtttgtcatgtgttgattgtagctagtagaagattcaatg

SEQ ID NO: 30102 - DNA, 3000 bp, Unknown
  misc_feature (1)..( 3000): 2750-1469P.txt file - cDNA_ID_3026029; gDNA_ID_2214565; Annot_ID_134943
cttcaattcttacgcgctgtatgcttacgattctgtttggttggtagctcgcgctctcgatgttttcttcagccaaggcaatacagtgactttctctaatgatccaagtctgaggaataccaacgatagcggcattaagctatcaaaacttcacattttcaatgaaggggagaggttcttgcaggtcattcttgagatgaattatacaggtctgactggacaaatcgagtttaattcagagaaaaaccggattaatccagcctacgacattctgaacataaaaagtacaggtccactgagagttggatactggtcgaatcatacaggtttctcagtcgcgcctccagagacattatactctaagccttcaaacacatctgcaaaagaccaacgtcttaatgagatcatatggccaggggaagtaataaagccacctcggggttgggttttccctgaaaatggaaagccgctgaaaatcggggtgcctaaccgtgtaagctacaaaaactatgcttctaaggacaagaacccgcttggtgttaaaggcttttgcatcgacatctttgaagctgcgattcaattgcttccatatcccgttccacgtacttatatactatatggggacgggaagaaaaatccttcatatgacaatctcataagtgaagttgctgcaaatgtgagtcctacttcttcttctattttactcaatcaattacacgaaacagtatacttatgttttgttctatttatgtctctagattttcgatgtagctgttggggatgttaccatcattacaaacagaaccaagtttgtagatttcacgcagccatttatagaatcagggcttgtggtggtagctccagtgaagggggccaagtctagtccttggtccttcttgaagccattcactatagagatgtgggctgtgaccggtgccctttttctctttgttggagccgtcatctggattcttgaacatcgatttaacgaagaattccgcggacctcctaggcgtcaaatcattacagtcttctggttagttccatacaattattgaatcgacacaaaactcatatgtattagtttaagctcaagtgctaaagctttgctttacccccttcctttctcgtcttcaatattgcaggtttagcttctcaacaatgttcttctctcacagtatgcacacaattacatttaagatcatacgaaaacatcaaagagaagaaactctcggttcttttcttttgttaccaaggtcgcaaggtgttttattcttcttcctttgttgatcttcaggggagaatacggtgagcacgttgggaaggtttgtgctactcgtatggttatttgtggttctaatcatcaactcaagctacacagccagtctcacttcaatcctcaccgttcaacagctaacatctcggatagaaggaatggacactttaatagcaagcaacgaacccattggagtccaagatggtacctttgcgtggaaatttctggtcaatgaacttaacatagctccatcaagaatcattccgcttaaagacgaagaagaatatctctctgctcttcaacgtggtcccagaggcggtggcgtggcagccattgtcgacgagcttccttacattaaagctctcttgtcaaacagcaactgcaagtttcgaacagttggacaggaattcactcggacaggctggggatttgtatgtgaaaaccaacttcaattttttaagatcagtctctgttaaaactttgcttaatggatctcgattcttgcaggcgttccagagagactctcctctagctgtggacatgtcgacagcgatcctgcaactggctgaagaaggaaaactcgagaaaatccgcaagaaatggcttacctacgaccacgaatgtacaatgcagatttcagatacagaaaactatcaaatatcggtacagagtttctggggactcttcctaatatgtggcgtcgtttggttcattgcactcacactcttctgctggaaagttttctggcaataccaacggttaagaccagaagagagtgatgaagtacaggcgaggagcgaggaggctggttcttctagagggaaaagtttgagagcagtgagtttcaaggatttgatcaaagttgttgataagagagaagcagagattaaggagatgcttaaggagaagagcagtaagaaactcaaagatggccaaagttcagctgagaattcgcagtcgaaagatcacgaaactccacagtgagatatataataacgagttacacaatttgtttaatgactgcagatataacattacacttagaaaggtacatagatttattacatagatagagataaaaatgcaaaacaatttccctaccatcttgcaagacgaacaagtgaactgagtcatggtttcaataccaagtagtctcaacattttaaaagatctaaaacgtaacactaagaaatgtaccttgctaaagaatttgcttaaggcaatgcaaggttgtaacttgcaagtgtgtttacgaatatgattcctccaaggcgtgagagataaggaattttgaaatgatcatgtctttagactccctgaaaaataaaaaataaaacatctgcaaattcaagagtcgaaagttattagaaccgtagagttcacatttttctagactatgtagaggatgtgaaacttattcaaatgtttagaacttaagattttgtaacagatcatgggctctcttaattagtgtagtccttcgggtgactattttttctggatactatatacatcctccgaggaagattatgggcctaaggcccggtagtgttcgaatttaccactgaatcaaaccggaaaaatggtagccgtttaaaccggttcgctttaatttagatttggccaattattaagtagccggctcttcgtttccgcggtcaacgacagattaaagcagagagaaaaacaaaatccattgaagaaggagaagaagaaaaaaaatg

SEQ ID NO: 30103 - DNA, 3000 bp, Unknown; identical to SEQ ID NO: 30102
  misc_feature (1)..( 3000): 2750-1469P.txt file - cDNA_ID_3026029; gDNA_ID_2214565; Annot_ID_185987

SEQ ID NO: 30104 - DNA, 3003 bp, Unknown; identical to SEQ ID NO: 25958
  misc_feature (1)..( 3003): 2750-1469P.txt file - cDNA_ID_3026036; gDNA_ID_2214565; Annot_ID_185983

SEQ ID NO: 30105 - DNA, 3003 bp, Unknown
  misc_feature (1)..( 3003): 2750-1469P.txt file - cDNA_ID_3026039; gDNA_ID_2214565; Annot_ID_185982
gagcatcaaattctgattttgatcataagttcataacttctgtacttgaggcttatagtcgaattcattgattttaagagcaaaaagaaaagtatttctggaaactatggttttgtgtattcgtctagtatttaaagttttgaaggtttaactatatattttgctttcaattattcaaatcccatttgaaaatgtgatagacgaaaaaaggtaagtggtaacatttttttttctttctaatcgacggattaaaataattgtgtctttttagtacccttttttccggttattgtacgaatgacttcactgaaggggaaaaaataatagttaaccataaagtaattactattctctacctagcggagatggtttatttcggtttagtcgaatggtttagtaccctatataaaccatttaaacttttaaagttgcaaagagaaacagaaacagagattgtgttgatcgtttttgaacactcgtcaagatttagatcaagattcactttttagtctttctctcgctcataggtatgtttctgcagattctttgttgtttctactaaatctctttcttagctcttttctcaaatctctgtctctccctctccgatcgatctcaagtaaacagtaactctgttcttatctctccctagctgctcattcaagacttgctattttcatctttttgtaatgcttcctgcgttttaccctaaaaacgaaactatagaagagacgagatagagattctttggaaagaagttaacatgaatgatgattgggattgggagggtttttatgatgagatagaggattttctcaagatattcggagaaccagaggtaaagtcttgttacattttcattgtataactagatcccacatttgtttaacgattcaccatattggttagacaccagcgttactaggagatgcagaaacgacacttccgttgaacatcaatcctcgtcccgagcctgtaccatctcaatttcaagtatctctctttcctttggtttttcgtttctgtcttcaacaagtttccatctttctaacacggtttatgatcatttctcttagtaccaaccaccgccaccacaactgccgttatcgtctagtttacacgctatacaagatcttgatcagtctaggcaatttggatacaacgagccaaatgtttctttatgtgaaacaagcaacagaactgctcagtttcaacgtggacactttcactatcaggtatctaatcgatacccttcgaaaactgctcaaagtgtctatcttttataagacaataagttgctaatatatatgtatcatcatttgctttaggaactaaacacaccatttgcaacagagagcttaaattctttattggcctccactgaagcgaaccagaacttatacacagtgccaccacataatttcggatatggtgagcccattggttctttatatgaaactagtaacagaacttatcagcttcaacgtggacactctcactatcaggtatcatcaaatatgatcttatccgtttcatctgctcaaaagtgtccatgttttataagactatgagttggtaatatatgttgttatcatattctgtaggaactatacacaccatcagttgaatttcagacgttattcccactgccacctcttaatattaatttcaatgagcctggtggtggtggttcttcaattgctgctgattctagtcaacaacaattcagctcaaatctacctatgtggcatgaaaatcagttgaacataggctcttttgactctggaccttcctcttctacagtggtaatgtcaaacatggacctatccacattcggtaaatcctctgaaatttgcaataaagcttacagatttgatatattaatcacacttgtcattaggtatcatcatcatcatcatcatcatcatcatcatcagaaaaccaacaagatcatcatgaacaagttgtaccaccaaatgaacttgatccattgaccatccagagaaatcaataccgagaggaagcaaaacagagatattttgagaagaagaggagtcgcaagtaagtgtttcgtttagctttctagttagggctgggatttcatcttcttattattgaggattttggtgaatctttgcagattcgtgaaggcacaccgatatgaaagtcgagcacaaacagctgcgaagaaaaaacgaagcagaggtagatttgtgaaaaacgatgacgaattcgacaatgaccccccagctatacagtgattgttctacttgtactttcgaaaccttggtgaaaaatttgtaaattatgggtgtcattgtcaagctttgttttttttttttttttttttttgtctctgatggtaccttcaatgtcacggaacatagaacttatttactacttctccacttaaaataactaaattggcgaaatgacccctcaatttcttcatttactttcaatgttacccgaaagtttaattttcttgtactttcgactttttcatttctccaaattcaccaaacactctctaattatcaactctccccacggccgttgccgccaacaaatccgccgcgaatccccaaatgtaatctccataacctctactatatcgacactgtgcagcttagagctgtcaaatggtccagcagcaaagccaggagaaactggaaacctcttagaccatcattaacgcaggcctcttaggtgggtttttagggttgttttgtgattaaaattaaattgcaaattgggctaaaatttaagaggcgctcttatataagagggccaaattatattaagaggcggtgacgtggcatgggtgagttgtctgaaaattgaagaaaaggaaagaaaaaaaaacagtcgtgggtttttgtttcttcagtctgtcgacgcttgctctctctctatttatcgaattccccgacggtgaacatcaccagacaaggaggaggagactaggaagatcgattttatcaatctcaattgaacaagatg

SEQ ID NO: 30106 - DNA, 3003 bp, Unknown
  misc_feature (1)..( 3003): 2750-1469P.txt file - cDNA_ID_3026045; gDNA_ID_2214565; Annot_ID_185979
cgttcgtgatgactccaagctgaagcatgacgtagacaggaacatagttggtcaacattttgtcttcatacgtcgtcgtattgaactctgtcgcctgtgttttcaagattaatgattcaaaaacacaaaaccagagagttaacagaaaaaaaagctcaaagattgttgttactactaacctttggttctgttgcagaagaagcagtggcttgatgcgttcttagagatccctccttgattgataatctccattggactcgttttttagtttctttatcttgtacaaaaattgaagatcctttgtggagatttcttccgttgatcagattagggttcatcattcctaatacgcttgtcatggtaccttgcacttgacggaactacaaaaatcatttactggaatcattatgatcatacacacacaaaaataattttttcagtgaaattaattaaatttgctaattttctggcgcgttcgtatgctatcaacaaaacgtggccataattttcttgcccaatttttttttttttttttttgtatttttgtttagtcacgtttttattccttgttttgtagtttcacggaaaatagaagaatgaattatcatataaccaataaatatctatgtgatactaggatagtggggtatgcaacattcgatcagtgtccatgaaggttctccagttactaatgaaaaatgtatgctcctgagacaactcatcgtgccttgataaataatcaattccatggacagtggtcgatataagatcctctgatttctaagaaagaccagacctctgattacatatcaccgacaacttctgcttctttccatttaagatatcttatgatttctaagaaagaccagacctctgataggactgaatctttcaaatacaaagtcatacggaattttcatgtgactagtggcggctacatgagacgacttctcatccggattatgaggctgaggtgaggagaagaaaaatacttcatcgttgtttttgcaggcaaacaagagctgtgggcgagccaaagatctggtcaagaacatcacggtaaaatagggatggccaagtatggaagcccatagctttgataacatctcgctataaattttttttttttttgaaaataatattaaattatatttaaagaaaaacatagcgtttgtacaactagtgcatcgaatagtagaaaattttagcagaaaattagaaacttttacacttagatccttgtttcaaaccaaacttgtaatccgttatcatagcgtttatcgcctagaagtcggattgtggaaaacggtttcggatttgtttgttaatccactcgatgatccaagaaactgtgtgtggagctttcccatgtcgtcgcctatttctccaccattaagtgaggtccttggtcgcatattgcataggcatgcaagacgatcctccaatgataaatcctagggctttgcggcttcggctctgctcttccacgatttcaacttatttttagaaaaagttgatctcaagtagagaaaccgaatgacgtgaagggctgagaggaagcccatgtaggacaaaatcagtctcgtttatgttcggtcgggctttttcaccaatctggttgaccactatcgagtcattggtaccgtaacaacaaagaagtaatacgtctgcacaatatgcattatctaatccgtcgaccaaaacaaaatggtgttggcattgacttttttttcttaacgtcatggtgtttgcattaacttatcttttttttcccttcacgtagaaattttcaaatggtacttcacttaagaattttagtttttttttttaaacatgtctttctttttagaaaaatcaactcggcctaaccccgacgcacaagaagtttattatcaaaactacgaacaactcgataaatctagacaataaaatattcatcatgaacctattaggaaaaaccgaattcaaactatttttcttttgtacctttcttactttatatgtgaaatattttagctttttatcaaattaacaaacgtaaacaaattaagtgaaaatgattataataaattaataatgttctactattgtcaaatacgaaatcttatgtaattgtcttccatttttggatgatttttcaactttacatgaacaaaatctagtactatattaagatttaagagatttgctttgataagacaaaagaattgttaaagtcaattaacttgcataagccgttgaccaaaacaaaaacatttgttttcttaaccaaaaaaaaaaaaaaaaaactctttcgatttgtttatccctctgtctcgctttcattgattattgtctttgctattaatctaatcatcacaacgtttctcttttcatctaaaatcgtttctctccattaagacttttattgattgttccttttctgggttttgccttccaagtcttccttaattcttcttacaacgtaaatactcatctcgtgaattgttcataggaggaaactcaatgcaatgtacactttgacgtttagggaaaaaattgaagacgttttttttttttgttaatgcgagtttttcgctaaaatacaaaagagggttttaattgaatctttctcagccgcttcaataaagccatcgacttttttttttgtgattcagattgaatcttttgatgggtttactttatttttattttctttggtatcaattgggtttaacatcatctcgatgcgattgttcatgttgagcagtgttgacgccttcttcagagtagcagcaagctattggtgaagaaagtttcctgttttggaaggtactcatttgtctttcttcgttgtaaagtctttcactttcgtggttggttattagacactagttttagttgaatttcgtaagagttaggttttaagctatgtcagttgttttgcgattggtttcagaacaaaactagagacagagaaagtttttgtctttggcatctatgtttgggggtgtcttgtctatg

SEQ ID NO: 30107 - DNA, 3000 bp, Unknown; identical to SEQ ID NO: 12660
  misc_feature (1)..( 3000): 2750-1469P.txt file - cDNA_ID_3026049; gDNA_ID_2214565; Annot_ID_134934

SEQ ID NO: 30108 - DNA, 3000 bp, Unknown; identical to SEQ ID NO: 12665
  misc_feature (1)..( 3000): 2750-1469P.txt file - cDNA_ID_3026049; gDNA_ID_2214565; Annot_ID_185978

SEQ ID NO: 30109 - DNA, 3003 bp, Unknown; identical to SEQ ID NO: 26310
  misc_feature (1)..( 3003): 2750-1469P.txt file - cDNA_ID_3026055; gDNA_ID_2214565; Annot_ID_185974

SEQ ID NO: 30110 - DNA, 3003 bp, Unknown; identical to SEQ ID NO: 25955
  misc_feature (1)..( 3003): 2750-1469P.txt file - cDNA_ID_3026059; gDNA_ID_2214565; Annot_ID_185973

SEQ ID NO: 30111 - DNA, 3000 bp, Unknown; identical to SEQ ID NO: 12655
  misc_feature (1)..( 3000): 2750-1469P.txt file - cDNA_ID_3026063; gDNA_ID_2214565; Annot_ID_185972

SEQ ID NO: 30112 - DNA, 3000 bp, Unknown; identical to SEQ ID NO: 12683
  misc_feature (1)..( 3000): 2750-1469P.txt file - cDNA_ID_3026078; gDNA_ID_2214566; Annot_ID_186004

SEQ ID NO: 30113 - DNA, 3003 bp, Unknown
  misc_feature (1)..( 3003): 2750-1469P.txt file - cDNA_ID_3026122; gDNA_ID_2214566; Annot_ID_186020
ctttaaagtattacccaaaggctattaaagtcgttttttccaatttgggctcctgatttattagtatgggagggcttagttttgggctttaaagtatgccccaatgcctaataatgtctagctagttcttcgttatactaaagaacgaattttggaaattcttgaattacgattgtacccttatattaatttcatcttttgtcttattcttatttatgcaaaagttatgcaaaagttttaagaaattagcagccaagcctaaagaatcattgagagtttataagggtgatttggtaattgagtagtttattagctaatttgatttcagtggcacgtggtaaattactggtggtttaaaactattgtacgtggacgattcttagccaacgaactagtacactctagtgcgaacaggtacatgattaaattcgtggacatccaatcatatctcgtccaagataagaccaaaacatatgaggtcattactcactaataaacatttaaacttttgttttgtcaacgaatagtgtgtttttcttttgtcattccaatttttttctgttttcttttcactattcacttttggtccataatattttatgggtatataagataatcgtttttgtcttcatacatggtaacatggatgtttatatatgtaatagtgttaaaaagaaaaagtggtcggttatacttaacttattatgatagagctttgaaaacaaacaacacgagatggagaaattagtcattcaacaaaagaaaaggacgaacgcagtgacttaacatgaaactgtgagcggcccaaaatcatttatgtaatggacccttaacttttcatgcacacgatttttctcatttatatgtttttctgctctctttttttcctctttatcattactttaatttattttatgttcttttttcgaagcaccataattgtatgctttcaccaaataatccaaatttagaatcattaatatgtcaaaaaagaattgcatatattcaataaaacgtaatgctaagtagtacaatgcatgtattatacaaaatgtaatgatatagatccaacgtatatatcaaagtggaccaaaatatatcttatgtattagacgagtttactatgcaaaatttatgattctattccgcatggagcgtgctaatactacttcgaacccctttgagaccaatatgtgattctatattctatctagtacaaattatgagaagtatatacgtacgatgagagtataaaacatttcaatatttgtatagagaggacaccacttggttgacttgacccacgataagatattgaagaaaccaaacttgtatagtacgaattcgaaatcgtaattgatgatgcgattcgacaagtccaggggctccctcccacgcgcaatgggcccagcaaccacgtgtggccactagagagaataaaccattagcccacgtgatcttgggcccaatcaatctctccctcacattaaacgacaaaacaaaagctcttctgggttaaattgataaatatcaaaactttaaaggtaatttgctaaaatcgccacacaaaaaaagtcgcagaaaatatatgaggaaacaaaaagcgaagacgacaaaaaaaaaaaaaactctgatttttttttgttatctctctctatctgagaggcacacattttgcttcgtcttcttcaatttattttattggtttctccacttatctccgatctcaattctccccattttcttcttcctcaagttcaaaattcttgagaatttagctctaccagaattcgtctccgataactagtggatgatgattcaccctaaatccttccttgtctcaaggtaattctgagaaatttctcaaattcaaaatcaaacggcatggtttccggagtcgggggtagtggcggtggccgtggcggtggccgtggcggagaagaagaaccgtcgtcaagtcacactcctaataaccgaagaggaggagaacaagctcaatcgtcgggaacgaaatctctcagaccaagaagcaacactgaatcaatgagcaaagcaattcaacagtacaccgtcgacgcaagactccacgccgttttcgaacaatccggcgaatcagggaaatcattcgactactcacaatcactcaaaacgacgacgtacggttcctctgtacctgagcaacagatcacagcttatctctctcgaatccagcgaggtggttacattcagcctttcggatgtatgatcgccgtcgatgaatccagtttccggatcatcggttacagtgaaaacgccagagaaatgttagggattatgcctcaatctgttcctactcttgagaaacctgagattctagctatgggaactgatgtgagatctttgttcacttcttcgagctcgattctactcgagcgtgctttcgttgctcgagagattaccttgttaaatccggtttggatccattccaagaatactggtaaaccgttttacgccattcttcataggattgatgttggtgttgttattgatttagagccagctagaactgaagatcctgcgctttctattgctggtgctgttcaatcgcagaaactcgcggttcgtgcgatttctcagttacaggctcttcctggtggagatattaagcttttgtgtgacactgtcgtggaaagtgtgagggacttgactggttatgatcgtgttatggtttataagtttcatgaagatgagcatggagaagttgtagctgagagtaaacgagatgatttagagccttatattggactgcattatcctgctactgatattcctcaagcgtcaaggttcttgtttaagcagaaccgtgtccgaatgatagtagattgcaatgccacacctgttcttgtggtccaggacgataggctaactcagtctatgtgcttggttggttctactcttagggctcctcatggttgtcactctcagtatatggctaacatgggatctattgcgtctttagcaatg

SEQ ID NO: 30114 - DNA, 3003 bp, Unknown; identical to SEQ ID NO: 16597
  misc_feature (1)..( 3003): 2750-1469P.txt file - cDNA_ID_3026129; gDNA_ID_2214566; Annot_ID_186014

SEQ ID NO: 30115 - DNA, 3000 bp, Unknown; identical to SEQ ID NO: 12709
  misc_feature (1)..( 3000): 2750-1469P.txt file - cDNA_ID_3026152; gDNA_ID_2214567; Annot_ID_186058

SEQ ID NO: 30116 - DNA, 3003 bp, Unknown; identical to SEQ ID NO: 25972
  misc_feature (1)..( 3003): 2750-1469P.txt file - cDNA_ID_3026160; gDNA_ID_2214567; Annot_ID_186052

SEQ ID NO: 30117 - DNA, 3000 bp, Unknown; identical to SEQ ID NO: 25971
  misc_feature (1)..( 3000): 2750-1469P.txt file - cDNA_ID_3026163; gDNA_ID_2214567; Annot_ID_186051

SEQ ID NO: 30118 - DNA, 3000 bp, Unknown; identical to SEQ ID NO: 12704
  misc_feature (1)..( 3000): 2750-1469P.txt file - cDNA_ID_3026172; gDNA_ID_2214567; Annot_ID_186047

SEQ ID NO: 30119 - DNA, 3003 bp, Unknown; identical to SEQ ID NO: 26316
  misc_feature (1)..( 3003): 2750-1469P.txt file - cDNA_ID_3026203; gDNA_ID_2214568; Annot_ID_186098

SEQ ID NO: 30120 - DNA, 3000 bp, Unknown; identical to SEQ ID NO: 12742
  misc_feature (1)..( 3000): 2750-1469P.txt file - cDNA_ID_3026209; gDNA_ID_2214568; Annot_ID_135015

SEQ ID NO: 30121 - DNA, 3000 bp, Unknown; identical to SEQ ID NO: 12723
  misc_feature (1)..( 3000): 2750-1469P.txt file - cDNA_ID_3026209; gDNA_ID_2214568; Annot_ID_186096

SEQ ID NO: 30122 - DNA, 3000 bp, Unknown; identical to SEQ ID NO: 12725
  misc_feature (1)..( 3000): 2750-1469P.txt file - cDNA_ID_3026213; gDNA_ID_2214568; Annot_ID_186094

SEQ ID NO: 30123 - DNA, 3003 bp, Unknown
  misc_feature (1)..( 3003): 2750-1469P.txt file - cDNA_ID_3026220; gDNA_ID_2214568; Annot_ID_186090
ggtgacgtttgggctattcctagctagcaaggtatcattggttagagctgtgtcgtacatggtggctcagtgtctcggagccacttgtggagttggtttggtgaaagtcttccagtcgacttattacaaccgctacggtggtggagccaacatgctctccgacggatacaatgttggcgttggggttggtgctgagattatcggcacttttgtcctcgtctacaccgtcttctccgctaccgaccctaagcgaaatgcccgtgactctcacattcctgtaagcaattttaactatcctacaagcctcaatcacatgaataacattaaaaagtatcaaaaacctagctaaagacttatagtagtacataaaattgatagttttctttcgtttcatttatttttaacaaaatgtagtactcgtggtaattacagaaataaataatggaagaaatattaggatagattttttgatttcgttgtcgacaatttttcgtacagaatcaaaatctagtgccagctatataacgcatttatttaatactgaaaacgatgtcgtctagccattttggccctaacgaaaataatacggaccaagtgtaacgtctatcttcttctatgagataaacgacgaaagggtgtccaattatttttcactcatttcttgttcgtttctttggtaccaaatgtctatttacacgttataacgacataccatatttgtgctccacgtctcttcatcacatgtctctgtatgtaaatggtccatattttgcatttccacaacgacccatgtgtatgtgtacatacattttccatgatatttgtccttgcaaatatatatgattcgttacaaaacaaatctttctgttatgcacatggtcattaattgattctttttcccattctagtaatcttggtacctatgattcattcaaatttaaatgtctatgtcattgattgttaatgacgtaagttgatttattttgtatgaaattattgaattgtaggtattagcaccattgccaattggattttccgtgttcatggttcatttagccacaattccaattactggcaccggaataaacccggctaggagttttggagctgccgtcatctacaacaatcaaaaggcttgggatgatcaggtttgtattttcaccatctgatattcgttcttgggttttaaattaacatattaatgagttttgttttaataactacagtggatcttctgggtcggtccatttgtgggtgcagccattgcagcattttaccatcagtttgtgttgagagctggtgcaatgaaggcctatgggtcagtcaggagccagcttcatgagctccatgcttaaatttgttatttcgaactagcgaagaggtgaagaattctttgggccaggaagggaggaaggaaaaaaaaaagggacccaaatcatataaaagaaaaaacgaatattatttaagatggtcggtgagtgacatttactgtgtcttatttgtggctttgtgggggaggtttgtgtgtaacaatttgtaacgtacaagcaatgtatgtgttatttgatgcatatgatatttatatatctacttattgatgattctatctttgatcaatcatcattataacttaaatttcatagaaaaaaacacaaactccaaaaccataaactactattgttcctaaattctcaggaatgtcaatgtcgatcacaatcttaaaatttcatgctaaagatcctttgggtcttttccatcaacggtgcatcctatcaatcactgaaaaataaagggcacaaacatttgtaatcgtctcaaacaaacaaataaaaaatgttgaaatgataacgccatggataaaatgttgaaataaaaataaatgattcacgacacatgtttagctatgtataggagaaaaaccaaatcctctcacttttctcttttatctggttcccctcagatttctttactatcttgttcctcttactttcctctatttctttggtattgccatctagtgagatcttaacatctcacaacttatatggcaccttcctctattttctatattttttcaaccgcataatgaacatgacaccaacaatcagaagtagaaacccaaccaatatccacaggtgtgaaacatagaattaccagatttagcatcagtctgacacatcttgtatggatactaagagagagggtagagtctagcatgattcttgagaataggtagataatcggcaataaatgcaacattgtttacactagtaaattgacatatttagcaataaaaatgtatatataaatgttaataaaaccaataaaagaaatctatttcacatttaatatcatgcgattgttgtaagatgtggtagcttagccgatcttccaaatatgcaagatctagctcatatttttgagcatgtgtagtttaggttcaaaataatatcttagagaaaataaagttggtaattagaatattattagaaatcaactcacacacatcgtgtgggtttattggtatcatatattattctacctattttattttattgaacaatgtgtctttaaaaatgaataagtacataattttttagacttatattttgaaattttgtctatattaatacttactatatatgaattgaacttgttaaatattgtattgacttttgtagtggtaagaagaaacaataaaaatccataaaaacaataacttggtttagcttttggttacgtatgtaagggggttactaaaagtaaaaacactgggtttgggctgggttcagtaactctcatacaaaatccataaaaactttgggctgggctcattcaaaatccatacttattttattactttcctaattaaaaaaaatacacatagcacaagaaaaaccaccgcccaagcttctctagaacctctccatcgttctcactatcactccccccccccccaaatataaaccctaattttcacaatcacagtaccaaaaaaaaatg

SEQ ID NO: 30124 - DNA, 3003 bp, Unknown
  misc_feature (1)..( 3003): 2750-1469P.txt file - cDNA_ID_3026224; gDNA_ID_2214568; Annot_ID_186089
acaaaaccattatccaaaaagacaatgtacattccgacccaaccacaagctcatcacgatccacaaatgtcgccacgtctctcgccgacatcatagaagtgtactaaccgtgtggtgtccagatgccatgtctcctgcttagaagtttccgcgacagaagattcacttcttcatctttttaaaaaaaaatgcagaatcattttcgatatcttacatgggtcactttttaatagttattgttctgttactttttttttccttacattaattaatactttatcgaatgtttgtttaagccgttttgggtaagctatttgttatgaacaataaagttgtcggaacaaagaatggagaaccttaaatgaagcctttgtatttcacgcaattgttttttacttttaagcagccctataccaattttttcacgtgttttaaacattcttgtttatagtaacaatttgagtctttttgcttcttcttttttaattacagcacgtattagcagcaaaatgatattattgacttatagtcatgtgactcatgtaaaaaataaaaattcaaaacaagaagatgttataaaaatatggatgaagatgaattgtatacatagaattaatattacaatgaatccgaatgtgtttagataagttgtaaattacaaaattgcgtagaaaaaaaaaaaatgttttgctatcagtatatccgtaatactttttatgaacggtcccatctctaggaaaaatgagtaatataattcatgaagcaattcattttcattttatttacagaaaaaaataatggtcgtcgctcgattattaagtgggacatttgtttttttttttggtattattaagtgatgcatcatctgttgtagtcttgtagaactctataatccgccaaatgcttcgcttcaaatatattcttgtatttatcttggtgtccaatcctactctgccatggacgggcctagctacgtaaattagatgggtctaccacggacaccacgtggacaagatttaatgttcatggttcatggaggtcgatcgtcttcccaaaaaaacagtcatttgatcctgtgttaataaaagtggatgatattcatgttaatatttattaaattatatggtttctcattctccattcttcatatcgtaattcttgctccacatatgaaacatttcaaatgttgggaataaaaggtttttttcagaaaatataataatcgtggtaaattcaatcccatcgcaagctctcctattggggttgggaaaatctttgaaaattttctttcaggctgtgtttagttccatggccaccttaatgaccagtatctttaaatacggcaagagttttaaatttgaaaagaaaaacaaaaacgtaaaatttcaagtattagacaacgtacattcttaaataggtgattgttgactccttgattaggagagctttcagatacattcgccccatttcactgtcatgtcatttgtatatactgttgctcgtcaaataatctgattctttgtttcaatttgtaatagcatttaaattacttttatttttctgcgttaaacttttcgactaaaggtcggtccaatttgcattttaaattactcttatattttctgcgttaaatgtatgagcgacgactctttcattttaagtagtctttttcattactttgcaacatctatcagtgtctgttattttgcattttttttggtcttttaagaactgaaatctaagaatctacgctaattacatgaatacaaccattctatcatttttctgtaattatggtgatatgaggaaaaaaataaataatggttgacagttatactaaacctaaacatattcgggtattaaagttacttggttagaaagaaaaattaaaaacccaaaatttatattttaaaatttctctttaaaggtttagctccggctatgaggatattgcgcacaacacaaagcctcgtatcaagtagtctacatgaaatgtttgcccattgtaattttgtaaactagcttgtttgttcgtgggtaaaataacttaataggaaaataccagcaaaaaaaggcgagaggaattagtgatttttccccccaacaaaattgttgcaaaataaccaaatcaaaatcaattgaaagcatattctttagacatcaatagagtcttcatagactaatcacaatcataaacacctgtagtgttcccttattttacgaactttttaataaataaaaaagaagaagataaattaattaacctcattgcaaaagaggaaaaacctaaagccacagctttccataaatagacccactcaccatctctgcacatcacccacatcttctaacagtctctcactttctctcttctctctctctctttcttttttgagtccgtgaaggctaagtctgaaagaatgacgaaggatgagttgacggaggaagagtcgctctccggcaaggactacttagacccaccgcctgtgaagacgttcgaggtgagagagctcaagaagtggtccttctacagagctgtcatcgctgagttcatagctactttgctctttctatacgtgactgttttgacagtcatcggctttaagagccagactgatatcaacgccggcggcggagcttgtgccagtgtcggcctcctaggcatctcttgggcctttggtggcatgatattcatcctcgtctactgcactgccggcatctctggtctctctctctctctctctctctctctctctctctctctctttccttaaccattttttgcattatctgatttgcatagcaaaatgcacatgcttcatcattcgaggctcctatacatgtcctcgtaacaaagaagcagaatttcaaaaataccaaatcaaccaaactatagtagttaaatgattgatgatacacaatgttggccagtatacatatgtggtaagaaaacttagctttctagaacattaaattccatccaaattaaaattccaaataatg

SEQ ID NO: 30125 - DNA, 3003 bp, Unknown
  misc_feature (1)..( 3003): 2750-1469P.txt file - cDNA_ID_3026232; gDNA_ID_2214568; Annot_ID_186085
tcgcgaatcgccgccggagcgatggagtaaaattgttacgattttgaaaaggagaagcgtggtggaagaatttcgaattaggattttgatagtgtgtaaacgacggtggtcaatccatgagctccggcgacggcgaacttcactggcaacgttgagagtttgtgtgattcgaaaacgtaaggatagcatagtttaattggatatagtgcccatttaatcaggcccaataaatttttatttggcccacttctttgttcattaagcgatgttgcatgagaagaaacatgcatgcgctatatatagcacaaaaagtggtccaaaatatttgatttcagtttacaagtaatttacatctaactattatagattgatcgagtttgtacgggatatcaagacctgataaaagtaaatttgaaaaatatttatgtatatataatcgggaaaaaacccgaaaaaaccgccatctatttaatttttggccgtttaatacccgtgtttttaaatttggaataataatacctcgtttagtttccgcgccctattaaaacattcatctaatttaaagtggtgaaattgtactcccgcgttaacggtgattaactttgctaacggaggctttaactggagttaaaatataaccacacgtggttaaatgaagtaaacaaaacacagtcgtgacctttagcctttttccccaaatcgaaaaacataaaccctaatttcgattggattgaaatcgagagattctatgtgtttggacgcttgattgactgcggtttggtcggaatttgggattgaggagtccgattagtcgcgtcgcgatgaggtatgtgttgatttagggttcatttaattctgggtttcggattaggatttcgcgttcttggtttttcctctcttttaatttcttctgttcgtttgcagtggattcgactgtctgaaactgaatataaagtacggaggagaggtctcctttgtcgatgagtcgttcacttaccttggaggattcgagaagagggacatgtcgatggatcccgatctgatgacgtggtcgatctttgctgatttccctagtgagaatggagtatctgctcccgtggagaacgtgtggtacaaacttgcaaatgaagacttagcatatgtaagagctatacccgaggatagagatagtgggattaggcaatcatcagattatttcgtcattactatatttcataattattctcttaagctaattatcgtatgtcatcaaggatacactgcccggagatatttcactttgttcaagatatttgcgttatatatttaatcgtgtcagtgtttttagaaattgtcaactccctatctcttgttagtttgccatttgtttactgtatcgagaaacgatggagtatgagtgttaggaggtcttgagaaacgttttctcattcatcttaactatatcaaatgtttaagaaccaagaaaaaaaacaatctttcattatacgggatcgaccttttctttgaaatgttgaaaaaggcaaaaaaaatttggtttgaaatctctataaattaatactcgataaattaataacttttataagttataaataattcatgtcttgactcgggactagtgtaaaaattgatacaaatcgataaattaataaaactataacttttttgaaaattctatgtaaatatatattcttatcaatattataaattaataattgtataaatttatgaatatatatttatatgtatgaatatagattatgtaaaatatgactttggtattatttttatttaatttatattaattctttgtagactttaattctaatatttttattacgtagaaaatttatttatttatttttaaacctaataatggttttcgacttgtaattggttttagaaagattattgattgtatagaaaaaactatttttttgatcaaatttttgtacaaaatttataatttatcgataaatcaaaactttattaaattaataattttttccgatcccaacattattaatttataaaggttttactgtatatactaaacgttcaaatctgttaaaaccatctaaggttttttttttgtgttttgattcaggtctccggaagtcgaagggtagaaaaatgcagagaagtgaagacatcaacgcacgatgtaggagtagctttttgttgcatctcaattatttcatcatcttttgttgtagctttagcaaatttccttttcagaaccagtacgttaaattgtgcactaagacgggagtgcgtttgaagaaccacattgtattttctcctcaatcacctgactctatgaattttcccaaagccaatttatttagaagtatgatttgaaaaacatatgtttttaaacagagctcttcacttcttcttgtgactcattttcttaaaacatttattgtgaacatgttgttgataatcaacattccacataacatatgttgcaaaaacataagtgatcgtagaccacaagatacgaggctctttttatatcgttagtgttgtccatattgccggctacataacttcgcatcctttcattaatttggaacattttggtagctctagctggtcccaagaccaaaccccattacatttaatcttttaaaaaaattgttccatccctttttcaaatactgtcgtagactatatgtttttttcaaaaaagattgccatataatattaatgtaaattttgaccgtaaatttttataatttgaatatatgtttcaaatttaatataactgtaaaacagaaaattttccaaaaggcaatttatttacaaatataacaaaaaagtagctaatatacgaactactttttccgtctgataaatgcgaaattagataacatcacttaaatgccaacacatttaatcaagagcgaaagaaaaacacagtaacttagtataagaaccaagtgtggctaaaggcaaagttggagagtaatcatgtatactatgaaaaagggaaaagacatg

SEQ ID NO: 30126 - DNA, 3000 bp, Unknown; identical to SEQ ID NO: 12730
  misc_feature (1)..( 3000): 2750-1469P.txt file - cDNA_ID_3026240; gDNA_ID_2214568; Annot_ID_186083
